United States Patent Application Publication US 2022/0211838 A1 - sequence listing, part 10

SEQ ID NO: 13338 - protein, 201 aa, Artificial Sequence; identical to SEQ ID NO: 13310
  SARS-CoV-2/France/HF1805/2020__EPI_ISL_414628 spike protein (329-529)

SEQ ID NO: 13339 - protein, 201 aa, Artificial Sequence; identical to SEQ ID NO: 13310
  SARS-CoV-2/Netherlands/ZuidHolland_9/2020__EPI_ISL_414445 spike protein (329-529)

SEQ ID NO: 13340 - protein, 201 aa, Artificial Sequence; identical to SEQ ID NO: 13310
  SARS-CoV-2/Finland/FIN03032020A/2020__EPI_ISL_413602 spike protein (329-529)

SEQ ID NO: 13341 - protein, 201 aa, Artificial Sequence; identical to SEQ ID NO: 13310
  SARS-CoV-2/France/GE1977/2020__EPI_ISL_414632 spike protein (329-529)

SEQ ID NO: 13342 - protein, 201 aa, Artificial Sequence; identical to SEQ ID NO: 13310
  SARS-CoV-2/Finland/FIN-313/2020__EPI_ISL_414641 spike protein (329-529)

SEQ ID NO: 13343 - protein, 201 aa, Artificial Sequence; identical to SEQ ID NO: 13310
  SARS-CoV-2/Netherlands/ZuidHolland_2/2020__EPI_ISL_414556 spike protein (329-529)

SEQ ID NO: 13344 - protein, 201 aa, Artificial Sequence; identical to SEQ ID NO: 13310
  SARS-CoV-2/USA/WA-UW31/2020__EPI_ISL_414618 spike protein (329-529)

SEQ ID NO: 13345 - protein, 201 aa, Artificial Sequence; identical to SEQ ID NO: 13310
  SARS-CoV-2/South Korea/SNU01/2020__EPI_ISL_411929 spike protein (329-529)

SEQ ID NO: 13346 - protein, 201 aa, Artificial Sequence; identical to SEQ ID NO: 13310
  SARS-CoV-2/China/WF0004/2020__EPI_ISL_413694 spike protein (329-529)

SEQ ID NO: 13347 - protein, 201 aa, Artificial Sequence; identical to SEQ ID NO: 13310
  SARS-CoV-2/China/WF0028/2020__EPI_ISL_413791 spike protein (329-529)

SEQ ID NO: 13348 - protein, 201 aa, Artificial Sequence; identical to SEQ ID NO: 13310
  SARS-CoV-2/2019-nCoV/USA-CruiseA-18/2020__MT159716.1 spike protein (329-529)

SEQ ID NO: 13349 - protein, 201 aa, Artificial Sequence; identical to SEQ ID NO: 13310
  SARS-CoV-2/SARS-CoV-2/Yunnan-01/human/2020/CHN__MT049951.1 spike protein (329-529)

SEQ ID NO: 13350 - protein, 201 aa, Artificial Sequence; identical to SEQ ID NO: 13310
  SARS-CoV-2/USA/WA-UW292/2020__EPI_ISL_418077 spike protein (329-529)

SEQ ID NO: 13351 - protein, 201 aa, Artificial Sequence; identical to SEQ ID NO: 13310
  SARS-CoV-2/Iceland/192/2020__EPI_ISL_417819 spike protein (329-529)

SEQ ID NO: 13352 - protein, 201 aa, Artificial Sequence; identical to SEQ ID NO: 13310
  SARS-CoV-2/Belgium/ULG-6939/2020__EPI_ISL_417020 spike protein (329-529)

SEQ ID NO: 13353 - protein, 201 aa, Artificial Sequence; identical to SEQ ID NO: 13310
  SARS-CoV-2/France/HF2496/2020__EPI_ISL_418231 spike protein (329-529)

SEQ ID NO: 13354 - protein, 201 aa, Artificial Sequence; identical to SEQ ID NO: 13310
  SARS-CoV-2/USA/WA-UW291/2020__EPI_ISL_418076 spike protein (329-529)

SEQ ID NO: 13355 - protein, 201 aa, Artificial Sequence; identical to SEQ ID NO: 13310
  SARS-CoV-2/Portugal/PT0034/2020__EPI_ISL_418019 spike protein (329-529)

SEQ ID NO: 13356 - protein, 201 aa, Artificial Sequence; identical to SEQ ID NO: 13310
  SARS-CoV-2/Iceland/202/2020__EPI_ISL_417750 spike protein (329-529)

SEQ ID NO: 13357 - protein, 201 aa, Artificial Sequence; identical to SEQ ID NO: 13310
  SARS-CoV-2/USA/WA-UW261/2020__EPI_ISL_418046 spike protein (329-529)

SEQ ID NO: 13358 - protein, 201 aa, Artificial Sequence; identical to SEQ ID NO: 13310
  SARS-CoV-2/Portugal/PT0035/2020__EPI_ISL_418020 spike protein (329-529)

SEQ ID NO: 13359 - protein, 201 aa, Artificial Sequence; identical to SEQ ID NO: 13310
  SARS-CoV-2/USA/NY-NYUMC7/2020__EPI_ISL_418192 spike protein (329-529)

SEQ ID NO: 13360 - protein, 201 aa, Artificial Sequence; identical to SEQ ID NO: 13310
  SARS-CoV-2/Iceland/189/2020__EPI_ISL_417709 spike protein (329-529)

SEQ ID NO: 13361 - protein, 201 aa, Artificial Sequence; identical to SEQ ID NO: 13310
  SARS-CoV-2/Australia/NSW56/2020__EPI_ISL_417408 spike protein (329-529)

SEQ ID NO: 13362 - protein, 201 aa, Artificial Sequence; identical to SEQ ID NO: 13310
  SARS-CoV-2/Iceland/280/2020__EPI_ISL_417608 spike protein (329-529)

SEQ ID NO: 13363 - protein, 201 aa, Artificial Sequence; identical to SEQ ID NO: 13310
  SARS-CoV-2/Iceland/247/2020__EPI_ISL_417575 spike protein (329-529)

SEQ ID NO: 13364 - protein, 201 aa, Artificial Sequence; identical to SEQ ID NO: 13310
  SARS-CoV-2/Iceland/238/2020__EPI_ISL_417566 spike protein (329-529)

SEQ ID NO: 13365 - protein, 201 aa, Artificial Sequence; identical to SEQ ID NO: 13310
  SARS-CoV-2/Greece/16/2020__EPI_ISL_418265 spike protein (329-529)

SEQ ID NO: 13366 - protein, 201 aa, Artificial Sequence; identical to SEQ ID NO: 13310
  SARS-CoV-2/Iceland/319/2020__EPI_ISL_417648 spike protein (329-529)

SEQ ID NO: 13367 - protein, 201 aa, Artificial Sequence; identical to SEQ ID NO: 13310
  SARS-CoV-2/Congo/94/2020__EPI_ISL_417947 spike protein (329-529)

SEQ ID NO: 13368 - protein, 201 aa, Artificial Sequence; identical to SEQ ID NO: 13310
  SARS-CoV-2/Congo/158/2020__EPI_ISL_417950 spike protein (329-529)

SEQ ID NO: 13369 - protein, 201 aa, Artificial Sequence; identical to SEQ ID NO: 13310
  SARS-CoV-2/USA/UT-00034/2020__EPI_ISL_417977 spike protein (329-529)

SEQ ID NO: 13370 - protein, 201 aa, Artificial Sequence; identical to SEQ ID NO: 13310
  SARS-CoV-2/USA/UT-00033/2020__EPI_ISL_417976 spike protein (329-529)

SEQ ID NO: 13371 - protein, 201 aa, Artificial Sequence; identical to SEQ ID NO: 13310
  SARS-CoV-2/USA/WI-13/2020__EPI_ISL_417516 spike protein (329-529)

SEQ ID NO: 13372 - protein, 201 aa, Artificial Sequence
  SARS-CoV-2/India/1-27/2020__EPI_ISL_413522 spike protein (328-528)
FPNITNLCPFGEVFNATRFASVYAWNRKRISNCVADYSVLYNSASFSTFKCYGVSPTKLNDLCFTNVYADSFVIRGDEVIQIAPGQTGKIADYNYKLPDDFTGCVIAWNSNNLDSKVGGNYNYLYRLFRKSNLKPFERDISTEIYQAGSTPCNGVEGFNCYFPLQSYGFQPTNGVGYQPYRVVVLSFELLHAPATVCGPKK

SEQ ID NO: 13373 - protein, 201 aa, Artificial Sequence
  SARS-CoV-2/pangolin/Guangxi/P4L/2017__EPI_ISL_410538 spike protein (323-523)
FPNITNLCPFGEVFNASKFASVYAWNRKRISNCVADYSVLYNSTSFSTFKCYGVSPTKLNDLCFTNVYADSFVVKGDEVRQIAPGQTGVIADYNYKLPDDFTGCVIAWNSVKQDALTGGNYGYLYRLFRKSKLKPFERDISTEIYQAGSTPCNGQVGLNCYYPLERYGFHPTTGVNYQPFRVVVLSFELLNGPATVCGPKL

SEQ ID NO: 13374 - protein, 201 aa, Artificial Sequence; identical to SEQ ID NO: 13373
  SARS-CoV-2/pangolin/Guangxi/P5L/2017__EPI_ISL_410540 spike protein (323-523)

SEQ ID NO: 13375 - protein, 201 aa, Artificial Sequence
  SARS-CoV-2/pangolin/Guangxi/P5E/2017__EPI_ISL_410541 spike protein (323-523)
FPNITNLCPFGEVFNASKFASVYAWNRKRISNCVADYSVLYNSTSFSTFKCYGVSPTKLNDLCFTNVYADSFVVKGDEVRQIAPGQTGVIADYNYKLPDDFTGCVIAWNSVKQDALTGDNYGYLYRLFRKSKLKPFERDISTEIYQAGSTPCNGQVGLNCYYPLERYGFHPTTGVNYQPFRVVVLSFELLNGPATVCGPKL

SEQ ID NO: 13376 - protein, 199 aa, Artificial Sequence
  SARS-CoV-2/pangolin/Guangxi/P1E/2017__EPI_ISL_410539 spike protein (321-521)
FPNITNLCPFGEVFNASKFASVYAWNRKRISNCVADYSVLYNSTSFSTFKCYGVSPTKLNDLCFTNVYADSFVVKGDEVRQIAPGQTGVIADYNYKLPDDFTGCVIAWNSVKQDALTGGNYLYRLFRKSKLKPFERDISTEIYQAGSTPCNGQVGLNCYYPLERYGFHPTTGVNYQPFRVVVLSFELLNGPATVCGPKL

SEQ ID NO: 13377 - protein, 1211 aa, Artificial Sequence
  SARS-CoV-2/Wuhan/WIV05/2019__EPI_ISL_402128 spike protein (1-1211)(N914C_S1123C)
MFVFLVLLPLVSSQCVNLTTRTQLPPAYTNSFTRGVYYPDKVFRSSVLHSTQDLFLPFFSNVTWFHAIHVSGTNGTKRFDNPVLPFNDGVYFASTEKSNIIRGWIFGTTLDSKTQSLLIVNNATNVVIKVCEFQFCNDPFLGVYYHKNNKSWMESEFRVYSSANNCTFEYVSQPFLMDLEGKQGNFKNLREFVFKNIDGYFKIYSKHTPINLVRDLPQGFSALEPLVDLPIGINITRFQTLLALHRSYLTPGDSSSGWTAGAAAYYVGYLQPRTFLLKYNENGTITDAVDCALDPLSETKCTLKSFTVEKGIYQTSNFRVQPTESIVRFPNITNLCPFGEVFNATRFASVYAWNRKRISNCVADYSVLYNSASFSTFKCYGVSPTKLNDLCFTNVYADSFVIRGDEVRQIAPGQTGKIADYNYKLPDDFTGCVIAWNSNNLDSKVGGNYNYLYRLFRKSNLKPFERDISTEIYQAGSTPCNGVEGFNCYFPLQSYGFQPTNGVGYQPYRVVVLSFELLHAPATVCGPKKSTNLVKNKCVNFNFNGLTGTGVLTESNKKFLPFQQFGRDIADTTDAVRDPQTLEILDITPCSFGGVSVITPGTNTSNQVAVLYQDVNCTEVPVAIHADQLTPTWRVYSTGSNVFQTRAGCLIGAEHVNNSYECDIPIGAGICASYQTQTNSPRRARSVASQSIIAYTMSLGAENSVAYSNNSIAIPTNFTISVTTEILPVSMTKTSVDCTMYICGDSTECSNLLLQYGSFCTQLNRALTGIAVEQDKNTQEVFAQVKQIYKTPPIKDFGGFNFSQILPDPSKPSKRSFIEDLLFNKVTLADAGFIKQYGDCLGDIAARDLICAQKFNGLTVLPPLLTDEMIAQYTSALLAGTITSGWTFGAGAALQIPFAMQMAYRFNGIGVTQCVLYENQKLIANQFNSAIGKIQDSLSSTASALGKLQDVVNQNAQALNTLVKQLSSNFGAISSVLNDILSRLDKVEAEVQIDRLITGRLQSLQTYVTQQLIRAAEIRASANLAATKMSECVLGQSKRVDFCGKGYHLMSFPQSAPHGVVFLHVTYVPAQEKNFTTAPAICHDGKAHFPREGVFVSNGTHWFVTQRNFYEPQIITTDNTFVCGNCDVVIGIVNNTVYDPLQPELDSFKEELDKYFKNHTSPDVDLGDISGINASVVNIQKEIDRLNEVAKNLNESLIDLQELGKYEQYIK

SEQ ID NO: 13378 - protein, 1207 aa, Artificial Sequence
  SARS-CoV-2/bat/Yunnan/RaTG13/2013__EPI_ISL_402131 spike protein (1-1207)(N910C_S1119C)
MFVFLVLLPLVSSQCVNLTTRTQLPPAYTNSSTRGVYYPDKVFRSSVLHLTQDLFLPFFSNVTWFHAIHVSGTNGIKRFDNPVLPFNDGVYFASTEKSNIIRGWIFGTTLDSKTQSLLIVNNATNVVIKVCEFQFCNDPFLGVYYHKNNKSWMESEFRVYSSANNCTFEYVSQPFLMDLEGKQGNFKNLREFVFKNIDGYFKIYSKHTPINLVRDLPPGFSALEPLVDLPIGINITRFQTLLALHRSYLTPGDSSSGWTAGAAAYYVGYLQPRTFLLKYNENGTITDAVDCALDPLSETKCTLKSFTVEKGIYQTSNFRVQPTDSIVRFPNITNLCPFGEVFNATTFASVYAWNRKRISNCVADYSVLYNSTSFSTFKCYGVSPTKLNDLCFTNVYADSFVITGDEVRQIAPGQTGKIADYNYKLPDDFTGCVIAWNSKHIDAKEGGNFNYLYRLFRKANLKPFERDISTEIYQAGSKPCNGQTGLNCYYPLYRYGFYPTDGVGHQPYRVVVLSFELLNAPATVCGPKKSTNLVKNKCVNFNFNGLTGTGVLTESNKKFLPFQQFGRDIADTTDAVRDPQTLEILDITPCSFGGVSVITPGTNASNQVAVLYQDVNCTEVPVAIHADQLTPTWRVYSTGSNVFQTRAGCLIGAEHVNNSYECDIPIGAGICASYQTQTNSRSVASQSIIAYTMSLGAENSVAYSNNSIAIPTNFTISVTTEILPVSMTKTSVDCTMYICGDSTECSNLLLQYGSFCTQLNRALTGIAVEQDKNTQEVFAQVKQIYKTPPIKDFGGFNFSQILPDPSKPSKRSFIEDLLFNKVTLADAGFIKQYGDCLGDIAARDLICAQKFNGLTVLPPLLTDEMIAQYTSALLAGTITSGWTFGAGAALQIPFAMQMAYRFNGIGVTQCVLYENQKLIANQFNSAIGKIQDSLSSTASALGKLQDVVNQNAQALNTLVKQLSSNFGAISSVLNDILSRLDKVEAEVQIDRLITGRLQSLQTYVTQQLIRAAEIRASANLAATKMSECVLGQSKRVDFCGKGYHLMSFPQSAPHGVVFLHVTYVPAQEKNFTTAPAICHDGKAHFPREGVFVSNGTHWFVTQRNFYEPQIITTDNTFVCGSCDVVIGIVNNTVYDPLQPELDSFKEELDKYFKNHTSPDVDLGDISGINASVVNIQKEIDRLNEVAKNLNESLIDLQELGKYEQYIK

SEQ ID NO: 13379 - protein, 1211 aa, Artificial Sequence
  SARS-CoV-2/Wuhan/HBCDC-HB-01/2019__EPI_ISL_402132 spike protein (1-1211)(N914C_S1123C)
MFVFLVLLPLVSSQCVNLTTRTQLPPAYTNSITRGVYYPDKVFRSSVLHSTQDLFLPFFSNVTWFHAIHVSGTNGTKRFDNPVLPFNDGVYFASTEKSNIIRGWIFGTTLDSKTQSLLIVNNATNVVIKVCEFQFCNDPFLGVYYHKNNKSWMESEFRVYSSANNCTFEYVSQPFLMDLEGKQGNFKNLREFVFKNIDGYFKIYSKHTPINLVRDLPQGFSALEPLVDLPIGINITRFQTLLALHRSYLTPGDSSSGWTAGAAAYYVGYLQPRTFLLKYNENGTITDAVDCALDPLSETKCTLKSFTVEKGIYQTSNFRVQPTESIVRFPNITNLCPFGEVFNATRFASVYAWNRKRISNCVADYSVLYNSASFSTFKCYGVSPTKLNDLCFTNVYADSFVIRGDEVRQIAPGQTGKIADYNYKLPDDFTGCVIAWNSNNLDSKVGGNYNYLYRLFRKSNLKPFERDISTEIYQAGSTPCNGVEGFNCYFPLQSYGFQPTNGVGYQPYRVVVLSFELLHAPATVCGPKKSTNLVKNKCVNFNFNGLTGTGVLTESNKKFLPFQQFGRDIADTTDAVRDPQTLEILDITPCSFGGVSVITPGTNTSNQVAVLYQDVNCTEVPVAIHADQLTPTWRVYSTGSNVFQTRAGCLIGAEHVNNSYECDIPIGAGICASYQTQTNSPRRARSVASQSIIAYTMSLGAENSVAYSNNSIAIPTNFTISVTTEILPVSMTKTSVDCTMYICGDSTECSNLLLQYGSFCTQLNRALTGIAVEQDKNTQEVFAQVKQIYKTPPIKDFGGFNFSQILPDPSKPSKRSFIEDLLFNKVTLADAGFIKQYGDCLGDIAARDLICAQKFNGLTVLPPLLTDEMIAQYTSALLAGTITSGWTFGAGAALQIPFAMQMAYRFNGIGVTQCVLYENQKLIANQFNSAIGKIQDSLSSTASALGKLQDVVNQNAQALNTLVKQLSSNFGAISSVLNDILSRLDKVEAEVQIDRLITGRLQSLQTYVTQQLIRAAEIRASANLAATKMSECVLGQSKRVDFCGKGYHLMSFPQSAPHGVVFLHVTYVPAQEKNFTTAPAICHDGKAHFPREGVFVSNGTHWFVTQRNFYEPQIITTDNTFVCGNCDVVIGIVNNTVYDPLQPELDSFKEELDKYFKNHTSPDVDLGDISGINASVVNIQKEIDRLNEVAKNLNESLIDLQELGKYEQYIK

SEQ ID NO: 13380 - protein, 1211 aa, Artificial Sequence
  SARS-CoV-2/Guangdong/20SF028/2020__EPI_ISL_403936 spike protein (1-1211)(N914C_S1123C)
MFVFLVLLPLVSSQCVNLTTRTQLPPAYTNSFTRGVYYPDKVFRSSVLYSTQDLFLPFFSNVTWFHAIHVSGTNGTKRFDNPVLPFNDGVYFASTEKSNIIRGWIFGTTLDSKTQSLLIVNNATNVVIKVCEFQFCNDPFLGVYYHKNNKSWMESEFRVYSSANNCTFEYVSQPFLMDLEGKQGNFKNLREFVFKNIDGYFKIYSKHTPINLVRDLPQGFSALEPLVDLPIGINITRFQTLLALHRSYLTPGDSSSGWTAGAAAYYVGYLQPRTFLLKYNENGTITDAVDCALDPLSETKCTLKSFTVEKGIYQTSNFRVQPTESIVRFPNITNLCPFGEVFNATRFASVYAWNRKRISNCVADYSVLYNSASFSTFKCYGVSPTKLNDLCFTNVYADSFVIRGDEVRQIAPGQTGKIADYNYKLPDDFTGCVIAWNSNNLDSKVGGNYNYLYRLFRKSNLKPFERDISTEIYQAGSTPCNGVEGFNCYFPLQSYGFQPTNGVGYQPYRVVVLSFELLHAPATVCGPKKSTNLVKNKCVNFNFNGLTGTGVLTESNKKFLPFQQFGRDIADTTDAVRDPQTLEILDITPCSFGGVSVITPGTNTSNQVAVLYQDVNCTEVPVAIHADQLTPTWRVYSTGSNVFQTRAGCLIGAEHVNNSYECDIPIGAGICASYQTQTNSPRRARSVASQSIIAYTMSLGAENSVAYSNNSIAIPTNFTISVTTEILPVSMTKTSVDCTMYICGDSTECSNLLLQYGSFCTQLNRALTGIAVEQDKNTQEVFAQVKQIYKTPPIKDFGGFNFSQILPDPSKPSKRSFIEDLLFNKVTLADAGFIKQYGDCLGDIAARDLICAQKFNGLTVLPPLLTDEMIAQYTSALLAGTITSGWTFGAGAALQIPFAMQMAYRFNGIGVTQCVLYENQKLIANQFNSAIGKIQDSLSSTASALGKLQDVVNQNAQALNTLVKQLSSNFGAISSVLNDILSRLDKVEAEVQIDRLITGRLQSLQTYVTQQLIRAAEIRASANLAATKMSECVLGQSKRVDFCGKGYHLMSFPQSAPHGVVFLHVTYVPAQEKNFTTAPAICHDGKAHFPREGVFVSNGTHWFVTQRNFYEPQIITTDNTFVCGNCDVVIGIVNNTVYDPLQPELDSFKEELDKYFKNHTSPDVDLGDISGINASVVNIQKEIDRLNEVAKNLNESLIDLQELGKYEQYIK

SEQ ID NO: 13381 - protein, 1211 aa, Artificial Sequence
  SARS-CoV-2/Shenzhen/SZTH-001/2020__EPI_ISL_406592 spike protein (1-1211)(N914C_S1123C)
MFVFLVLLPLVSSQCVNLTTRTQLPPAYTNSFTRGVYYPDKVFRSSVLHSTQDLFLPFFSNVTWFHAIHVSGTNGTKRFDNPVLPFNDGVYFASTEKSNIIRGWIFGTTLDSKTQSLLIVNNATNVVIKVCEFQFCNDPFLGVYYHKNNKSWMESEFRVYSSANNCTFEYVSQPFLMDLEGKQGNFKNLREFVFKNIDGYFKIYSKHTPINLVRDLPQGFSALEPLVDLPIGINITRFQTLLALHRSYLTPGDSSSGWTAGAAAYYVGYLQPRTFLLKYNENGTITDAVDCALDPLSETKCTLKSFTVEKGIYQTSNFRVQPTESIVRFPNITNLCPFGEVFNATRFASVYAWNRKRISNCVADYSVLYNSASFSTFKCYGVSPTKLNDLCFTNVYADSFVIRGDEVRQIAPGQTGKIADYNYKLPDDFTGCVIAWNSNNLDSKVGGNYNYLYRLFRKSNLKPFERDISTEIYQAGSTPCNGVEGFNCYFPLQSYGFQPTNGVGYQPYRVVVLSFELLHAPATVCGPKKSTNLVKNKCVNFNFNGLTGTGVLTESNKKFLPFQQFGRDIADTTDAVRDPQTLEILDITPCSFGGVSVITPGTNTSNQVAVLYQDVNCTEVPVAIHADQLTPTWRVYSTGSNVFQTRAGCLIGAEHVNNSYECDIPIGAGICASYQTQTNSPRRARSVASQSIIAYTMSLGAENSVAYSNNSIAIPTNFTISVTTEILPVSMTKTSVDCTMYICGDSTECSNLLLQYGSFCTQLNRALTGIAVEQDKNTQEVFAQVKQIYKTPPIKDFGGFNFSQILPDPSKPSKRSFIEDLLFNKVTLADAGFIKQYGDCLGDIAARDLICAQKFNGLTVLPPLLTDEMIAQYTSALLAGTITSGWTFGAGAALQIPFAMQMAYRFNGIGVTQCVLYENQKLIANQFNSAIGKIQDSLSSTASALGKLQDVVNQNAQALNTLVKQLSSNFGAISSVLNDILSRLDKVEAEVQIDRLITGRLQSLQTYVTQQLIRAAEIRASANLAATKMSECVLGQSKRVDFCGKGYHLMSFPQSAPHGVVFLHVTYVPAQEKNFTTAPAICHDGKAHFPREGVFVSNGTHWFVTQRNFYEPQIITTDNTFVCGNCDVLIGIVNNTVYDPLQPELDSFKEELDKYFKNHTSPDVDLGDISGINASVVNIQKEIDRLNEVAKNLNESLIDLQELGKYEQYIK

SEQ ID NO: 13382 - protein, 1211 aa, Artificial Sequence
  SARS-CoV-2/Shenzhen/SZTH-004/2020__EPI_ISL_406595 spike protein (1-1211)(N914C_S1123C)
MFVFLVLLPLVSSQCVNLTTRTQLPPAYTNSFTRGVYYPDKVFRSSVLHSTQDLFLPFFSNVTWFHAIHVSGTNGTKRFDNPVLPFNDGVYFASTEKSNIIRGWIFGTTLDSKTQSLLIVNNATNVVIKVCEFQFCNDPFLGVYYHKNNKSWMESEFRVYSSANNCTFEYVSQPFLMDLEGKQGNFKNLREFVFKNIDGYFKIYSKHTPINLVRDLPQGFSALEPLVDLPIGINITRFQTLLALHRSYLTPGDSSSGWTAGAAAYYVGYLQPRTFLLKYNENGTITDAVDCALDPLSETKCTLKSFTVEKGIYQTSNFRVQPTESIVRFPNITNLCPFGEVFNATRFASVYAWDRKRISNCVAYYSVLYNSASFSTFKCYGVSPTKLNDLCFTNVYADSFVIRGDEVRQIAPGQTGKIADYNYKLPDDFTGCVIAWNSNNLDSKVGGNYNYLYRLFRKSNLKPFERDISTEIYQAGSTPCNGVEGFNCYFPLQSYGFQPTNGVGYQPYRVVVLSFELLHAPATVCGPKKSTNLVKNKCVNFNFNGLTGTGVLTESNKKFLPFQQFGRDIADTTDAVRDPQTLEILDITPCSFGGVSVITPGTNTSNQVAVLYQDVNCTEVPVAIHADQLTPTWRVYSTGSNVFQTRAGCLIGAEHVNNSYECDIPIGAGICASYQTQTNSPRRARSVASQSIIAYTMSLGAENSVAYSNNSIAIPTNFTISVTTEILPVSMTKTSVDCTMYICGDSTECSNLLLQYGSFCTQLNRALTGIAVEQDKNTQEVFAQVKQIYKTPPIKDFGGFNFSQILPDPSKPSKRSFIEDLLFNKVTLADAGFIKQYGDCLGDIAARDLICAQKFNGLTVLPPLLTDEMIAQYTSALLAGTITSGWTFGAGAALQIPFAMQMAYRFNGIGVTQCVLYENQKLIANQFNSAIGKIQDSLSSTASALGKLQDVVNQNAQALNTLVKQLSSNFGAISSVLNDILSRLDKVEAEVQIDRLITGRLQSLQTYVTQQLIRAAEIRASANLAATKMSECVLGQSKRVDFCGKGYHLMSFPQSAPHGVVFLHVTYVPAQEKNFTTAPAICHDGKAHFPREGVFVSNGTHWFVTQRNFYEPQIITTDNTFVCGNCDVVIGIVNNTVYDPLQPELDSFKEELDKYFKNHTSPDVDLGDISGINASVVNIQKEIDRLNEVAKNLNESLIDLQELGKYEQYIK

SEQ ID NO: 13383 - protein, 1211 aa, Artificial Sequence
  SARS-CoV-2/France/IDF0372/2020__EPI_ISL_406596 spike protein (1-1211)(N914C_S1123C)
MFVFLVLLPLVSSQCVNLTTRTQLPPAYTNSFTRGVYYPDKVFRSSVLHSTQDLFLPFFSNVTWFHAIHVSGTNGTKRFDNPVLPFNDGVYFASTEKSNIIRGWIFGTTLDSKTQSLLIVNNATNVVIKVCEFQFCNDPFLGVYYHKNNKSWMESEFRVYSSANNCTFEYVSQPFLMDLEGKQGNFKNLREFVFKNIDGYFKIYSKHTPINLVRDLPQGFSALEPLVDLPIGINITRFQTLLALHRSYLTPGDSSSGWTAGAAAYYVGYLQPRTFLLKYNENGTITDAVDCALDPLSETKCTLKSFTVEKGIYQTSNFRVQPTESIVRFPNITNLCPFGEVFNATRFASVYAWNRKRISNCVADYSFLYNSASFSTFKCYGVSPTKLNDLCFTNVYADSFVIRGDEVRQIAPGQTGKIADYNYKLPDDFTGCVIAWNSNNLDSKVGGNYNYLYRLFRKSNLKPFERDISTEIYQAGSTPCNGVEGFNCYFPLQSYGFQPTNGVGYQPYRVVVLSFELLHAPATVCGPKKSTNLVKNKCVNFNFNGLTGTGVLTESNKKFLPFQQFGRDIADTTDAVRDPQTLEILDITPCSFGGVSVITPGTNTSNQVAVLYQDVNCTEVPVAIHADQLTPTWRVYSTGSNVFQTRAGCLIGAEHVNNSYECDIPIGAGICASYQTQTNSPRRARSVASQSIIAYTMSLGAENSVAYSNNSIAIPTNFTISVTTEILPVSMTKTSVDCTMYICGDSTECSNLLLQYGSFCTQLNRALTGIAVEQDKNTQEVFAQVKQIYKTPPIKDFGGFNFSQILPDPSKPSKRSFIEDLLFNKVTLADAGFIKQYGDCLGDIAARDLICAQKFNGLTVLPPLLTDEMIAQYTSALLAGTITSGWTFGAGAALQIPFAMQMAYRFNGIGVTQCVLYENQKLIANQFNSAIGKIQDSLSSTASALGKLQDVVNQNAQALNTLVKQLSSNFGAISSVLNDILSRLDKVEAEVQIDRLITGRLQSLQTYVTQQLIRAAEIRASANLAATKMSECVLGQSKRVDFCGKGYHLMSFPQSAPHGVVFLHVTYVPAQEKNFTTAPAICHDGKAHFPREGVFVSNGTHWFVTQRNFYEPQIITTDNTFVCGNCDVVIGIVNNTVYDPLQPELDSFKEELDKYFKNHTSPDVDLGDISGINASVVNIQKEIDRLNEVAKNLNESLIDLQELGKYEQYIK

SEQ ID NO: 13384 - protein, 1211 aa, Artificial Sequence
  SARS-CoV-2/Australia/VIC01/2020__EPI_ISL_406844 spike protein (1-1211)(N914C_S1123C)
MFVFLVLLPLVSSQCVNLTTRTQLPPAYTNSFTRGVYYPDKVFRSSVLHSTQDLFLPFFSNVTWFHAIHVSGTNGTKRFDNPVLPFNDGVYFASTEKSNIIRGWIFGTTLDSKTQSLLIVNNATNVVIKVCEFQFCNDPFLGVYYHKNNKSWMESEFRVYSSANNCTFEYVSQPFLMDLEGKQGNFKNLREFVFKNIDGYFKIYSKHTPINLVRDLPQGFSALEPLVDLPIGINITRFQTLLALHRRYLTPGDSSSGWTAGAAAYYVGYLQPRTFLLKYNENGTITDAVDCALDPLSETKCTLKSFTVEKGIYQTSNFRVQPTESIVRFPNITNLCPFGEVFNATRFASVYAWNRKRISNCVADYSVLYNSASFSTFKCYGVSPTKLNDLCFTNVYADSFVIRGDEVRQIAPGQTGKIADYNYKLPDDFTGCVIAWNSNNLDSKVGGNYNYLYRLFRKSNLKPFERDISTEIYQAGSTPCNGVEGFNCYFPLQSYGFQPTNGVGYQPYRVVVLSFELLHAPATVCGPKKSTNLVKNKCVNFNFNGLTGTGVLTESNKKFLPFQQFGRDIADTTDAVRDPQTLEILDITPCSFGGVSVITPGTNTSNQVAVLYQDVNCTEVPVAIHADQLTPTWRVYSTGSNVFQTRAGCLIGAEHVNNSYECDIPIGAGICASYQTQTNSPRRARSVASQSIIAYTMSLGAENSVAYSNNSIAIPTNFTISVTTEILPVSMTKTSVDCTMYICGDSTECSNLLLQYGSFCTQLNRALTGIAVEQDKNTQEVFAQVKQIYKTPPIKDFGGFNFSQILPDPSKPSKRSFIEDLLFNKVTLADAGFIKQYGDCLGDIAARDLICAQKFNGLTVLPPLLTDEMIAQYTSALLAGTITSGWTFGAGAALQIPFAMQMAYRFNGIGVTQCVLYENQKLIANQFNSAIGKIQDSLSSTASALGKLQDVVNQNAQALNTLVKQLSSNFGAISSVLNDILSRLDKVEAEVQIDRLITGRLQSLQTYVTQQLIRAAEIRASANLAATKMSECVLGQSKRVDFCGKGYHLMSFPQSAPHGVVFLHVTYVPAQEKNFTTAPAICHDGKAHFPREGVFVSNGTHWFVTQRNFYEPQIITTDNTFVCGNCDVVIGIVNNTVYDPLQPELDSFKEELDKYFKNHTSPDVDLGDISGINASVVNIQKEIDRLNEVAKNLNESLIDLQELGKYEQYIK

SEQ ID NO: 13385 - protein, 1211 aa, Artificial Sequence
  SARS-CoV-2/Germany/BavPat1/2020__EPI_ISL_406862 spike protein (1-1211)(N914C_S1123C)
MFVFLVLLPLVSSQCVNLTTRTQLPPAYTNSFTRGVYYPDKVFRSSVLHSTQDLFLPFFSNVTWFHAIHVSGTNGTKRFDNPVLPFNDGVYFASTEKSNIIRGWIFGTTLDSKTQSLLIVNNATNVVIKVCEFQFCNDPFLGVYYHKNNKSWMESEFRVYSSANNCTFEYVSQPFLMDLEGKQGNFKNLREFVFKNIDGYFKIYSKHTPINLVRDLPQGFSALEPLVDLPIGINITRFQTLLALHRSYLTPGDSSSGWTAGAAAYYVGYLQPRTFLLKYNENGTITDAVDCALDPLSETKCTLKSFTVEKGIYQTSNFRVQPTESIVRFPNITNLCPFGEVFNATRFASVYAWNRKRISNCVADYSVLYNSASFSTFKCYGVSPTKLNDLCFTNVYADSFVIRGDEVRQIAPGQTGKIADYNYKLPDDFTGCVIAWNSNNLDSKVGGNYNYLYRLFRKSNLKPFERDISTEIYQAGSTPCNGVEGFNCYFPLQSYGFQPTNGVGYQPYRVVVLSFELLHAPATVCGPKKSTNLVKNKCVNFNFNGLTGTGVLTESNKKFLPFQQFGRDIADTTDAVRDPQTLEILDITPCSFGGVSVITPGTNTSNQVAVLYQGVNCTEVPVAIHADQLTPTWRVYSTGSNVFQTRAGCLIGAEHVNNSYECDIPIGAGICASYQTQTNSPRRARSVASQSIIAYTMSLGAENSVAYSNNSIAIPTNFTISVTTEILPVSMTKTSVDCTMYICGDSTECSNLLLQYGSFCTQLNRALTGIAVEQDKNTQEVFAQVKQIYKTPPIKDFGGFNFSQILPDPSKPSKRSFIEDLLFNKVTLADAGFIKQYGDCLGDIAARDLICAQKFNGLTVLPPLLTDEMIAQYTSALLAGTITSGWTFGAGAALQIPFAMQMAYRFNGIGVTQCVLYENQKLIANQFNSAIGKIQDSLSSTASALGKLQDVVNQNAQALNTLVKQLSSNFGAISSVLNDILSRLDKVEAEVQIDRLITGRLQSLQTYVTQQLIRAAEIRASANLAATKMSECVLGQSKRVDFCGKGYHLMSFPQSAPHGVVFLHVTYVPAQEKNFTTAPAICHDGKAHFPREGVFVSNGTHWFVTQRNFYEPQIITTDNTFVCGNCDVVIGIVNNTVYDPLQPELDSFKEELDKYFKNHTSPDVDLGDISGINASVVNIQKEIDRLNEVAKNLNESLIDLQELGKYEQYIK

SEQ ID NO: 13386 - protein, 1211 aa, Artificial Sequence
  SARS-CoV-2/Wuhan/HBCDC-HB-02/2020__EPI_ISL_412978 spike protein (1-1211)(N914C_S1123C)
MFVFLVLLPLVSSQCVNLTTRTQLPPAYTNSFTRGVYYPDKVFRSSVLHSTQDLFLPFFSNVTWFHAIHVSGTNGTKRFDNPVLPFNDGVYFASTEKSNIIRGWIFGTTLDSKTQSLLIVNNATNVVIKVCEFQFCNDPFLGVYYHKNNKSWMESEFRVYSSANNCTFEYVSQPFLMDLEGKQGNFKNLREFVFKNIDGYFKIYSKHTPINLVRDLPQGFSALEPLVDLPIGINITRFQTLLALHRSYLTPGDSSSGWTAGAAAYYVGYLQPRTFLLKYNENGTITDAVDCALDPLSETKCTLKSFTVEKGIYQTSNFRVQPTESIVRFPNITNLCPFGEVFNATRFASVYAWNRKRISNCVADYSVLYNSASFSTFKCYGVSPTKLNDLCFTNVYADSFVIRGDEVRQIAPGQTGKIADYNYKLPDDFTGCVIAWNSNNLDSKVGGNYNYLYRLFRKSNLKPFERDISTEIYQAGSTPCNGVEGFNCYFPLQSYGFQPTNGVGYQPYRVVVLSFELLHAPATVCGPKKSTNLVKNKCVNFNFNGLTGTGVLTESNKKFLPFQQFGRDIADTTDAVRDPQTLEILDITPCSFGGVSVITPGTNTSNQVAVLYQDVNCTEVPVAIHADQLTPTWRVYSTGSNVFQTRAGCLIGAEHVNNSYECDIPIGAGICASYQTQTNSPRRARSVASQSIIAYTMSLGAENSVAYSNNSIAIPTNFTISVTTEILPVSMTKTSVDCTMYICGDSTECSNFLLQYGSFCTQLNRALTGIAVEQDKNTQEVFAQVKQIYKTPPIKDFGGFNFSQILPDPSKPSKRSFIEDLLFNKVTLADAGFIKQYGDCLGDIAARDLICAQKFNGLTVLPPLLTDEMIAQYTSALLAGTITSGWTFGAGAALQIPFAMQMAYRFNGIGVTQCVLYENQKLIANQFNSAIGKIQDSLSSTASALGKLQDVVNQNAQALNTLVKQLSSNFGAISSVLNDILSRLDKVEAEVQIDRLITGRLQSLQTYVTQQLIRAAEIRASANLAATKMSECVLGQSKRVDFCGKGYHLMSFPQSAPHGVVFLHVTYVPAQEKNFTTAPAICHDGKAHFPREGVFVSNGTHWFVTQRNFYEPQIITTDNTFVCGNCDVVIGIVNNTVYDPLQPELDSFKEELDKYFKNHTSPDVDLGDISGINASVVNIQKEIDRLNEVAKNLNESLIDLQELGKYEQYIK

SEQ ID NO: 13387 - protein, 1211 aa, Artificial Sequence
  SARS-CoV-2/Australia/QLD02/2020__EPI_ISL_407896 spike protein (1-1211)(N914C_S1123C)
MFVFLVLLPLVSSQCVNLTTRTQLPPAYTNSFTRGVYYPDKVFRSSVLHSTQDLFLPFFSNVTWFHAIHVSGTNGTKRFDNPVLPFNDGVYFASTEKSNIIRGWIFGTTLDSKTQSLLIVNNATNVVIKVCEFQFCNDPFLGVYYHKNNKSWMESEFRVYSSANNCTFEYVSQPFLMDLEGKQGNFKNLREFVFKNIDGYFKIYSKHTPINLVRDLPQGFSALEPLVDLPIGINITRFQTLLALHRSYLTPGDSSSGWTAGAAAYYVGYLQPRTFLLKYNENGTITDAVDCALDPLSETKCTLKSFTVEKGIYQTSNFRVQPTESIVRFPNITNLCPFGEVFNATRFASVYAWNRKRISNCVADYSVLYNSASFSTFKCYGVSPTKLNDLCFTNVYADSFVIRGDEVRQIAPGQTGKIADYNYKLPDDFTGCVIAWNSNNLDSKVGGNYNYLYRLFRKSNLKPFERDISTEIYQAGSTPCNGVEGFNCYFPLQSYGFQPTNGVGYQPYRVVVLSFELLHAPATVCGPKKSTNLVKNKCVNFNFNGLTGTGVLTESNKKFLPFQQFGRDIADTTDAVRDPQTLEILDITPCSFGGVSVITPGTNTSNQVAVLYQDVNCTEVPVAIHADQLTPTWRVYSTGSNVFQTRAGCLIGAEHVNNSYECDIPIGAGICASYQTQTNSPRRARSVASQSIIAYTMSLGAENSVAYSNNSIAIPTNFTISVTTEILPVSMTKTSVDCTMYICGDSTECSNLLLQYGSFCTQLNRALTGIAVEQDKNTQEVFAQVKQIYKTPPIKDFGGFNFSQILPDPSKPSKRSFIEDLLFNKVTLADAGFIKQYGDCLGDIAARDLICAQKFNGLTVLPPLLTDEMIAQYTSALLAGTITSGWTFGAGAALQIPFAMQMAYRFNGIGVTQCVLYENQKLIANQFNSAIGKIQDSLSSTASALGKLQDVVNQNAQALNTLVKQLSSNFGAISSVLNDILSRLDKVEAEVQIDRLITGRLQSLQTYVTQQLIRAAEIRASANLAATKMSECVLGQSKRVDFCGKGYHLMSFPQSAPHGVVFLHVTYVPAQEKNFTTAPAICHDGKAHFPREGVFVSNGTHWFVTQRNFYEPQIITTDNTFVCGNCDVVIGIVNNTVYDPLQLELDSFKEELDKYFKNHTSPDVDLGDISGINASVVNIQKEIDRLNEVAKNLNESLIDLQELGKYEQYIK

SEQ ID NO: 13388 - protein, 1211 aa, Artificial Sequence
  SARS-CoV-2/India/1-31/2020__EPI_ISL_413523 spike protein (1-1211)(N914C_S1123C)
MFVFLVLLPLVSSQCVNLTTRTQLPPAYTNSFTRGVYYPDKVFRSSVLHSTQDLFLPFFSNVTWFHAIHVSGTNGTKRFDNPVLPFNDGVYFASTEKSNIIRGWIFGTTLDSKTQSLLIVNNATNVVIKVCEFQFCNDPFLGVYYHKNNKSWMESEFRVYSSANNCTFEYVSQPFLMDLEGKQGNFKNLREFVFKNIDGYFKIYSKHTPINLVRDLPQGFSALEPLVDLPIGINITRFQTLLALHRSYLTPGDSSSGWTAGAAAYYVGYLQPRTFLLKYNENGTITDAVDCALDPLSETKCTLKSFTVEKGIYQTSNFRVQPTESIVRFPNITNLCPFGEVFNATRFASVYAWNRKRISNCVADYSVLYNSASFSTFKCYGVSPTKLNDLCFTNVYADSFVIRGDEVRQIAPGQTGKIADYNYKLPDDFTGCVIAWNSNNLDSKVGGNYNYLYRLFRKSNLKPFERDISTEIYQAGSTPCNGVEGFNCYFPLQSYGFQPTNGVGYQPYRVVVLSFELLHAPATVCGPKKSTNLVKNKCVNFNFNGLTGTGVLTESNKKFLPFQQFGRDIADTTDAVRDPQTLEILDITPCSFGGVSVITPGTNTSNQVAVLYQDVNCTEVPVAIHADQLTPTWRVYSTGSNVFQTRAGCLIGAEHVNNSYECDIPIGAGICASYQTQTNSPRRARSVASQSIIAYTMSLGAENSVAYSNNSIAIPTNFTISVTTEILPVSMTKTSVDCTMYICGDSTECSNLLLQYGSFCTQLNRALTGIAVEQDKNTQEVFAQVKQIYKTPPIKDFGGFNFSQILPDPSKPSKRSFIEDLLFNKVTLADAGFIKQYGDCLGDIAARDLICAQKFNGLTVLPPLLTDEMIAQYTSALLAGTITSGWTFGAGAALQIPFAMQMAYRFNGIGVTQCVLYENQKLIANQFNSVIGKIQDSLSSTASALGKLQDVVNQNAQALNTLVKQLSSNFGAISSVLNDILSRLDKVEAEVQIDRLITGRLQSLQTYVTQQLIRAAEIRASANLAATKMSECVLGQSKRVDFCGKGYHLMSFPQSAPHGVVFLHVTYVPAQEKNFTTAPAICHDGKAHFPREGVFVSNGTHWFVTQRNFYEPQIITTDNTFVCGNCDVVIGIVNNTVYDPLQPELDSFKEELDKYFKNHTSPDVDLGDISGINASVVNIQKEIDRLNEVAKNLNESLIDLQELGKYEQYIK

SEQ ID NO: 13389 - protein, 1211 aa, Artificial Sequence
  SARS-CoV-2/Guangdong/GD2020087-P0008/2020__EPI_ISL_413863 spike protein (1-1211)(N914C_S1123C)
MFVFLVLLPLVSSQCVNLTTRTQLPPAYTNSFTRGVYYPDKVFRSSVLHSTQDLFLPFFSNVTWFHAIHVSGTNGTKRFDNPVLPFNDGVYFASTEKSNIIRGWIFGTTLDSKTQSLLIVNNATNVVIKVCEFQFCNDPFLGVYYHKNNKSWMESEFRVYSSANNCTFEYVSQPFLMDLEGKQGNFKNLREFVFKNIDGYFKIYSKHTPINLVRDLPQGFSALEPLVDLPIGINITRFQTLLALHRSYLTPGDSSSGWTAGAAAYYVGYLQPRTFLLKYNENGTITDAVDCALDPLSETKCTLKSFTVEKGIYQTSNFRVQPTESIVRFPNITNLCPFGEVFNATRFASVYAWNRKRISNCVADYSVLYNSASFSTFKCYGVSPTKLNDLCFTNVYADSFVIRGDEVREIAPGQTGKIADYNYKLPDDFTGCVIAWNSNNLDSKVGGNYNYLYRLFRKSNLKPFERDISTEIYQAGSTPCNGVEGFNCYFPLQSYGFQPTNGVGYQPYRVVVLSFELLHAPATVCGPKKSTNLVKNKCVNFNFNGLTGTGVLTESNKKFLPFQQFGRDIADTTDAVRDPQTLEILDITPCSFGGVSVITPGTNTSNQVAVLYQDVNCTEVPVAIHADQLTPTWRVYSTGSNVFQTRAGCLIGAEHVNNSYECDIPIGAGICASYQTQTNSPRRARSVASQSIIAYTMSLGAENSVAYSNNSIAIPTNFTISVTTEILPVSMTKTSVDCTMYICGDSTECSNLLLQYGSFCTQLNRALTGIAVEQDKNTQEVFAQVKQIYKTPPIKDFGGFNFSQILPDPSKPSKRSFIEDLLFNKVTLADAGFIKQYGDCLGDIAARDLICAQKFNGLTVLPPLLTDEMIAQYTSALLAGTITSGWTFGAGAALQIPFAMQMAYRFNGIGVTQCVLYENQKLIANQFNSAIGKIQDSLSSTASALGKLQDVVNQNAQALNTLVKQLSSNFGAISSVLNDILSRLDKVEAEVQIDRLITGRLQSLQTYVTQQLIRAAEIRASANLAATKMSECVLGQSKRVDFCGKGYHLMSFPQSAPHGVVFLHVTYVPAQEKNFTTAPAICHDGKAHFPREGVFVSNGTHWFVTQRNFYEPQIITTDNTFVCGNCDVVIGIVNNTVYDPLQPELDSFKEELDKYFKNHTSPDVDLGDISGINASVVNIQKEIDRLNEVAKNLNESLIDLQELGKYEQYIK

SEQ ID NO: 13390 - protein, 1211 aa, Artificial Sequence
  SARS-CoV-2/Sweden/01/2020__EPI_ISL_411951 spike protein (1-1211)(N914C_S1123C)
MFVFLVLLPLVSSQCVNLTTRTQLPPAYTNSFTRGVYYPDKVFRSSVLHSTQDLFLPFFSNVTWFHAIHVSGTNGTKRFDNPVLPFNDGVYFASTEKSNIIRGWIFGTTLDSKTQSLLIVNNATNVVIKVCEFQFCNDPFLGVYYHKNNKSWMESEFRVYSSANNCTFEYVSQPFLMDLEGKQGNFKNLREFVFKNIDGYFKIYSKHTPINLVRDLPQGFSALEPLVDLPIGINITRFQTLLALHRSYLTPGDSSSGWTAGAAAYYVGYLQPRTFLLKYNENGTITDAVDCALDPLSETKCTLKSFTVEKGIYQTSNFRVQPTESIVRFPNITNLCPFGEVFNATRFASVYAWNRKRISNCVADYSVLYNSASFSTFKCYGVSPTKLNDLCFTNVYADSFVIRGDEVRQIAPGQTGKIADYNYKLPDDFTGCVIAWNSNNLDSKVGGNYNYLYRLFRKSNLKPFERDISTEIYQAGSTPCNGVEGFNCYFPLQSYGFQPTNGVGYQPYRVVVLSFELLHAPATVCGPKKSTNLVKNKCVNFNFNGLTGTGVLTESNKKFLPFQQFGRDIADTTDAVRDPQTLEILDITPCSFGGVSVITPGTNTSNQVAVLYQDVNCTEVPVAIHADQLTPTWRVYSTGSNVFQTRAGCLIGAEHVNNSYECDIPIGAGICASYQTQTNSPRRARSVASQSIIAYTMSLGAENSVAYSNNSIAIPTNFTISVTTEILPVSMTKTSVDCTMYICGDSTECSNLLLQYGSFCTQLNRALTGIAVEQDKNTQEVFAQVKQIYKTPPIKDCGGFNFSQILPDPSKPSKRSFIEDLLFNKVTLADAGFIKQYGDCLGDIAARDLICAQKFNGLTVLPPLLTDEMIAQYTSALLAGTITSGWTFGAGAALQIPFAMQMAYRFNGIGVTQCVLYENQKLIANQFNSAIGKIQDSLSSTASALGKLQDVVNQNAQALNTLVKQLSSNFGAISSVLNDILSRLDKVEAEVQIDRLITGRLQSLQTYVTQQLIRAAEIRASANLAATKMSECVLGQSKRVDFCGKGYHLMSFPQSAPHGVVFLHVTYVPAQEKNFTTAPAICHDGKAHFPREGVFVSNGTHWFVTQRNFYEPQIITTDNTFVCGNCDVVIGIVNNTVYDPLQPELDSFKEELDKYFKNHTSPDVDLGDISGINASVVNIQKEIDRLNEVAKNLNESLIDLQELGKYEQYIK

SEQ ID NO: 13391 - protein, 1211 aa, Artificial Sequence
  SARS-CoV-2/Tianmen/HBCDC-HB-07/2020__EPI_ISL_412983 spike protein (1-1211)(N914C_S1123C)
MFVFLVLLPLVSSQCVNLTTRTQLPPAYTNSFTRGVYYPDKVFRSSVLHSTQDLFLPFFSNVTWFHAIHVSGTNGTKRFDNPVLPFNDGVYFASTEKSNIIRGWIFGTTLDSKTQSLLIVNNATNVVIKVCEFQFCNDPFLGVYYHKNNKSWMESEFRVYSSANNCTFEYVSQPFLMDLEGKQGNFKNLREFVFKNIDGYFKIYSKHTPINLVRDLPQGFSALEPLVDLPIGINITRFQTLLALHRSYLTPGDSSSGWTAGAAAYYVGYLQPRTFLLKYNENGTITDAVDCALDPLSETKCTLKSFTVEKGIYQTSNFRVQPTESIVRFPNITNLCPFGEVFNATRFASVYAWNRKRISNCVADYSVLYNSASFSTFKCYGVSPTKLNDLCFTNVYADSFVIRGDEVRQIAPGQTGKIADYNYKLPDDFTGCVIAWNSNNLDSKVGGNYNYLYRLFRKSNLKPFERDISTEIYQAGSTPCNGVEGFNCYFPLQSYGFQPTNGVGYQPYRVVVLSFELLHAPATVCGPKKSTNLVKNKCVNFNFNGLTGTGVLTESNKKFLPFQQFGRDIADTTDAVRDPQTLEILDITPCSFGGVSVITPGTNTSNQVAVLYQDLNCTEVPVAIHADQLTPTWRVYSTGSNVFQTRAGCLIGAEHVNNSYECDIPIGAGICASYQTQTNSPRRARSVASQSIIAYTMSLGAENSVAYSNNSIAIPTNFTISVTTEILPVSMTKTSVDCTMYICGDSTECSNLLLQYGSFCTQLNRALTGIAVEQDKNTQEVFAQVKQIYKTPPIKDFGGFNFSQILPDPSKPSKRSFIEDLLFNKVTLADAGFIKQYGDCLGDIAARDLICAQKFNGLTVLPPLLTDEMIAQYTSALLAGTITSGWTFGAGAALQIPFAMQMAYRFNGIGVTQCVLYENQKLIANQFNSAIGKIQDSLSSTASALGKLQDVVNQNAQALNTLVKQLSSNFGAISSVLNDILSRLDKVEAEVQIDRLITGRLQSLQTYVTQQLIRAAEIRASANLAATKMSECVLGQSKRVDFCGKGYHLMSFPQSAPHGVVFLHVTYVPAQEKNFTTAPAICHDGKAHFPREGVFVSNGTHWFVTQRNFYEPQIITTDNTFVCGNCDVVIGIVNNTVYDPLQPELDSFKEELDKYFKNHTSPDVDLGDISGINASVVNIQKEIDRLNEVAKNLNESLIDLQELGKYEQYIK

SEQ ID NO: 13392 - protein, 1211 aa, Artificial Sequence
  SARS-CoV-2/Hong Kong/case42_VM20002493/2020__EPI_ISL_414527 spike protein (1-1211)(N914C_S1123C)
MFVFLVLLPLVSSQCVNLTTRTQLPPAYTNSFTRGVYYPDKVFRSSVLHSTQDLFLPFFSNVTWFHAIHVSGTNGTKRFDNPVLPFNDGVYFASTEKSNIIRGWIFGTTLDSKTQSLLIVNNATNVVIKVCEFQFCNDPFLGVYYHKNNKSWMESEFRVYSSANNCTFEYVSQPFLMDLEGKQGNFKNLREFVFKNIDGYFKIYSKHTPINLVRDLPQGFSALEPLVDLPIGINITRFQTLLALHRSYLTPGDSSSGWTAGAAAYYVGYLQPRTFLLKYNENGTITDAVDCALDPLSETKCTLKSFTVEKGIYQTSNFRVQPTESIVRFPNITNLCPFGEVFNATRFASVYAWNRKRISNCVADYSVLYNSASFSTFKCYGVSPTKLNDLCFTNVYADSFVIRGDEVRQIAPGQTGKIADYNYKLPDDFTGCVIAWNSNNLDSKVGGNYNYLYRLFRKSNLKPFERDISTEIYQAGSTPCNGVEGFNCYFPLQSYGFQPTNGVGYQPYRVVVLSFELLHAPATVCGPKKSTNLVKNKCVNFNFNGLTGTGVLTESNKKFLPFQQFGRDIADTTDAVRDPQTLEILDITPCSFGGVSVITPGTNTSNQVAVLYQDVNCTEVPVAIHADQLTPTWRVYSTGSNVFQTRAGCLIGAEHVNNSYECDIPIGAGICASYQTQTNSPRRARSVASQSIIAYTMSLGAENSVAYSNNSIAIPTNFAISVTTEILPVSMTKTSVDCTMYICGDSTECSNLLLQYGSFCTQLNRALTGIAVEQDKNTQEVFAQVKQIYKTPPIKDFGGFNFSQILPDPSKPSKRSFIEDLLFNKVTLADAGFIKQYGDCLGDIAARDLICAQKFNGLTVLPPLLTDEMIAQYTSALLAGTITSGWTFGAGAALQIPFAMQMAYRFNGIGVTQCVLYENQKLIANQFNSAIGKIQDSLSSTASALGKLQDVVNQNAQALNTLVKQLSSNFGAISSVLNDILSRLDKVEAEVQIDRLITGRLQSLQTYVTQQLIRAAEIRASANLAATKMSECVLGQSKRVDFCGKGYHLMSFPQSAPHGVVFLHVTYVPAQEKNFTTAPAICHDGKAHFPREGVFVSNGTHWFVTQRNFYEPQIITTDNTFVCGNCDVVIGIVNNTVYDPLQPELDSFKEELDKYFKNHTSPDVDLGDISGINASVVNIQKEIDRLNEVAKNLNESLIDLQELGKYEQYIK

SEQ ID NO: 13393 - protein, 1211 aa, Artificial Sequence
  SARS-CoV-2/USA/CruiseA-23/2020__EPI_ISL_414482 spike protein (1-1211)(N914C_S1123C)
MFVFLVLLPLVSSQCVNLTTRTQLPPAYTNSFTRGVYYPDKVFRSSVLHSTQDLFLPFFSNVTWFHAIHVSGTNGTKRFDNPVLPFNDGVYFASTEKSNIIRGWIFGTTLDSKTQSLLIVNNATNVVIKVCEFQFCNDPFLGVYYHKNNKSWMESEFRVYSSANNCTFEYVSQPFLMDLEVKQGNFKNLREFVFKNIDGYFKIYSKHTPINLVRDLPQGFSALEPLVDLPIGINITRFQTLLALHRSYLTPGDSSSGWTAGAAAYYVGYLQPRTFLLKYNENGTITDAVDCALDPLSETKCTLKSFTVEKGIYQTSNFRVQPTESIVRFPNITNLCPFGEVFNATRFASVYAWNRKRISNCVADYSVLYNSASFSTFKCYGVSPTKLNDLCFTNVYADSFVIRGDEVRQIAPGQTGKIADYNYKLPDDFTGCVIAWNSNNLDSKVGGNYNYLYRLFRKSNLKPFERDISTEIYQAGSTPCNGVEGFNCYFPLQSYGFQPTNGVGYQPYRVVVLSFELLHAPATVCGPKKSTNLVKNKCVNFNFNGLTGTGVLTESNKKFLPFQQFGRDIADTTDAVRDPQTLEILDITPCSFGGVSVITPGTNTSNQVAVLYQDVNCTEVPVAIHADQLTPTWRVYSTGSNVFQTRAGCLIGAEHVNNSYECDIPIGAGICASYQTQTNSPRRARSVASQSIIAYTMSLGAENSVAYSNNSIAIPTNFTISVTTEILPVSMTKTSVDCTMYICGDSTECSNLLLQYGSFCTQLNRALTGIAVEQDKNTQEVFAQVKQIYKTPPIKDFGGFNFSQILPDPSKPSKRSFIEDLLFNKVTLADAGFIKQYGDCLGDIAARDLICAQKFNGLTVLPPLLTDEMIAQYTSALLAGTITSGWTFGAGAALQIPFAMQMAYRFNGIGVTQCVLYENQKLIANQFNSAIGKIQDSLSSTASALGKLQDVVNQNAQALNTLVKQLSSNFGAISSVLNDILSRLDKVEAEVQIDRLITGRLQSLQTYVTQQLIRAAEIRASANLAATKMSECVLGQSKRVDFCGKGYHLMSFPQSAPHGVVFLHVTYVPAQEKNFTTAPAICHDGKAHFPREGVFVSNGTHWFVTQRNFYEPQIITTDNTFVCGNCDVVIGIVNNTVYDPLQPELDSFKEELDKYFKNHTSPDVDLGDISGINASVVNIQKEIDRLNEVAKNLNESLIDLQELGKYEQYIK

SEQ ID NO: 13394 - protein, 1211 aa, Artificial Sequence
  SARS-CoV-2/Hong Kong/case85_VM20002868/2020__EPI_ISL_414519 spike protein (1-1211)(N914C_S1123C)
MFVFLVLVPLVSSQCVNLTTRTQLPPAYTNSFTRGVYYPDKVFRSSVLHSTQDLFLPFFSNVTWFHAIHVSGTNGTKRFDNPVLPFNDGVYFASTEKSNIIRGWIFGTTLDSKTQSLLIVNNATNVVIKVCEFQFCNDPFLGVYYHKNNKSWMESEFRVYSSANNCTFEYVSQPFLMDLEGKQGNFKNLREFVFKNIDGYFKIYSKHTPINLVRDLPQGFSALEPLVDLPIGINITRFQTLLALHRSYLTPGDSSSGWTAGAAAYYVGYLQPRTFLLKYNENGTITDAVDCALDPLSETKCTLKSFTVEKGIYQTSNFRVQPTESIVRFPNITNLCPFGEVFNATRFASVYAWNRKRISNCVADYSVLYNSASFSTFKCYGVSPTKLNDLCFTNVYADSFVIRGDEVRQIAPGQTGKIADYNYKLPDDFTGCVIAWNSNNLDSKVGGNYNYLYRLFRKSNLKPFERDISTEIYQAGSTPCNGVEGFNCYFPLQSYGFQPTNGVGYQPYRVVVLSFELLHAPATVCGPKKSTNLVKNKCVNFNFNGLTGTGVLTESNKKFLPFQQFGRDIADTTDAVRDPQTLEILDITPCSFGGVSVITPGTNTSNQVAVLYQDVNCTEVPVAIHADQLTPTWRVYSTGSNVFQTRAGCLIGAEHVNNSYECDIPIGAGICASYQTQTNSPRRARSVASQSIIAYTMSLGAENSVAYSNNSIAIPTNFTISVTTEILPVSMTKTSVDCTMYICGDSTECSNLLLQYGSFCTQLNRALTGIAVEQDKNTQEVFAQVKQIYKTPPIKDFGGFNFSQILPDPSKPSKRSFIEDLLFNKVTLADAGFIKQYGDCLGDIAARDLICAQKFNGLTVLPPLLTDEMIAQYTSALLAGTITSGWTFGAGAALQIPFAMQMAYRFNGIGVTQCVLYENQKLIANQFNSAIGKIQDSLSSTASALGKLQDVVNQNAQALNTLVKQLSSNFGAISSVLNDILSRLDKVEAEVQIDRLITGRLQSLQTYVTQQLIRAAEIRASANLAATKMSECVLGQSKRVDFCGKGYHLMSFPQSAPHGVVFLHVTYVPAQEKNFTTAPAICHDGKAHFPREGVFVSNGTHWFVTQRNFYEPQIITTDNTFVCGNCDVVIGIVNNTVYDPLQPELDSFKEELDKYFKNHTSPDVDLGDISGINASVVNIQKEIDRLNEVAKNLNESLIDLQELGKYEQYIK

SEQ ID NO: 13395 - protein, 1211 aa, Artificial Sequence; identical to SEQ ID NO: 13385
  SARS-CoV-2/England/200990660/2020__EPI_ISL_414523 spike protein (1-1211)(N914C_S1123C)

SEQ ID NO: 13396 - protein, 1211 aa, Artificial Sequence
  SARS-CoV-2/Australia/NSW09/2020__EPI_ISL_413595 spike protein (1-1211)(N914C_S1123C)
MFVFLVLLPLVSSQCVNLTTRTQLPPAYTNSFTRGVYYPDKVFRSSVLHSTQDLFLPFFSNVTWFHAIHVSGTNGTKRFDNPVLPFNDGVYFASTEKSNIIRGWIFGTTLDSKTQSLLIVNNATNVVIKVCEFQFCNDPFLGVYYHKNNKSWMESEFRVYSSANNCTFEYVSQPFLMDLEGKQGNFKNLREFVFKNIDGYFKIYSKHTPINLVRDLPQGFSALEPLVDLPIGINITRFQTLLALHRSYLTPGDSSSGWTAGAAAYYVGYLQPRTFLLKYNENGTITDAVDCALDPLSETKCTLKSFTVEKGIYQTSNFRVQPTESIVRFPNITNLCPFGEVFNATRFASVYAWNRKRISNCVADYSVLYNSASFSTFKCYGVSPTKLNDLCFTNVYADSFVIRGDEVRQIAPGQTGKIADYNYKLPDDFTGCVIAWNSNNLDSKVGGNYNYLYRLFRKSNLKPFERDISTEIYQAGSTPCNGVEGFNCYFPLQSYGFQPTNGVGYQPYRVVVLSFELLHAPATVCGPKKSTNLVKNKCVNFNFNGLTGTGVLTESNKKFLPFQQFGRDIADTTDAVRDPQTLEILDITPCSFGGVSVITPGTNTSNQVAVLYQDVNCTEVPVAIHADQLTPTWRVYSTGSNVFQTRAGCLIGAEHVNNSYECDIPIGAGICASYQTQTNSPRRARSVASQSIIAYTMSLGAENSVAYSNNSIAIPTNFTISVTTEILPVSMTKTSVDCTMYICGDSTECSNLLLQYGSFCTQLNRALTGIAVEQDKNTQEVFAQVKQIYKTPPIKDFGGFNFSQILPDPSKPSKRSFIEDLLFNKVTLADAGFIKQYGDCLGDIAARDLICAQKFNGLTVLPPLLTDEMIAQYTSALLAGTITSGWTFGAGAALQIPFAMQMAYRFNGIGVTQCVLYENQKLIANQFNSAIGKIQDSLSFTASALGKLQDVVNQNAQALNTLVKQLSSNFGAISSVLNDILSRLDKVEAEVQIDRLITGRLQSLQTYVTQQLIRAAEIRASANLAATKMSECVLGQSKRVDFCGKGYHLMSFPQSAPHGVVFLHVTYVPAQEKNFTTAPAICHDGKAHFPREGVFVSNGTHWFVTQRNFYEPQIITTDNTFVCGNCDVVIGIVNNTVYDPLQPELDSFKEELDKYFKNHTSPDVDLGDISGINASVVNIQKEIDRLNEVAKNLNESLIDLQELGKYEQYIK

SEQ ID NO: 13397 - protein, 1211 aa, Artificial Sequence; identical to SEQ ID NO: 13377
  SARS-CoV-2/Australia/NSW10/2020__EPI_ISL_413596 spike protein (1-1211)(N914C_S1123C)

SEQ ID NO: 13398 - protein, 1211 aa, Artificial Sequence
  SARS-CoV-2/Switzerland/1000477797/2020__EPI_ISL_413023 spike protein (1-1211)(N914C_S1123C)
MFVFLVLLPLVSSQCVNLTTRTQLPPAYTNSFTRGVYYPDKVFRSSVLHSTQDLFLPFFSNVTWFHAIHVSGTNGTKRFDNPVLPFNDGVYFASTEKSNIIRGWIFGTTLDSKTQSLLIVNNATNVVIKVCEFQFCNDPFLGVYYHKNNKSWMESEFRVYSSANNCTFEYVSQPFLMDLEGKQGNFKNLREFVFKNIDGYFNIYSKHTPINLVRDLPQGFSALEPLVDLPIGINITRFQTLLALHRSYLTPGDSSSGWTAGAAAYYVGYLQPRTFLLKYNENGTITDAVDCALDPLSETKCTLKSFTVEKGIYQTSNFRVQPTESIVRFPNITNLCPFGEVFNATRFASVYAWNRKRISNCVADYSVLYNSASFSTFKCYGVSPTKLNDLCFTNVYADSFVIRGDEVRQIAPGQTGKIADYNYKLPDDFTGCVIAWNSNNLDSKVGGNYNYLYRLFRKSNLKPFERDISTEIYQAGSTPCNGVEGFNCYFPLQSYGFQPTNGVGYQPYRVVVLSFELLHAPATVCGPKKSTNLVKNKCVNFNFNGLTGTGVLTESNKKFLPFQQFGRDIADTTDAVRDPQTLEILDITPCSFGGVSVITPGTNTSNQVAVLYQGVNCTEVPVAIHADQLTPTWRVYSTGSNVFQTRAGCLIGAEHVNNSYECDIPIGAGICASYQTQTNSPRRARSVASQSIIAYTMSLGAENSVAYSNNSIAIPTNFTISVTTEILPVSMTKTSVDCTMYICGDSTECSNLLLQYGSFCTQLNRALTGIAVEQDKNTQEVFAQVKQIYKTPPIKDFGGFNFSQILPDPSKPSKRSFIEDLLFNKVTLADAGFIKQYGDCLGDIAARDLICAQKFNGLTVLPPLLTDEMIAQYTSALLAGTITSGWTFGAGAALQIPFAMQMAYRFNGIGVTQCVLYENQKLIANQFNSAIGKIQDSLSSTASALGKLQDVVNQNAQALNTLVKQLSSNFGAISSVLNDILSRLDKVEAEVQIDRLITGRLQSLQTYVTQQLIRAAEIRASANLAATKMSECVLGQSKRVDFCGKGYHLMSFPQSAPHGVVFLHVTYVPAQEKNFTTAPAICHDGKAHFPREGVFVSNGTHWFVTQRNFYEPQIITTDNTFVCGNCDVVIGIVNNTVYDPLQPELDSFKEELDKYFKNHTSPDVDLGDISGINASVVNIQKEIDRLNEVAKNLNESLIDLQELGKYEQYIK

SEQ ID NO: 13399 - protein, 1211 aa, Artificial Sequence
  SARS-CoV-2/Belgium/BA-02291/2020__EPI_ISL_415159 spike protein (1-1211)(N914C_S1123C)
MFVFLVLLPLVSSQCVNLTTRTQLPPAYTNSFTRGVYYPDKVFRSSVLHSTQDLFLPFFSNVTWFHAIHVSGTNGTKRFDNPVLPFNDGVYFASTEKSNIIRGWIFGTTLDSKTQSLLIVNNATNVVIKVCEFQFCNDPFLGVYYHKNNKSWMESEFRVYSSANNCTFEYVSQPFLMDLEGKQGNFKNLREFVFKNIDGYFKIYSKHTPINLVRDLPQGFSALEPLVDLPIGINITRFQTLLALHRSYLTPGDSSSGWTAGAAAYYVGYLQPRTFLLKYNENGTITDAVDCALDPLSETKCTLKSFTVEKGIYQTSNFRVQPTESIVRFPNITNLCPFGEVFNATRFASVYAWNRKRISNCVADYSVLYNSASFSTFKCYGVSPTKLNDLCFTNVYADSFVIRGDEVRQIAPGQTGKIADYNYKLPDDFTGCVIAWNSNNLDSKVGGNYNYLYRLFRRSNLKPFERDISTEIYQAGSTPCNGVEGFNCYFPLQSYGFQPTNGVGYQPYRVVVLSFELLPAPATVCGPKKSTNLVKNKCVNFNFNGLTGTGVLTESNKKFLPFQQFGRDIADTTDAVRDPQTLEILDITPCSFGGVSVITPGTNTSNQVAVLYQGVNCTEVPVAIHADQLTPTWRVYSTGSNVFQTRAGCLIGAEHVNNSYECDIPIGAGICASYQTQTNSPRRARSVASQSIIAYTMSLGAENSVAYSNNSIAIPTNFTISVTTEILPVSMTKTSVDCTMYICGDSTECSNLLLQYGSFCTQLNRALTGIAVEQDKNTQEVFAQVKQIYKTPPIKDFGGFNFSQILPDPSKPSKRSFIEDLLFNKVTLADAGFIKQYGDCLGDIAARDLICAQKFNGLTVLPPLLTDEMIAQYTSALLAGTITSGWTFGAGAALQIPFAMQMAYRFNGIGVTQCVLYENQKLIANQFNSAIGKIQDSLSSAAPALGKLQDVVNQNAQALNTLVKQLSSNFGAISSVLNDILSRLDKVEAEVQIDRLITGRLQSLQTYVTQQLIRAAEIRASANLAATKMSECVLGQSKRVDFCGKGYHLMSFPQSAPHGVVFLHVTYVPAQEKNFTTAPAICHDGKAHFPREGVFVSNGTHWFVTQRNFYEPQIITTDNTFVCGNCDVVIGIVNNTVYDPLQPELDSFKEELDKYFKNHTSPDVDLGDISGINASVVNIQKEIDRLNEVAKNLNESLIDLQELGKYEQYIK

SEQ ID NO: 13400 - protein, 1211 aa, Artificial Sequence
  SARS-CoV-2/USA/WA8-UW5/2020__EPI_ISL_413486 spike protein (1-1211)(N914C_S1123C)
MFVFLVLLPLVSSQCVNLTTRTQLPPAYTNSFTRGVYYPDKVFRSSVLHSTQDLFLPFFSNVTWFHAIHVSGTNGTKRFDNPVLPFNDGVYFASTEKSNIIRGWIFGTTLDSKTQSLLIVNNATNVVIKVCEFQFCNDPFLGVYYHKNNKSWMESEFRVYSSANNCTFEYVSQPFLMDLEGKQGNFKNLREFVFKNIDGYFKIYSKHTPINLVRDLPQGFSALEPLVDLPIGINITRFQTLLALHRSYLTPGDSSSGWTAGAAAYYVGYLQPRTFLLKYNENGTITDAVDCALDPLSETKCTLKSFTVEKGIYQTSNFRVQPTESIVRFPNITNLCPFGEVFNATRFASVYAWNRKRISNCVADYSVLYNSASFSTFKCYGVSPTKLNDLCFTNVYADSFVIRGDEVRQIAPGQTGKIADYNYKLPDDFTGCVIAWNSNNLDSKVGGNYNYLYRLFRKSNLKPFERDISTEIYQAGSTPCNGVEGFNCYFPLQSYGFQPTNGVGYQPYRVVVLSFELLHAPATVCGPKKSTNLVKNKCVNFNFNGLTGTGVLTESNKKFLPFQQFGRDIADTTDAVRDPQTLEILDITPCSFGGVSVITPGTNTSNQVAVLYQDVNCTEVPVAIHADQLTPTWRVYSTGSNVFQTRAGCLIGAEYVNNSYECDIPIGAGICASYQTQTNSPRRARSVASQSIIAYTMSLGAENSVAYSNNSIAIPTNFTISVTTEILPVSMTKTSVDCTMYICGDSTECSNLLLQYGSFCTQLNRALTGIAVEQDKNTQEVFAQVKQIYKTPPIKDFGGFNFSQILPDPSKPSKRSFIEDLLFNKVTLADAGFIKQYGDCLGDIAARDLICAQKFNGLTVLPPLLTDEMIAQYTSALLAGTITSGWTFGAGAALQIPFAMQMAYRFNGIGVTQCVLYENQKLIANQFNSAIGKIQDSLSSTASALGKLQDVVNQNAQALNTLVKQLSSNFGAISSVLNDILSRLDKVEAEVQIDRLITGRLQSLQTYVTQQLIRAAEIRASANLAATKMSECVLGQSKRVDFCGKGYHLMSFPQSAPHGVVFLHVTYVPAQEKNFTTAPAICHDGKAHFPREGVFVSNGTHWFVTQRNFYEPQIITTDNTFVCGNCDVVIGIVNNTVYDPLQPELDSFKEELDKYFKNHTSPDVDLGDISGINASVVNIQKEIDRLNEVAKNLNESLIDLQELGKYEQYIK

SEQ ID NO: 13401 - protein, 1211 aa, Artificial Sequence
  SARS-CoV-2/England/20102000506/2020__EPI_ISL_415147 spike protein (1-1211)(N914C_S1123C)
MFVFLVLLPLVSSQCVNLTTRTQLPPAYTNSFTRGVYYPDKVFRSSVLHSTQDLFLPFFSNVTWFHAIHVSGTNGTKRFDNPVLPFNDGVYFASTEKSNIIRGWIFGTTLDSKTQSLLIVNNATNVVIKVCEFQFCNDPFLGVYYHKNNKSWMESEFRVYSSANNCTFEYVSQPFLMDLEGKQGNFKNLREFVFKNIDGYFKIYSKHTPINLVRDLPQGFSALEPLVDLPIGINITRFQTLLALHRSYLTPGDSSSGWTAGAAAYYVGYLQPRTFLLKYNENGTITDAVDCALDPLSETKCTLKSFTVEKGIYQTSNFRVQPTESIVRFPNITNLCPFGEVFNATRFASVYAWNRKRISNCVADYSVLYNSASFSTFKCYGVSPTKLNDLCFTNVYADSFVIRGDEVRQIAPGQTGKIADYNYKLPDDFTGCVIAWNSNNLDSKVGGNYNYLYRLFRKSNLKPFERDISTEIYQAGSTPCNGVEGFNCYFPLQSYGFQPTNGVGYQPYRVVVLSFELLHAPATVCGPKKSTNLVKNKCVNFNFNGLTGTGVLTESNKKFLPFQQFGRDIADTTDAVRDPQTLEILDITPCSFGGVSVITPGTNTSNQVAVLYQGVNCTEVPVAIHADQLTPTWRVYSTGSNVFQTRAGCLIGAEHVNNSYECDIPIGAGICASYQTQTNSPRRARSVASQSIIAYTMSLGAENSVAYSNNSIAIPTNFTISVTTEILPVSMTKTSVDCTMYICGDSTECSNLLLQYGSFCTQLNRALTGIAVEQDKNTQEVFAQVKQIYKTPPIKDFGGFNFSQILPDPSKPSKRSFIEDLLFNKVTLADAGFIKQYGYCLGDIAARDLICAQKFNGLTVLPPLLTDEMIAQYTSALLAGTITSGWTFGAGAALQIPFAMQMAYRFNGIGVTQCVLYENQKLIANQFNSAIGKIQDSLSSTASALGKLQDVVNQNAQALNTLVKQLSSNFGAISSVLNDILSRLDKVEAEVQIDRLITGRLQSLQTYVTQQLIRAAEIRASANLAATKMSECVLGQSKRVDFCGKGYHLMSFPQSAPHGVVFLHVTYVPAQEKNFTTAPAICHDGKAHFPREGVFVSNGTHWFVTQRNFYEPQIITTDNTFVCGNCDVVIGIVNNTVYDPLQPELDSFKEELDKYFKNHTSPDVDLGDISGINASVVNIQKEIDRLNEVAKNLNESLIDLQELGKYEQYIK

SEQ ID NO: 13402 - protein, 1211 aa, Artificial Sequence
  SARS-CoV-2/Belgium/VAG-03013/2020__EPI_ISL_415155 spike protein (1-1211)(N914C_S1123C)
MFVFLVLLPLVSSQCVNLTTRTQLPPAYTNSFTRGVYYPDKVFRSSVLHSTQDLFLPFFSNVTWFHAIHVSGTNGTKRFDNPVLPFNDGVYFASTEKSNIIRGWIFGTTLDSKTQSLLIVNNATNVVIKVCEFQFCNDPFLGVYYHKNNKSWMESEFRVYSSANNCTFEYVSQPFLMDLEGKQGNFKNLREFVFKNIDGYFKIYSKHTPINLVRDLPQGFSALEPLVDLPIGINITRFQTLLALHRSYLTPGDSSSGWTAGAAAYYVGYLQPRTFLLKYNENGTITDAVDCALDPLSETKCTLKSFTVEKGIYQTSNFRVQPTESIVRFPNITNLCPFGEVFNATRFASVYAWNRKRISNCVADYSVLYNSASFSTFKCYGVSPTKLNDLCFTNVYADSFVIRGDEVRQIAPGQTGKIADYNYKLPDDFTGCVIAWNSNNLDSKVGGNYNYLYRLFRKSNLKPFERDISTEIYQAGSTPCNGVEGFNCYFPLQSYGFQPTNGVGYQPYRVVVLSFELLHAPATVCGPKKSTNLVKNKCVNFNFNGLTGTGVLTESNKKFLPFQQFGRDIADTTDAVRDPQTLEILDITPCSFGGVSVITPGTNTSNQVAVLYQGVNCTEVPVAIHADQLTPTWRVYSTGSNVFQTRAGCLIGAEHVNNSYECDIPIGAGICASYQTQTNSPRRARSVASQSIIAYTMSLGAENSVAYSNNSIAIPTNFTISVTTEILPVSMTKTSVDCTMYICGDSTECSNLLLQYGSFCTQLNRALTGIAVEQDKNTQEVFAQVKQIYKTPPIKDFGGFNFSQILPDPSKPSKRSFIEDLLFNKVTLADAGFIKQYGDCLGDIAARDLICAQKFNGLTVLPPLLTDEMIAQYTSALLAGTITSGWTFGAGAALQIPFAMQMAYRFNGIGVTQCVLYENQKLIANQFNSAIGKIQDSLSSTATALGKLQDVVNQNAQALNTLVKQLSSNFGAISSVLNDILSRLDKVEAEVQIDRLITGRLQSLQTYVTQQLIRAAEIRASANLAATKMSECVLGQSKRVDFCGKGYHLMSFPQSAPHGVVFLHVTYVPAQEKNFTTAPAICHDGKAHFPREGVFVSNGTHWFVTQRNFYEPQIITTDNTFVCGNCDVVIGIVNNTVYDPLQPELDSFKEELDKYFKNHTSPDVDLGDISGINASVVNIQKEIDRLNEVAKNLNESLIDLQELGKYEQYIK

SEQ ID NO: 13403 - protein, 1211 aa, Artificial Sequence
  SARS-CoV-2/Belgium/BC-03016/2020__EPI_ISL_415157 spike protein (1-1211)(N914C_S1123C)
MFVFLVLLPLVSSQCVNLTTRTQLPPAYTNSFTRGVYYPDKVFRSSVLHSTQDLFLPFFSNVTWFHAIHVSGTNGTKRFDNPVLPFNDGVYFASTEKSNIIRGWIFGTTLDSKTQSLLIVNNATNVVIKVCEFQFCNDPFLGVYYHKNNKSWMESEFRVYSSANNCTFEYVSQPFLMDLEGKQGNFKNLREFVFKNIDGYFKIYSKHTPINLVRDLPQGFSALEPLVDLPIGINITRFQTLLALHRSYLTPGDSSSGWTAGAAAYYVGYLQPRTFLLKYNENGTITDAVDCALDPLSETKCTLKSFTVEKGIYQTSNFRVQPTESIVRFPNITNLCPFGEVFNATRFASVYAWNRKRISNCVADYSVLYNSASFSTFKCYGVSPTKLNDLCFTNVYADSFVIRGDEVRQIAPGQTGKIADYNYKLPDDFTGCVIAWNSNNLDSKVGGNYNYLYRLFRKSNLKPFERDISTEIYQAGSTPCNGVEGFNCYFPLQSYGFQPTNGVGYQPYRVVVLSFELLHAPATVCGPKKSTNLVKNKCVNFNFNGLTGTGVLTESNKKFLPFQQFGRDIADTTDAVRDPQTLEILDITPCSFGGVSVITPGTNTSNQVAVLYQGVNCTEVPVAIHADQLTPTWRVYSTGSNVFQTRAGCLIGAEHVNNSYECDIPIGAGICASYQTQTNSPRRARSVASQSIIAYTMSLGAENSVAYSNNSIAIPTNFTISVTTEILPVSMTKTSVDCTMYICGDSTECSNLLLQYGSFCTQLNRALTGIAVEQDKNTQEVFAQVKQIYKTPPIKDFGGFNFSQILPDPSKPSKRSFIEDLLFNKVTLADAGFIKQYGDCLGDIAARDLICAQKFNGLTVLPPLLTDEMIAQYTSALLAGTITSGWTFGAGAALQIPFAMQMAYRFNGIGVTQCVLYENQKLIANQFNSAIGKIQDSLSSTAPALGKLQDVVNQNAQALNTLVKQLSSNFGAISSVLNDILSRLDKVEAEVQIDRLITGRLQSLQTYVTQQLIRAAEIRASANLAATKMSECVLGQSKRVDFCGKGYHLMSFPQSAPHGVVFLHVTYVPAQEKNFTTAPAICHDGKAHFPREGVFVSNGTHWFVTQRNFYEPQIITTDNTFVCGNCDVVIGIVNNTVYDPLQPELDSFKEELDKYFKNHTSPDVDLGDISGINASVVNIQKEIDRLNEVAKNLNESLIDLQELGKYEQYIK

SEQ ID NO: 13404 - protein, 1211 aa, Artificial Sequence
  SARS-CoV-2/Germany/BavPat3/2020__EPI_ISL_414521 spike protein (1-1211)(N914C_S1123C)
MFVFLVLLPLVSSQCVNLTTRTQLPPAYTNSFTRGVYYPDKVFRSSVLHSTQDLFLPFFSNVTWFHAIHVSGTNGTKRFDNPVLPFNDGVYFASTEKSNIIRGWIFGTTLDSKTQSLLIVNNATNVVIKVCEFQFCNDPFLGVYYHKNNKSWMESEFRVYSSANNCTFEYVSQPFLMDLEGKQGNFKNLREFVFKNIDGYFKIYSKHTPINLVRDLPQGFSALEPLVDLPIGINITRFQTLLALHRSYLTPGDSSSGWTAGAAAYYVGYLQPRTFLLKYNENGTITDAVDCALDPLSETKCTLKSFTVEKGIYQTSNFRVQPTESIVRFPNITNLCPFGEVFNATRFASVYAWNRKRISNCVADYSVLYNSASFSTFKCYGVSPTKLNDLCFTNVYADSFVIRGDEVRQIAPGQTGKIADYNYKLPDDFTGCVIAWNSNNLDSKVGGNYNYLYRLFRKSNLKPFERDISTEIYQAGSTPCNGVEGFNCYFPLQSYGFQPTNGVGYQPYRVVVLSFELLHAPATVCGPKKSTNLVKNKCVNFNFNGLTGTGVLTESNKKFLPFQQFGRDIADTTDAVRDPQTLEILDITPCSFGGVSVITPGTNTSNQVAVLYQDVNCTEVPVAIHADQLTPTWRVYSTGSNVFQTRAGCLIGAEHVNNSYECDIPIGAGICASYQTQTNSPRRARSVASQSIIAYTMSLGAENSVAYSNNSIAIPTNFTISVTTEILPVSMTKTSVDCTMYICGDSTECSNLLLQYGSFCTQLNRALTGIAVEQDKNTQQVFAQVKQIYKTPPIKDFGGFNFSQILPDPSKPSKRSFIEDLLFNKVTLADAGFIKQYGDCLGDIAARDLICAQKFNGLTVLPPLLTDEMIAQYTSALLAGTITSGWTFGAGAALQIPFAMQMAYRFNGIGVTQCVLYENQKLIANQFNSAIGKIQDSLSSTASALGKLQDVVNQNAQALNTLVKQLSSNFGAISSVLNDILSRLDKVEAEVQIDRLITGRLQSLQTYVTQQLIRAAEIRASANLAATKMSECVLGQSKRVDFCGKGYHLMSFPQSAPHGVVFLHVTYVPAQEKNFTTAPAICHDGKAHFPREGVFVSNGTHWFVTQRNFYEPQIITTDNTFVCGNCDVVIGIVNNTVYDPLQPELDSFKEELDKYFKNHTSPDVDLGDISGINASVVNIQKEIDRLNEVAKNLNESLIDLQELGKYEQYIK

SEQ ID NO: 13405 - protein, 1211 aa, Artificial Sequence
  SARS-CoV-2/France/HF1805/2020__EPI_ISL_414628 spike protein (1-1211)(N914C_S1123C)
MFVFLVLLPLVSSQCVNLTTRTQLPPAYTNSFTRGVYYPDKVFRSSVLHSTQDLFLPFFSNVTWFHAIHVSGTNGTKRFDNPVLPFNDGVYFASTEKSNIIRGWIFGTTLDSKTQSLLIVNNATNVVIKVCEFQFCNDPFLGVYYHKNNKSWMESEFRVYSSANNCTFEYVSQPFLMDLEGKQGNFKNLREFVFKNIDGYFKIYSKHTPINLVRDLPQGFSALEPLVDLPIGINITRFQTLLALHRSYLTPGDSSSGWTAGAAAYYVGYLQPRTFLLKYNENGTITDAVDCALDPLSETKCTLKSFTVEKGIYQTSNFRVQPTESIVRFPNITNLCPFGEVFNATRFASVYAWNRKRISNCVADYSVLYNSASFSTFKCYGVSPTKLNDLCFTNVYADSFVIRGDEVRQIAPGQTGKIADYNYKLPDDFTGCVIAWNSNNLDSKVGGNYNYLYRLFRKSNLKPFERDISTEIYQAGSTPCNGVEGFNCYFPLQSYGFQPTNGVGYQPYRVVVLSFELLHAPATVCGPKKSTNLVKNKCVNFNFNGLTGTGVLTESNKKFLPFQQFGRDIADTTDAVRDPQTLEILDITPCSFGGVSVITPGTNTSNQVAVLYQGVNCTEVPVAIHADQLTPTWRVYSTGSNVFQTRAGCLIGAEHVNNSYECDIPIGAGICASYQTQTNSPRRARSVASQSIIAYTMSLGAENSVAYSNNSIAIPTNFTISVTTEILPVSMTKTSVDCTMYICGDSTECSNLLLQYGSFCTQLNRALTGIAVEQDKNTQEVFAQVKQIYKTPPIKDFGGFNFSQILPDPSKPSKRSFIEDLLFNKVTLADAGFIKQYGDCLGDIAARDLICAQKFNGLTVLPPLLTDEMIAQYTSALLAGTITSGWTFGAGAALQIPFAMQMAYRFNGIGVTQCVLYENQKLIANQFNSAIGKIQDSLSSTASALGKLQDVVNQNAQALNTLVKQLSSNFGAISSVLNDILSRLDKVEAEVQIDRLITGRLQSLQTYVTQQLIRAAEIRASANLAATKMSECVLGQSKRVDFCGKGYHLMSFPQSAPHGVVFLHVTYVPAQEKNFTTAPAICHDGKAHFPREGVFVSNGTHWFVTQRNFYEPQIITTDNTFVCGNCDVVIGVVNNTVYDPLQPELDSFKEELDKYFKNHTSPDVDLGDISGINASVVNIQKEIDRLNEVAKNLNESLIDLQELGKYEQYIK

SEQ ID NO: 13406 - protein, 1211 aa, Artificial Sequence
  SARS-CoV-2/Netherlands/ZuidHolland_9/2020__EPI_ISL_414445 spike protein (1-1211)(N914C_S1123C)
MFVFLVLLPLVSSQCVNLTTRTQLPPAYTNSFTRGVYYPDKVFRSSVLHSTQDLFLPFFSNVTWFHAIHVSGTNGTKRFDNPVLPFNDGVYFASTEKSNIIRGWIFGTTLDSKTQSLLIVNNATNVVIKVCEFQFCNDPFLGVYYHKNNKSWMESEFRVYSSANNCTFEYVSQPFLMDLEGKQGNFKNLREFVFKNIDGYFKIYSKHTPINLVRDLPQGFSALEPLVDLPIGINITRFQTLLALHRSYLTPGDSSSGWTAGAAAYYVGYLQPRTFLLKYNENGTITDAVDCALDPLSETKCTLKSFTVEKGIYQTSNFRVQPTESIVRFPNITNLCPFGEVFNATRFASVYAWNRKRISNCVADYSVLYNSASFSTFKCYGVSPTKLNDLCFTNVYADSFVIRGDEVRQIAPGQTGKIADYNYKLPDDFTGCVIAWNSNNLDSKVGGNYNYLYRLFRKSNLKPFERDISTEIYQAGSTPCNGVEGFNCYFPLQSYGFQPTNGVGYQPYRVVVLSFELLHAPATVCGPKKSTNLVKNKCVNFNFNGLTGTGVLTESNKKFLPFQQFGRDIADTTDAVRDPQTLEILDITPCSFGGVSVITPGTNTSNQVAVLYQGVNCTEVPVAIHADQLTPTWRVYSTGSNVFQTRAGCLIGAEHVNNSYECDIPIGAGICASYQTQTNSPRRARSVASQSIIAYTMSLGAENSVAYSNNSIAIPTNFTISVTTEILPVSMTKTSVDCTMYICGDSTECSNLLLQYGSFCTQLNRALTGIAVEQDKNTQEVFAQVKQIYKTPPIKDFGGFNFSQILPDPSKPSKRSFIEDLLFNKVTLADAGFIKQYGDCLGDIAARDLICVQKFNGLTVLPPLLTDEMIAQYTSALLAGTITSGWTFGAGAALQIPFAMQMAYRFNGIGVTQCVLYENQKLIANQFNSAIGKIQDSLSSTASALGKLQDVVNQNAQALNTLVKQLSSNFGAISSVLNDILSRLDKVEAEVQIDRLITGRLQSLQTYVTQQLIRAAEIRASANLAATKMSECVLGQSKRVDFCGKGYHLMSFPQSAPHGVVFLHVTYVPAQEKNFTTAPAICHDGKAHFPREGVFVSNGTHWFVTQRNFYEPQIITTDNTFVCGNCDVVIGIVNNTVYDPLQPELDSFKEELDKYFKNHTSPDVDLGDISGINASVVNIQKEIDRLNEVAKNLNESLIDLQELGKYEQYIK

SEQ ID NO: 13407 - protein, 1211 aa, Artificial Sequence
  SARS-CoV-2/Finland/FIN03032020A/2020__EPI_ISL_413602 spike protein (1-1211)(N914C_S1123C)
MFVFLVLLPLVSSQCVNLTTRTQLPPAYTNSFTRGVYYPDKVFRSSVLHSTQDLFLPFFSNVTWFHAIHVSGTNGTKRFDNPVLPFNDGVYFASTEKSNIIRGWIFGTTLDSKTQSLLIVNNATNVVIKVCEFQFCNDPFLGVYYHKNNKSWMESEFRVYSSANNCTFEYVSQPFLMDLEGKQGNFKNLREFVFKNIDGYFKIYSKHTPINLVRDLPQGFSALEPLVDLPIGINITRFQTLLALHRSYLTPGDSSSGWTAGAAAYYVGYLQPRTFLLKYNENGTITDAVDCALDPLSETKCTLKSFTVEKGIYQTSNFRVQPTESIVRFPNITNLCPFGEVFNATRFASVYAWNRKRISNCVADYSVLYNSASFSTFKCYGVSPTKLNDLCFTNVYADSFVIRGDEVRQIAPGQTGKIADYNYKLPDDFTGCVISWNSNNLDSKVGGNYNYLYRLFRKSNLKPFERDISTEIYQAGSTPCNGVEGFNCYFPLQSYGFQPTNGVGYQPYRVVVLSFELLHAPATVCGPKKSTNLVKNKCVNFNFNGLTGTGVLTESNKKFLPFQQFGRDIADTTDAVRDPQTLEILDITPCSFGGVSVITPGTNTSNQVAVLYQGVNCTEVPVAIHADQLTPTWRVYSTGSNVFQTRAGCLIGAEHVNNSYECDIPIGAGICASYQTQTNSPRRARSVASQSIIAYTMSLGAENSVAYSNNSIAIPTNFTISVTTEILPVSMTKTSVDCTMYICGDSTECSNLLLQYGSFCTQLNRALTGIAVEQDKNTQEVFAQVKQIYKTPPIKDFGGFNFSQILPDPSKPSKRSFIEDLLFNKVTLADAGFIKQYGDCLGDIAARDLICAQKFNGLTVLPPLLTDEMIAQYTSALLAGTITSGWTFGAGAALQIPFAMQMAYRFNGIGVTQCVLYENQKLIANQFNSAIGKIQDSLSSTASALGKLQDVVNQNAQALNTLVKQLSSNFGAISSVLNDILSRLDKVEAEVQIDRLITGRLQSLQTYVTQQLIRAAEIRASANLAATKMSECVLGQSKRVDFCGKGYHLMSFPQSAPHGVVFLHVTYVPAQEKNFTTAPAICHDGKAHFPREGVFVSNGTHWFVTQRNFYEPQIITTDNTFVCGNCDVVIGIVNNTVYDPLQPELDSFKEELDKYFKNHTSPDVDLGDISGINASVVNIQKEIDRLNEVAKNLNESLIDLQELGKYEQYIK

SEQ ID NO: 13408 - protein, 1211 aa, Artificial Sequence
  SARS-CoV-2/France/GE1977/2020__EPI_ISL_414632 spike protein (1-1211)(N914C_S1123C)
MFVFLVLLPLVSSQCVNLTTRTQLPPAYTNSFTRGVYYPDKVFRSSVLHSTQDLFLPFFSNVTWFHAIHVSGTNGTKRFDNPVLPFNDGVYFASTEKSNIIRGWIFGTTLDSKTQSLLIVNNATNVVIKVCEFQFCNDPFLGVYYHKNNKSWMESEFRVYSSANNCTFEYVSQPFLMDLEGKQGNFKNLREFVFKNIDGYFKIYSKHTPINLVRDLPQGFSALEPLVDLPIGINITRFQTLLALHRSYLTPGDSSSGWTAGAAAYYVGYLQPRTFLLKYNENGTITDAVDCALDPLSETKCTLKSFTVEKGIYQTSNFRVQPTESIVRFPNITNLCPFGEVFNATRFASVYAWNRKRISNCVADYSVLYNSASFSTFKCYGVSPTKLNDLCFTNVYADSFVIRGDEVRQIAPGQTGKIADYNYKLPDDFTGCVIAWNSNNLDSKVGGNYNYLYRLFRKSNLKPFERDISTEIYQAGSTPCNGVEGFNCYFPLQSYGFQPTNGVGYQPYRVVVLSFELLHAPATVCGPKKSTNLVKNKCVNFNFNGLTGTGVLTESNKKFLPFQQFGRDIADTTDAVRDPQTLEILDITPCSFGGVSVITPGTNTSNQVAVLYQGVNCTEVPVAIHADQLTPTWRVYSTGSNVFQTRAGCLIGAEHVNNSYECDIPIGAGICASYQTQTNSPRRARSVASQSIIAYTMSLGAENSVAYSNNSIAIPTNFTISVTTEILPVSMTKTSVDCTMYICGDSTECSNLLLQYGSFCTQLNRALTGIAVEQDKNTQEVFAQVKQIYKTPPIKDFGGFNFSQILPDPSKPSKRSFIEDLLFNKVTLADAGFIKQYGDCLGDIAARDLICAQKFNGLTVLPPLLTDEMIAQYTSALLAGTITSGWTFGAGAALQIPFAMQMAYRFNGIGVTQCVLYENQKLIANQFNSAIGKIQDSLFSTASALGKLQDVVNQNAQALNTLVKQLSSNFGAISSVLNDILSRLDKVEAEVQIDRLITGRLQSLQTYVTQQLIRAAEIRASANLAATKMSECVLGQSKRVDFCGKGYHLMSFPQSAPHGVVFLHVTYVPAQEKNFTTAPAICHDGKAHFPREGVFVSNGTHWFVTQRNFYEPQIITTDNTFVCGNCDVVIGIVNNTVYDPLQPELDSFKEELDKYFKNHTSPDVDLGDISGINASVVNIQKEIDRLNEVAKNLNESLIDLQELGKYEQYIK

SEQ ID NO: 13409 - protein, 1211 aa, Artificial Sequence
  SARS-CoV-2/Finland/FIN-313/2020__EPI_ISL_414641 spike protein (1-1211)(N914C_S1123C)
MFVFLVLLPLVSSQCVNLTTRTQLPPAYTNSFTRGVYYPDKVFRSSVLHSTQDLFLPFFSNVTWFHAIHVSGTNGTKRFDNPVLPFNDGVYFASTEKSNIIRGWIFGTTLDSKTQSLLIVNNATNVVIKVCEFQFCNDPFLGVYYHKNNKSWMESEFRVYSSANNCTFEYVSQPFLMDLEGKQGNFKNLREFVFKNIDGYFKIYSKHTPINLVRDLPQGFSALEPLVDLPIGINITRFKTLLALHRSYLTPGDSSSGWTAGAAAYYVGYLQPRTFLLKYNENGTITDAVDCALDPLSETKCTLKSFTVEKGIYQTSNFRVQPTESIVRFPNITNLCPFGEVFNATRFASVYAWNRKRISNCVADYSVLYNSASFSTFKCYGVSPTKLNDLCFTNVYADSFVIRGDEVRQIAPGQTGKIADYNYKLPDDFTGCVIAWNSNNLDSKVGGNYNYLYRLFRKSNLKPFERDISTEIYQAGSTPCNGVEGFNCYFPLQSYGFQPTNGVGYQPYRVVVLSFELLHAPATVCGPKKSTNLVKNKCVNFNFNGLTGTGVLTESNKKFLPFQQFGRDIADTTDAVRDPQTLEILDITPCSFGGVSVITPGTNTSNQVAVLYQGVNCTEVPVAIHADQLTPTWRVYSTGSNVFQTRAGCLIGAEHVNNSYECDIPIGAGICASYQTQTNSPRRARSVASQSIIAYTMSLGAENSVAYSNNSIAIPTNFTISVTTEILPVSMTKTSVDCTMYICGDSTECSNLLLQYGSFCTQLNRALTGIAVEQDKNTQEVFAQVKQIYKTPPIKDFGGFNFSQILPDPSKPSKRSFIEDLLFNKVTLADAGFIKQYGDCLGDIAARDLICAQKFNGLTVLPPLLTDEMIAQYTSALLAGTITSGWTFGAGAALQIPFAMQMAYRFNGIGVTQCVLYENQKLIANQFNSAIGKIQDSLSSTASALGKLQDVVNQNAQALNTLVKQLSSNFGAISSVLNDILSRLDKVEAEVQIDRLITGRLQSLQTYVTQQLIRAAEIRASANLAATKMSECVLGQSKRVDFCGKGYHLMSFPQSAPHGVVFLHVTYVPAQEKNFTTAPAICHDGKAHFPREGVFVSNGTHWFVTQRNFYEPQIITTDNTFVCGNCDVVIGIVNNTVYDPLQPELDSFKEELDKYFKNHTSPDVDLGDISGINASVVNIQKEIDRLNEVAKNLNESLIDLQELGKYEQYIK

SEQ ID NO: 13410 - protein, 1211 aa, Artificial Sequence
  SARS-CoV-2/Netherlands/ZuidHolland_2/2020__EPI_ISL_414556 spike protein (1-1211)(N914C_S1123C)
MFVFLVLLPLVSSQCVNLTTRTQLPPAYTNSFTRGVYYPDKVFRSSVLHSTQDLFLPFFSNVTWFHAIHVSGTNGTKRFDNPVLPFNDGVYFASTEKSNIIRGWIFGTTLDSKTQSLLIVNNATNVVIKVCEFQFCNDPFLGVYYHKNNKSWMESEFRVYSSANNCTFEYVSQPFLMDLEGKQGNFKNLREFVFKNIDGYFKIYSKHTPINLVRDLPQGFSALEPLVDLPIGINITRFQTLLALHRSYLTPGDSSSGWTAGAAAYYVGYLQPRTFLLKYNENGTITDAVDCALDPLSETKCTLKSFTVEKGIYQTSNFRVQPTESIVRFPNITNLCPFGEVFNATRFASVYAWNRKRISNCVADYSVLYNSASFSTFKCYGVSPTKLNDLCFTNVYADSFVIRGDEVRQIAPGQTGKIADYNYKLPDDFTGCVIAWNSNNLDSKVGGNYNYLYRLFRKSNLKPFERDISTEIYQAGSTPCNGVEGFNCYFPLQSYGFQPTNGVGYQPYRVVVLSFELLHAPATVCGPKKSTNLVKNKCVNFNFNGLTGTGVLTESNKKFLPFQQFGRDIADTTDAVRDPQTLEILDITPCSFGGVSVITPGTNTSNQVAVLYQGVNCTEVPVAIHADQLTPTWRVYSTGSNVFQTRAGCLIGAEHVNNSYECDIPIGAGICASYQTQTNSPRRARSVASQSIIAYTMSLGAENSVAYSNNSIAIPTNFTISVTTEILPVSMTKTSVDCTMYICGDSTECSNLLLQYGSFCTQLNRALTGIALEQDKNTQEVFAQVKQIYKTPPIKDFGGFNFSQILPDPSKPSKRSFIEDLLFNKVTLADAGFIKQYGDCLGDIAARDLICAQKFNGLTVLPPLLTDEMIAQYTSALLAGTITSGWTFGAGAALQIPFAMQMAYRFNGIGVTQCVLYENQKLIANQFNSAIGKIQDSLSSTASALGKLQDVVNQNAQALNTLVKQLSSNFGAISSVLNDILSRLDKVEAEVQIDRLITGRLQSLQTYVTQQLIRAAEIRASANLAATKMSECVLGQSKRVDFCGKGYHLMSFPQSAPHGVVFLHVTYVPAQEKNFTTAPAICHDGKAHFPREGVFVSNGTHWFVTQRNFYEPQIITTDNTFVCGNCDVVIGIVNNTVYDPLQPELDSFKEELDKYFKNHTSPDVDLGDISGINASVVNIQKEIDRLNEVAKNLNESLIDLQELGKYEQYIK

SEQ ID NO: 13411 - protein, 1211 aa, Artificial Sequence
  SARS-CoV-2/USA/WA-UW31/2020__EPI_ISL_414618 spike protein (1-1211)(N914C_S1123C)
MFVFLVLLPLVSSQCVNLTTRTQLPPAYTNSFTRGVYYPDKVFRSSVLHSTQDLFLPFFSNVTWFHAIHVSGTNGTKRFDNPVLPFNDGVYFASTEKSNIIRGWIFGTTLDSKTQSLLIVNNATNVVIKVCEFQFCNDPFLGVYYHKNNKSWMESEFRVYSSANNCTFEYVSQPFLMDLEGKQGNFKNLREFVFKNIDGYFKIYSKHTPINLVRDLPQGFSALEPLVDLPIGINITRFQTLLALHRSYLTPGDSSSGWTAGAAAYYVGYLQPRTFLLKYNENGTITDAVDCALDPLSETKCTLKSFTVEKGIYQTSNFRVQPTESIVRFPNITNLCPFGEVFNATRFASVYAWNRKRISNCVADYSVLYNSASFSTFKCYGVSPTKLNDLCFTNVYADSFVIRGDEVRQIAPGQTGKIADYNYKLPDDFTGCVIAWNSNNLDSKVGGNYNYLYRLFRKSNLKPFERDISTEIYQAGSTPCNGAEGFNCYFPLQSYGFQPTNGVGYQPYRVVVLSFELLHAPATVCGPKKSTNLVKNKCVNFNFNGLTGTGVLTESNKKFLPFQQFGRDIADTTDAVRDPQTLEILDITPCSFGGVSVITPGTNTSNQVAVLYQDVNCTEVPVAIHADQLTPTWRVYSTGSNVFQTRAGCLIGAEHVNNSYECDIPIGAGICASYQTQTNSPRRARSVASQSIIAYTMSLGAENSVAYSNNSIAIPTNFTISVTTEILPVSMTKTSVDCTMYICGDSTECSNLLLQYGSFCTQLNRALTGIAVEQDKNTQEVFAQVKQIYKTPPIKDFGGFNFSQILPDPSKPSKRSFIEDLLFNKVTLADAGFIKQYGDCLGDIAARDLICAQKFNGLTVLPPLLTDEMIAQYTSALLAGTITSGWTFGAGAALQIPFAMQMAYRFNGIGVTQCVLYENQKLIANQFNSAIGKIQDSLSSTASALGKLQDVVNQNAQALNTLVKQLSSNFGAISSVLNDILSRLDKVEAEVQIDRLITGRLQSLQTYVTQQLIRAAEIRASANLAATKMSECVLGQSKRVDFCGKGYHLMSFPQSAPHGVVFLHVTYVPAQEKNFTTAPAICHDGKAHFPREGVFVSNGTHWFVTQRNFYEPQIITTDNTFVCGNCDVVIGIVNNTVYDPLQPELDSFKEELDKYFKNHTSPDVDLGDISGINASVVNIQKEIDRLNEVAKNLNESLIDLQELGKYEQYIK

SEQ ID NO: 13412 - protein, 1211 aa, Artificial Sequence
  SARS-CoV-2/South Korea/SNU01/2020__EPI_ISL_411929 spike protein (1-1211)(N914C_S1123C)
MFVFLVLLPLVSSQCVNLTTRTQLPPAYTNSFTRGVYYPDKVFRSSVLHSTQDLFLPFFSNVTWFHAIHVSGTNGTKRFDNPVLPFNDGVYFASTEKSNIIRGWIFGTTLDSKTQSLLIVNNATNVVIKVCEFQFCNDPFLGVYYHKNNKSWMESEFRVYSSANNCTFEYVSQPFLMDLEGKQGNFKNLREFVFKNIDGYFKIYSKHTPINLVRDLPQGFWALEPLVDLPIGINITRFQTLLALHRSYLTPGDSSSGWTAGAAAYYVGYLQPRTFLLKYNENGTITDAVDCALDPLSETKCTLKSFTVEKGIYQTSNFRVQPTESIVRFPNITNLCPFGEVFNATRFASVYAWNRKRISNCVADYSVLYNSASFSTFKCYGVSPTKLNDLCFTNVYADSFVIRGDEVRQIAPGQTGKIADYNYKLPDDFTGCVIAWNSNNLDSKVGGNYNYLYRLFRKSNLKPFERDISTEIYQAGSTPCNGVEGFNCYFPLQSYGFQPTNGVGYQPYRVVVLSFELLHAPATVCGPKKSTNLVKNKCVNFNFNGLTGTGVLTESNKKFLPFQQFGRDIADTTDAVRDPQTLEILDITPCSFGGVSVITPGTNTSNQVAVLYQDVNCTEVPVAIHADQLTPTWRVYSTGSNVFQTRAGCLIGAEHVNNSYECDIPIGAGICASYQTQTNSPRRARSVASQSIIAYTMSLGAENSVAYSNNSIAIPTNFTISVTTEILPVSMTKTSVDCTMYICGDSTECSNLLLQYGSFCTQLNRALTGIAVEQDKNTQEVFAQVKQIYKTPPIKDFGGFNFSQILPDPSKPSKRSFIEDLLFNKVTLADAGFIKQYGDCLGDIAARDLICAQKFNGLTVLPPLLTDEMIAQYTSALLAGTITSGWTFGAGAALQIPFAMQMAYRFNGIGVTQCVLYENQKLIANQFNSAIGKIQDSLSSTASALGKLQDVVNQNAQALNTLVKQLSSNFGAISSVLNDILSRLDKVEAEVQIDRLITGRLQSLQTYVTQQLIRAAEIRASANLAATKMSECVLGQSKRVDFCGKGYHLMSFPQSAPHGVVFLHVTYVPAQEKNFTTAPAICHDGKAHFPREGVFVSNGTHWFVTQRNFYEPQIITTDNTFVCGNCDVVIGIVNNTVYDPLQPELDSFKEELDKYFKNHTSPDVDLGDISGINASVVNIQKEIDRLNEVAKNLNESLIDLQELGKYEQYIK

SEQ ID NO: 13413 - protein, 1211 aa, Artificial Sequence
  SARS-CoV-2/China/WF0004/2020__EPI_ISL_413694 spike protein (1-1211)(N914C_S1123C)
MFVFLVLLPLVSSQCVNLTTRTQLPPAYTNSFTRGVYYPDKVFRSSVLHSTQDLFLPFFSNVTWFHAIHVSGTNGTKRFDNPVLPFNDGVYFASTEKSNIIRGWIFGTTLDSKTQSLLIVNNATNVVIKVCEFQFCNDPFLGVYYHKNNKSWTESEFRVYSSANNCTFEYVSQPFLMDLEGKQGNFKNLREFVFKNIDGYFKIYSKHTPINLVRDLPQGFSALEPLVDLPIGINITRFQTLLALHRSYLTPGDSSSGWTAGAAAYYVGYLQPRTFLLKYNENGTITDAVDCALDPLSETKCTLKSFTVEKGIYQTSNFRVQPTESIVRFPNITNLCPFGEVFNATRFASVYAWNRKRISNCVADYSVLYNSASFSTFKCYGVSPTKLNDLCFTNVYADSFVIRGDEVRQIAPGQTGKIADYNYKLPDDFTGCVIAWNSNNLDSKVGGNYNYLYRLFRKSNLKPFERDISTEIYQAGSTPCNGVEGFNCYFPLQSYGFQPTNGVGYQPYRVVVLSFELLHAPATVCGPKKSTNLVKNKCVNFNFNGLTGTGVLTESNKKFLPFQQFGRDIADTTDAVRDPQTLEILDITPCSFGGVSVITPGTNTSNQVAVLYQDVNCTEVPVAIHADQLTPTWRVYSTGSNVFQTRAGCLIGAEHVNNSYECDIPIGAGICASYQTQTNSPRRARSVASQSIIAYTMSLGAENSVAYSNNSIAIPTNFTISVTTEILPVSMTKTSVDCTMYICGDSTECSNLLLQYGSFCTQLNRALTGIAVEQDKNTQEVFAQVKQIYKTPPIKDFGGFNFSQILPDPSKPSKRSFIEDLLFNKVTLADAGFIKQYGDCLGDIAARDLICAQKFNGLTVLPPLLTDEMIAQYTSALLAGTITSGWTFGAGAALQIPFAMQMAYRFNGIGVTQCVLYENQKLIANQFNSAIGKIQDSLSSTASALGKLQDVVNQNAQALNTLVKQLSSNFGAISSVLNDILSRLDKVEAEVQIDRLITGRLQSLQTYVTQQLIRAAEIRASANLAATKMSECVLGQSKRFDFCGKGYHLMSFPQSAPHGVVFLHVTYVPAQEKNFTTAPAICHDGKAHFPREGVFVSNGTHWFVTQRNFYEPQIITTDNTFVCGNCDVVIGIVNNTVYDPLQPELDSFKEELDKYFKNHTSPDVDLGDISGINASVVNIQKEIDRLNEVAKNLNESLIDLQELGKYEQYIK

SEQ ID NO: 13414 - protein, 1211 aa, Artificial Sequence
  SARS-CoV-2/China/WF0028/2020__EPI_ISL_413791 spike protein (1-1211)(N914C_S1123C)
MFVFLVLLPLVSSQCVNLTTRTQLPPAYTNSFTRGVYYPDKVFRSSVLHSTQDLFLPFFSNVTWFHAIHVSGTNGTKRFDNPVLPFNDGVYFASTEKSNIIRGWIFGTTLDSKTQSLLIVNNATNVVIKVCEFQFCNDPFLGVYYHKNNKSWMESEFRVYSSANNCTFEYVSQPFLMDLEGKQGNFKNLREFVFKNIDGYFKIYSKHTPINLVRDLPQGFSALEPLVDLPIGINITRFQTLLALHRSYLTPGDSSSGWTAGAAAYYVGYLQPRTFLLKYNENGTITDAVDCALDPLSETKCTLKSFTVEKGIYQTSNFRVQPTESIVRFPNITNLCPFGEVFNATRFASVYAWNRKRISNCVADYSVLYNSASFSTFKCYGVSPTKLNDLCFTNVYADSFVIRGDEVRQIAPGQTGKIADYNYKLPDDFTGCVIAWNSNNLDSKVGGNYNYLYRLFRKSNLKPFERDISTEIYQAGSTPCNGVEGFNCYFPLQSYGFQPTNGVGYQPYRVVVLSFELLHAPATVCGPKKSTNLVKNKCVNFNFNGLTGTGVLTESNKKFLPFQQFGRDIADTTDAVRDPQTLEILDITPCSFGGVSVITPGTNTSNQVAVLYQDVNCTEVPVAIHADQLTPTWRVYSTGSNVFQTRAGCLIGAEHVNNSYECDIPIGAGICASYQTQTNSPRRARSVASQSIIAYTMSLGAENSVAYSNNSIAIPTNFTISVTTEILPVSMTKTSVDCTMYICGDSTECSNLLLQYGSFCTQLNRALTGIAVEQDKNTQEVFAQVKQIYKTPPIKDFGGFNFSQILPDPSKPSKRSFIEDLLFNKVTLADAGFIKQYGDCLGDIAARDLICAQKFNGLTVLPPLLTDEMIAQYTSALLAGTITSGWTFGAGAALQIPFAMQMAYRFNGIGVTQCVLYENQKLIANQFNSAIGKIQDSLSSTASALGKLQDVVNQNAQALNTLVKQLSSNFGAISSVLNDILSRLDKVEAEVQIDRLITGRLQSLQTYVTQQLIRAAEIRASANLAATKMSECVLGQSKRVDFCGKGYHLMSFPQSAPHGVVFLHVTYVPAQEKNFTTAPAICHDGKAHFPREGVFVSNGTHWFVTQRNFYEPQIITTDNTFVCGNCDVVIGIVNNTVYDPLQPELESFKEELDKYFKNHTSPDVDLGDISGINASVVNIQKEIDRLNEVAKNLNESLIDLQELGKYEQYIK

SEQ ID NO: 13415 - protein, 1211 aa, Artificial Sequence
  SARS-CoV-2/2019-nCoV/USA-CruiseA-18/2020__MT159716.1 spike protein (1-1211)(N914C_S1123C)
MFVFLVLLPLVSSQCVNLTTRTQLPPAYTNSFTRGVYYPDKVFRSSVLHSTQDLFLPFFSNVTWFHAIHVSGTNGTKRFDNPVLPFNDGVYFASTEKSNIIRGWIFGTTLDSKTQSLLIVNNATNVVIKVCEFQFCNDPFLGVYYHKNNKSWMESELRVYSSANNCTFEYVSQPFLMDLEGKQGNFKNLREFVFKNIDGYFKIYSKHTPINLVRDLPQGFSALEPLVDLPIGINITRFQTLLALHRSYLTPGDSSSGWTAGAAAYYVGYLQPRTFLLKYNENGTITDAVDCALDPLSETKCTLKSFTVEKGIYQTSNFRVQPTESIVRFPNITNLCPFGEVFNATRFASVYAWNRKRISNCVADYSVLYNSASFSTFKCYGVSPTKLNDLCFTNVYADSFVIRGDEVRQIAPGQTGKIADYNYKLPDDFTGCVIAWNSNNLDSKVGGNYNYLYRLFRKSNLKPFERDISTEIYQAGSTPCNGVEGFNCYFPLQSYGFQPTNGVGYQPYRVVVLSFELLHAPATVCGPKKSTNLVKNKCVNFNFNGLTGTGVLTESNKKFLPFQQFGRDIADTTDAVRDPQTLEILDITPCSFGGVSVITPGTNTSNQVAVLYQDVNCTEVPVAIHADQLTPTWRVYSTGSNVFQTRAGCLIGAEHVNNSYECDIPIGAGICASYQTQTNSPRRARSVASQSIIAYTMSLGAENSVAYSNNSIAIPTNFTISVTTEILPVSMTKTSVDCTMYICGDSTECSNLLLQYGSFCTQLNRALTGIAVEQDKNTQEVFAQVKQIYKTPPIKDFGGFNFSQILPDPSKPSKRSFIEDLLFNKVTLADAGFIKQYGDCLGDIAARDLICAQKFNGLTVLPPLLTDEMIAQYTSALLAGTITSGWTFGAGAALQIPFAMQMAYRFNGIGVTQCVLYENQKLIANQFNSAIGKIQDSLSSTASALGKLQDVVNQNAQALNTLVKQLSSNFGAISSVLNDILSRLDKVEAEVQIDRLITGRLQSLQTYVTQQLIRAAEIRASANLAATKMSECVLGQSKRVDFCGKGYHLMSFPQSAPHGVVFLHVTYVPAQEKNFTTAPAICHDGKAHFPREGVFVSNGTHWFVTQRNFYEPQIITTDNTFVCGNCDVVIGIVNNTVYDPLQPELDSFKEELDKYFKNHTSPDVDLGDISGINASVVNIQKEIDRLNEVAKNLNESLIDLQELGKYEQYIK

SEQ ID NO: 13416 - protein, 1211 aa, Artificial Sequence
  SARS-CoV-2/SARS-CoV-2/Yunnan-01/human/2020/CHN__MT049951.1 spike protein (1-1211)(N914C_S1123C)
MFVFLVLLPLVSSQCVNLTTRTQLPPANTNSFTRGVYYPDKVFRSSVLHSTQDLFLPFFSNVTWFHAIHVSGTNGTKRFDNPVLPFNDGVYFASTEKSNIIRGWIFGTTLDSKTQSLLIVNNATNVVIKVCEFQFCNDPFLGVYYHKNNKSWMESEFRVYSSANNCTFEYVSQPFLMDLEGKQGNFKNLREFVFKNIDGYFKIYSKHTPINLVRDLPQGFSALEPLVDLPIGINITRFQTLLALHRSYLTPGDSSSGWTAGAAAYYVGYLQPRTFLLKYNENGTITDAVDCALDPLSETKCTLKSFTVEKGIYQTSNFRVQPTESIVRFPNITNLCPFGEVFNATRFASVYAWNRKRISNCVADYSVLYNSASFSTFKCYGVSPTKLNDLCFTNVYADSFVIRGDEVRQIAPGQTGKIADYNYKLPDDFTGCVIAWNSNNLDSKVGGNYNYLYRLFRKSNLKPFERDISTEIYQAGSTPCNGVEGFNCYFPLQSYGFQPTNGVGYQPYRVVVLSFELLHAPATVCGPKKSTNLVKNKCVNFNFNGLTGTGVLTESNKKFLPFQQFGRDIADTTDAVRDPQTLEILDITPCSFGGVSVITPGTNTSNQVAVLYQDVNCTEVPVAIHADQLTPTWRVYSTGSNVFQTRAGCLIGAEHVNNSYECDIPIGAGICASYQTQTNSPRRARSVASQSIIAYTMSLGAENSVAYSNNSIAIPTNFTISVTTEILPVSMTKTSVDCTMYICGDSTECSNLLLQYGSFCTQLNRALTGIAVEQDKNTQEVFAQVKQIYKTPPIKDFGGFNFSQILPDPSKPSKRSFIEDLLFNKVTLADAGFIKQYGDCLGDIAARDLICAQKFNGLTVLPPLLTDEMIAQYTSALLAGTITSGWTFGAGAALQIPFAMQMAYRFNGIGVTQCVLYENQKLIANQFNSAIGKIQDSLSSTASALGKLQDVVNQNAQALNTLVKQLSSNFGAISSVLNDILSRLDKVEAEVQIDRLITGRLQSLQTYVTQQLIRAAEIRASANLAATKMSECVLGQSKRVDFCGKGYHLMSFPQSAPHGVVFLHVTYVPAQEKNFTTAPAICHDGKAHFPREGVFVSNGTHWFVTQRNFYEPQIITTDNTFVCGNCDVVIGIVNNTVYDPLQPELDSFKEELDKYFKNHTSPDVDLGDISGINASVVNIQKEIDRLNEVAKNLNESLIDLQELGKYEQYIK

SEQ ID NO: 13417 - protein, 1211 aa, Artificial Sequence
  SARS-CoV-2/USA/WA-UW292/2020__EPI_ISL_418077 spike protein (1-1211)(N914C_S1123C)
MFVFLVLLPLVSSQCVNLTTRTQLPPAYTNSFTRGVYYPDKVFRSSVLHSTQDLFLPFFSNVTWFHAIHVSGTNGTKRFDNPVLPFNDGVYFASTEKSNIIRGWIFGTTLDSKTQSLLIVNNATNVVIKVCEFQFCNDPFLGVYYHKNNKSWMESEFRVYSSANNCTFEYVSQPFLMDLEGKQGNFKNLREFVFKNIDGYFKIYSKHTPINLVRDLPQGFSALEPLVDLPIGINITRFQTLLALHRSYLTPGDSSSGWTAGAAAYYVGYLQPRTFLLKYNENGTITDAVDCALDPLSETKCTLKSFTVEKGIYQTSNFRVQPTESIVRFPNITNLCPFGEVFNATRFASVYAWNRKRISNCVADYSVLYNSASFSTFKCYGVSPTKLNDLCFTNVYADSFVIRGDEVRQIAPGQTGKIADYNYKLPDDFTGCVIAWNSNNLDSKVGGNYNYLYRLFRKSNLKPFERDISTEIYQASSTPCNGVEGFNCYFPLQSYGFQPTNGVGYQPYRVVVLSFELLHAPATVCGPKKSTNLVKNKCVNFNFNGLTGTGVLTESNKKFLPFQQFGRDIADTTDAVRDPQTLEILDITPCSFGGVSVITPGTNTSNQVAVLYQDVNCTEVPVAIHADQLTPTWRVYSTGSNVFQTRAGCLIGAEHVNNSYECDIPIGAGICASYQTQTNSPRRARSVASQSIIAYTMSLGAENSVAYSNNSIAIPTNFTISVTTEILPVSMTKTSVDCTMYICGDSTECSNLLLQYGSFCTQLNRALTGIAVEQDKNTQEVFAQVKQIYKTPPIKDFGGFNFSQILPDPSKPSKRSFIEDLLFNKVTLADAGFIKQYGDCLGDIAARDLICAQKFNGLTVLPPLLTDEMIAQYTSALLAGTITSGWTFGAGAALQIPFAMQMAYRFNGIGVTQCVLYENQKLIANQFNSAIGKIQDSLSSTASALGKLQDVVNQNAQALNTLVKQLSSNFGAISSVLNDILSRLDKVEAEVQIDRLITGRLQSLQTYVTQQLIRAAEIRASANLAATKMSECVLGQSKRVDFCGKGYHLMSFPQSAPHGVVFLHVTYVPAQEKNFTTAPAICHDGKAHFPREGVFVSNGTHWFVTQRNFYEPQIITTDNTFVCGNCDVVIGIVNNTVYDPLQPELDSFKEELDKYFKNHTSPDVDLGDISGINASVVNIQKEIDRLNEVAKNLNESLIDLQELGKYEQYIK

SEQ ID NO: 13418 - protein, 1211 aa, Artificial Sequence
  SARS-CoV-2/Iceland/192/2020__EPI_ISL_417819 spike protein (1-1211)(N914C_S1123C)
MFVFFVLLPLVSSQCVNLTTRTQLPPAYTNSFTRGVYYPDKVFRSSVLHSTQDLFLPFFSNVTWFHAIHVSGTNGTKRFDNPVLPFNDGVYFASTEKSNIIRGWIFGTTLDSKTQSLLIVNNATNVVIKVCEFQFCNDPFLGVYYHKNNKSWMESEFRVYSSANNCTFEYVSQPFLMDLEGKQGNFKNLREFVFKNIDGYFKIYSKHTPINLVRDLPQGFSALEPLVDLPIGINITRFQTLLALHRSYLTPGDSSSGWTAGAAAYYVGYLQPRTFLLKYNENGTITDAVDCALDPLSETKCTLKSFTVEKGIYQTSNFRVQPTESIVRFPNITNLCPFGEVFNATRFASVYAWNRKRISNCVADYSVLYNSASFSTFKCYGVSPTKLNDLCFTNVYADSFVIRGDEVRQIAPGQTGKIADYNYKLPDDFTGCVIAWNSNNLDSKVGGNYNYLYRLFRKSNLKPFERDISTEIYQAGSTPCNGVEGFNCYFPLQSYGFQPTNGVGYQPYRVVVLSFELLHAPATVCGPKKSTNLVKNKCVNFNFNGLTGTGVLTESNKKFLPFQQFGRDIADTTDAVRDPQTLEILDITPCSFGGVSVITPGTNTSNQVAVLYQGVNCTEVPVAIHADQLTPTWRVYSTGSNVFQTRAGCLIGAEHVNNSYECDIPIGAGICASYQTQTNSPRRARSVASQSIIAYTMSLGAENSVAYSNNSIAIPTNFTISVTTEILPVSMTKTSVDCTMYICGDSTECSNLLLQYGSFCTQLNRALTGIAVEQDKNTQEVFAQVKQIYKTPPIKDFGGFNFSQILPDPSKPSKRSFIEDLLFNKVTLADAGFIKQYGDCLGDIAARDLICAQKFNGLTVLPPLLTDEMIAQYTSALLAGTITSGWTFGAGAALQIPFAMQMAYRFNGIGVTQCVLYENQKLIANQFNSAIGKIQDSLSSTASALGKLQDVVNQNAQALNTLVKQLSSNFGAISSVLNDILSRLDKVEAEVQIDRLITGRLQSLQTYVTQQLIRAAEIRASANLAATKMSECVLGQSKRVDFCGKGYHLMSFPQSAPHGVVFLHVTYVPAQEKNFTTAPAICHDGKAHFPREGVFVSNGTHWFVTQRNFYEPQIITTDNTFVCGNCDVVIGIVNNTVYDPLQPELDSFKEELDKYFKNHTSPDVDLGDISGINASVVNIQKEIDRLNEVAKNLNESLIDLQELGKYEQYIK

SEQ ID NO: 13419 - protein, 1211 aa, Artificial Sequence
  SARS-CoV-2/Belgium/ULG-6939/2020__EPI_ISL_417020 spike protein (1-1211)(N914C_S1123C)
MFVFLVLLPLVSSQCVNLTTRTQLPPAYTNSFTRGVYYPDKVFRSSVLHSTQDLFLPFFSNVTWFHAIHVSGTNGTKRFDNPVLPFNDGVYFASTEKSNIIRGWIFGTTLDSKTQSLLIVNNATNVVIKVCEFQFCNDPFLGVYYHKNNKSWMESEFRVYSSANNCTFEYVSQPFLMDLEGKQGNFKNLREFVFKNIDGYFKIYSKHTPINLVRDLPQGFSALEPLVDLPIGINITRFQTLLALHRSYLTPGDSSSGWTAGAAAYYVGYLQPRTFLLKYNENGTITDAVDCALDPLSETKCTLKSFTVEKGIYQTSNFRVQPTESIVRFPNITNLCPFGEVFNATRFASVYAWNRKRISNCVADYSVLYNSASFSTFKCYGVSPTKLNDLCFTNVYADSFVIRGDEVRQIAPGQTGKIADYNYKLPDDFTGCVIAWNSNNLDSKVGGNYNYLYRLFRKSNLKPFERDISTEIYQAGSTPCNGVEGFNCYFPLQSYGFQPTNGVGYQPYRVVVLSFELLHAPATVCGPKKSTNLVKNKCVNFNFNGLTGTGVLTESNKKFLPFQQFGRDIADTTDAVRDPQTLEILDITPCSFGGVSVITPGTNTSNQVAVLYQGVNCTEVPVAIHADQLTPTWRVYSTGSNVFQTRAGCLIGAEHVNNSYECDIPIGAGICASYQTQTNSPRRARSVASQSIIAYTMSLGAENSVVYSNNSIAIPTNFTISVTTEILPVSMTKTSVDCTMYICGDSTECSNLLLQYGSFCTQLNRALTGIAVEQDKNTQEVFAQVKQIYKTPPIKDFGGFNFSQILPDPSKPSKRSFIEDLLFNKVTLADAGFIKQYGDCLGDIAARDLICAQKFNGLTVLPPLLTDEMIAQYTSALLAGTITSGWTFGAGAALQIPFAMQMAYRFNGIGVTQCVLYENQKLIANQFNSAIGKIQDSLSSTASALGKLQDVVNQNAQALNTLVKQLSSNFGAISSVLNDILSRLDKVEAEVQIDRLITGRLQSLQTYVTQQLIRAAEIRASANLAATKMSECVLGQSKRVDFCGKGYHLMSFPQSAPHGVVFLHVTYVPAQEKNFTTAPAICHDGKAHFPREGVFVSNGTHWFVTQRNFYEPQIITTDNTFVCGNCDVVIGIVNNTVYDPLQPELDSFKEELDKYFKNHTSPDVDLGDISGINASVVNIQKEIDRLNEVAKNLNESLIDLQELGKYEQYIK

SEQ ID NO: 13420 - protein, 1211 aa, Artificial Sequence
  SARS-CoV-2/France/HF2496/2020__EPI_ISL_418231 spike protein (1-1211)(N914C_S1123C)
MFVFLVLLPLVSSQCVNLTTRTQLPPAYTNSFTRGVYYPDKVFRSSVLHSTQDLFLPFFSNVTWFHAIHVSGTNGTKRFDNPVLPFNDGVYFASTEKSNIIRGWIFGTTLDSKTQSLLIVNNATNVVIKVCEFQFCNDPFLGVYYHKNNKSWMESEFRVYSSANNCTFEYVSQPFLMDLEGKQGNFKNLREFVFKNIDGYFKIYSKHTPINLVRDLPQGFSALEPLVDLPIGINITRFQTLLALHRSYLTPGDSSSGWTAGAAAYYVGYLQPRTFLLKYNENGTITDAVDCALDPLSETKCTLKSFTVEKGIYQTSNFRVQPTESIVRFPNITNLCPFGEVFNATRFASVYAWNRKRISNCVADYSVLYNSASFSTFKCYGVSPTKLNDLCFTNVYADSFVIRGDEVRQIAPGQTGKIADYNYKLPDDFTGCVIAWNSNNLDSKVGGNYNYLYRLFRKSNLKPFERDISTEIYQAGSTPCNGVEGFNCYFPLQSYGFQPTNGVGYQPYRVVVLSFELLHAPATVCGPKKSTNLVKNKCVNFNFNGLTGTGVLTESNKKFLPFQQFGRDIADTTDAVRDPQTLEILDITPCSFGGVSVITPGTNTSNQVAVLYQGVNCTEVPVAIHADQLTPTWRVYSTGSNVFQTRAGCLIGAEHVNNSYECDIPIGAGICASYQTQTNSPRRARSVASQSIIAYTMSLGAENSVAYSNNSIAIPTNFTISVTTEILPVSMTKTSVDCTMYICGDSTECSNLLLQYGSFCTQLNRALTGIAVEQDKNTQEVFAQVKQIYKTPPIKDFGGFNFSQILPDPSKPSKRSFIEDLLFNKVTLADAGFIKQYGDCLGDIVARDLICAQKFNGLTVLPPLLTDEMIAQYTSALLAGTITSGWTFGAGAALQIPFAMQMAYRFNGIGVTQCVLYENQKLIANQFNSAIGKIQDSLSSTASALGKLQDVVNQNAQALNTLVKQLSSNFGAISSVLNDILSRLDKVEAEVQIDRLITGRLQSLQTYVTQQLIRAAEIRASANLAATKMSECVLGQSKRVDFCGKGYHLMSFPQSAPHGVVFLHVTYVPAQEKNFTTAPAICHDGKAHFPREGVFVSNGTHWFVTQRNFYEPQIITTDNTFVCGNCDVVIGIVNNTVYDPLQPELDSFKEELDKYFKNHTSPDVDLGDISGINASVVNIQKEIDRLNEVAKNLNESLIDLQELGKYEQYIK

SEQ ID NO: 13421 - protein, 1211 aa, Artificial Sequence
  SARS-CoV-2/USA/WA-UW291/2020__EPI_ISL_418076 spike protein (1-1211)(N914C_S1123C)
MFVFLVLLPLVSSQCVNLTTRTQLPPAYTNSFTRGVYYPDKVFRSSVLHSTQDLFLPFFSNVTWFHAIHVSGTNGTKRFDNPVLPFNDGVYFASTEKSNIIRGWIFGTTLDSKTQSLLIVNNATNVVIKVCEFQFCNDPFLGVYYHKNNKSWMESEFRVYSSANNCTFEYVSQPFLMDLEGKQGNFKNLREFVFKNIDGYFKIYSKHTPINLVRDLPQGFSALEPLVDLPIGINITRFQTLLALHRSYLTPGDSSSGWTAGAAAYYVGYLQPRTFLLKYNENGTITDAVDCALDPLSETKCTLKSFTVEKGIYQTSNFRVQPTESIVRFPNITNLCPFGEVFNATRFASVYAWNRKRISNCVADYSVLYNSASFSTFKCYGVSPTKLNDLCFTNVYADSFVIRGDEVRQIAPGQTGKIADYNYKLPDDFTGCVIAWNSNNLDSKVGGNYNYLYRLFRKSNLKPFERDISTEIYQAGSTPCNGVEGFNCYFPLQSYGFQPTNGVGYQPYRVVVLSFELLHAPATVCGPKKSTNLVKNKCVNFNFNGLTGTGVLTESNKKFLPFQQFGRDIADTTDAVRDPQTLEILDITPCSFGGVSVITPGTNTSNQVAVLYQGVNCTEVPVAIHADQLTPTWRVYSTGSNVFQTRAGCLIGAEHVNNSYECDIPIGAGICASYQTQTNSPRRARSVASQSIIAYTMSLGAENSVAYSNNSIAIPTNFTISVTTEILPVSMTKTSVDCTMYICGDSTECSNLLLQYGSFCTQLNRALTGIAVEQDKNTQEVFAQVKQIYKTPPIKDFGGFNFSQILPDPSKPSKRSFIEDLLFNKVTLADAGFIKQYGDCLGDIAARDLICAQKFNGLTVLPPLLTDEMIAQYTSALLAGTITSGWTFGAGAALQIPFAMQMAYRFNGIGVTQCVLYENQKLIANQFNSAIGKIQYSLSSTASALGKLQDVVNQNAQALNTLVKQLSSNFGAISSVLNDILSRLDKVEAEVQIDRLITGRLQSLQTYVTQQLIRAAEIRASANLAATKMSECVLGQSKRVDFCGKGYHLMSFPQSAPHGVVFLHVTYVPAQEKNFTTAPAICHDGKAHFPREGVFVSNGTHWFVTQRNFYEPQIITTDNTFVCGNCDVVIGIVNNTVYDPLQPELDSFKEELDKYFKNHTSPDVDLGDISGINASVVNIQKEIDRLNEVAKNLNESLIDLQELGKYEQYIK

SEQ ID NO: 13422 - protein, 1211 aa, Artificial Sequence; identical to SEQ ID NO: 13385
  SARS-CoV-2/Portugal/PT0034/2020__EPI_ISL_418019 spike protein (1-1211)(N914C_S1123C)

SEQ ID NO: 13423 - protein, 1211 aa, Artificial Sequence
  SARS-CoV-2/Iceland/202/2020__EPI_ISL_417750 spike protein (1-1211)(N914C_S1123C)
MFVFLVLLPLVSSQCVNLTTRTQLPPAYTNSFTRGVYYPDKVFRSSVLHSTQDLFLPFFSNVTWFHAIHVSGTNGTKRFDNPVLPFNDGVYFASTEKSNIIRGWIFGTTLDSKTQSLLIVNNATNVVIKVCEFQFCNDPFLGVYYHKNNKSWMESEFRVYSSANNCTFEYVSQPFLMDLEGKQGNFKNLREFVFKNIDGYFKIYSKHTPINLVRDLPQGFSALEPLVDLPIGINITRFQTLLALHRSYLTPGDSSSGWTAGAAAYYVGYLQPRTFLLKYNENGTITDAVDCALDPLSETKCTLKSFTVEKGIYQTSNFRVQPTESIVRFPNITNLCPFGEVFNATRFASVYAWNRKRISNCVADYSVLYNSASFSTFKCYGVSPTKLNDLCFTNVYADSFVIRGDEVRQIAPGQTGKIADYNYKLPDDFTGCVIAWNSNNLDSKVGGNYNYLYRLFRKSNLKPFERDISTEIYQAGSTPCNGVEGFNCYFPLQSYGFQPTNGVGYQPYRVVVLSFELLHAPATVCGPKKSTNLVKNKCVNFNFNGLTGTGVLTESNKKFLPFQQFGRDIADTTDAVRDPQTLEILDITPCSFGGVSVITPGTNTSNQVAVLYQDVNCTEVPVAIHADQLTPTWRVYSTGSNVFQTRAGCLIGAEHVNNSYECDIPIGAGICASYQTQTNSPRRARSVASQSIIAYTMSLGAENSVAYSNNSIAIPTNFTISVTTEILPVSMTKTSVDCTMYICGDSTECSNLLLQYGSFCTQLNRALTGIAVEQDKNTQEVFAQVKQIYKTPPIKDFGGFNFSQILPDPSKPSKRSFIEDLLFNKVTLADAGFIKQYGDCLGDIAARDLICAQKFNGLTVLPPLLTDEMIAQYTSALLAGTITSGWTFGAGAALQIPFAMQMAYRFNGIGVTQCVLYENQKLIANQFNSAIGKIQDSLSSTASALGKLQDVVNQNAQALNTLVKQLSSNFGAISSVLNDILSRLDKVEAEVQIDRLITGRLQSLQTYVTQQLIRAAEIRASANLAATKMSECVLGQSKRVDFCGKGYHLMSFPQSAPHGVVFLHVTYVPAQEKNFTTAPAICHDGKAHFPREGVFVSNGTHWFVTQRNFYEPQIITTDNTFVCGNCDVVIGIVNNTVYDPLQPELDSFKEELDKYFKNHTSPDVDLGDIPGINASVVNIQKEIDRLNEVAKNLNESLIDLQELGKYEQYIK

SEQ ID NO: 13424 - protein, 1211 aa, Artificial Sequence
  SARS-CoV-2/USA/WA-UW261/2020__EPI_ISL_418046 spike protein (1-1211)(N914C_S1123C)
MFVFLVLLPLVSSQCVNLTTRTQLPPAYTNSFTRGVYYPDKVFRSSVLHSTQDLFLPFFSNVTWFHAIHVSGTNGTKRFDNPVLPFNDGVYFASTEKSNIIRGWIFGTTLDSKTQSLLIVNNATNVVIKVCEFQFCNDPFLGVYYHKNNKSWMESEFRVYSSANNCTFEYVSQPFLMDLEGKQGNFKNLREFVFKNIDGYFKIYSKHTPINLVRDLPQGFSALEPLVDLPIGINITRFQTLLALHRSYLTPGDSSSGWTAGAAAYYVGYLQPRTFLLKYNENGTITDAVDCALDPLSETKCTLKSFTVEKGIYQTSNFRVQPTESIVRFPNITNLCPFGEVFNATRFTSVYAWNRKRISNCVADYSVLYNSASFSTFKCYGVSPTKLNDLCFTNVYADSFVIRGDEVRQIAPGQTGKIADYNYKLPDDFTGCVIAWNSNNLDSKVGGNYNYLYRLFRKSNLKPFERDISTEIYQAGSTPCNGVEGFNCYFPLQSYGFQPTNGVGYQPYRVVVLSFELLHAPATVCGPKKSTNLVKNKCVNFNFNGLTGTGVLTESNKKFLPFQQFGRDIADTTDAVRDPQTLEILDITPCSFGGVSVITPGTNTSNQVAVLYQDVNCTEVPVAIHADQLTPTWRVYSTGSNVFQTRAGCLIGAEHVNNSYECDIPIGAGICASYQTQTNSPRRARSVASQSIIAYTMSLGAENSVAYSNNSIAIPTNFTISVTTEILPVSMTKTSVDCTMYICGDSTECSNLLLQYGSFCTQLNRALTGIAVEQDKNTQEVFAQVKQIYKTPPIKDFGGFNFSQILPDPSKPSKRSFIEDLLFNKVTLADAGFIKQYGDCLGDIAARDLICAQKFNGLTVLPPLLTDEMIAQYTSALLAGTITSGWTFGAGAALQIPFAMQMAYRFNGIGVTQCVLYENQKLIANQFNSAIGKIQDSLSSTASALGKLQDVVNQNAQALNTLVKQLSSNFGAISSVLNDILSRLDKVEAEVQIDRLITGRLQSLQTYVTQQLIRAAEIRASANLAATKMSECVLGQSKRVDFCGKGYHLMSFPQSAPHGVVFLHVTYVPAQEKNFTTAPAICHDGKAHFPREGVFVSNGTHWFVTQRNFYEPQIITTDNTFVCGNCDVVIGIVNNTVYDPLQPELDSFKEELDKYFKNHTSPDVDLGDISGINASVVNIQKEIDRLNEVAKNLNESLIDLQELGKYEQYIK

SEQ ID NO: 13425 - protein, 1211 aa, Artificial Sequence
  SARS-CoV-2/Portugal/PT0035/2020__EPI_ISL_418020 spike protein (1-1211)(N914C_S1123C)
MFVFLVLLPLVSSQCVNLTTRTQLPPAYTNSFTRGVYYPDKVFRSSVLHSTQDLFLPFFSNVTWFHAIHVSGTNGTKRFDNPVLPFNDGVYFASTEKSNIIRGWIFGTTLDSKTQSLLIVNNATNVVIKVCEFQFCNDPFLGVYYHKNNKSWMESEFRVYSSANNCTFEYVSQPFLMDLEGKQGNFKNLREFVFKNIDGYFKIYSKHTPINLVRDLPQGFSALEPLVDLPIGINITRFQTLLALHRSYLTPGDSSSGWTAGAAAYYVGYLQPRTFLLKYNENGTITDAVDCALDPLSETKCTLKSFTVEKGIYQTSNFRVQPTESIVRFPNITNLCPFGEVFNATRFASVYAWNRKRISNCVADYSVLYNSASFSTFKCYGVSPTKLNDLCFTNVYADSFVIRGDEVRQIAPGQTGKIADYNYKLPDDFTGCVIAWNSNNLDSKVGGNYNYLYRLFRKSNLKPFERDISTEIYQAGSTPCNGVEGFNCYFPLQSYGFQPTNGVGYQPYRVVVLSFELLHAPATVCGPKKSTNLVKNKCVNFNFNGLTGTGVLTESNKKFLPFQQFGRDIADTTDAVRDPQTLEILDITPCSFGGVSVITPGTNTSNQVAVLYQDVNCTEVPVAIHADQLTPTWRVYSTGSNVFQTRAGCLIGAEHVNNSYECDIPIGAGICASYQTQTNSPRRARSVASQSIIAYTMSLGAENSVAYSNNSIAIPTNFTISVTTEILPVSMTKTSVDCTMYICGDSTECSNLLLQYGSFCTQLNRALTGIAVEQDKNTQEVFAQVKQIYKTPPIKDFGGFNFSQILPDPSKPSKRSFIEDLLFNKVTLADAGFIKQYGDCLGDISARDLICAQKFNGLTVLPPLLTDEMIAQYTSALLAGTITSGWTFGAGAALQIPFAMQMAYRFNGIGVTQCVLYENQKLIANQFNSAIGKIQDSLSSTASALGKLQDVVNQNAQALNTLVKQLSSNFGAISSVLNDILSRLDKVEAEVQIDRLITGRLQSLQTYVTQQLIRAAEIRASANLAATKMSECVLGQSKRVDFCGKGYHLMSFPQSAPHGVVFLHVTYVPAQEKNFTTAPAICHDGKAHFPREGVFVSNGTHWFVTQRNFYEPQIITTDNTFVCGNCDVVIGIVNNTVYDPLQPELDSFKEELDKYFKNHTSPDVDLGDISGINASVVNIQKEIDRLNEVAKNLNESLIDLQELGKYEQYIK

SEQ ID NO: 13426 - protein, 1211 aa, Artificial Sequence
  SARS-CoV-2/USA/NY-NYUMC7/2020__EPI_ISL_418192 spike protein (1-1211)(N914C_S1123C)
MFVFLVLLPLVSSQCVNLTTRTQLPPAYTNSFTRGVYYPDKVFRSSVLHSTQDLFLPFFSNVTWFHAIHVSGTNGTKRFDNPVLPFNDGVYFASTEKSNIIRGWIFGTTLDSKTQSLLIVNNATNVVIKVCEFQFCNDPFLGVYHHKNNKSWMESEFRVYSSANNCTFEYVSQPFLMDLEGKQGNFKNLREFVFKNIDGYFKIYSKHTPINLVRDLPQGFSALEPLVDLPIGINITRFQTLLALHRSYLTPGDSSSGWTAGAAAYYVGYLQPRTFLLKYNENGTITDAVDCALDPLSETKCTLKSFTVEKGIYQTSNFRVQPTESIVRFPNITNLCPFGEVFNATRFASVYAWNRKRISNCVADYSVLYNSASFSTFKCYGVSPTKLNDLCFTNVYADSFVIRGDEVRQIAPGQTGKIADYNYKLPDDFTGCVIAWNSNNLDSKVGGNYNYLYRLFRKSNLKPFERDISTEIYQAGSTPCNGVEGFNCYFPLQSYGFQPTNGVGYQPYRVVVLSFELLHAPATVCGPKKSTNLVKNKCVNFNFNGLTGTGVLTESNKKFLPFQQFGRDIADTTDAVRDPQTLEILDITPCSFGGVSVITPGTNTSNQVAVLYQGVNCTEVPVAIHADQLTPTWRVYSTGSNVFQTRAGCLIGAEHVNNSYECDIPIGAGICASYQTQTNSPRRARSVASQSIIAYTMSLGAENSVAYSNNSIAIPTNFTISVTTEILPVSMTKTSVDCTMYICGDSTECSNLLLQYGSFCTQLNRALTGIAVEQDKNTQEVFAQVKQIYKTPPIKDFGGFNFSQILPDPSKPSKRSFIEDLLFNKVTLADAGFIKQYGDCLGDIAARDLICAQKFNGLTVLPPLLTDEMIAQYTSALLAGTITSGWTFGAGAALQIPFAMQMAYRFNGIGVTQCVLYENQKLIANQFNSAIGKIQDSLSSTASALGKLQDVVNQNAQALNTLVKQLSSNFGAISSVLNDILSRLDKVEAEVQIDRLITGRLQSLQTYVTQQLIRAAEIRASANLAATKMSECVLGQSKRVDFCGKGYHLMSFPQSAPHGVVFLHVTYVPAQEKNFTTAPAICHDGKAHFPREGVFVSNGTHWFVTQRNFYEPQIITTDNTFVCGNCDVVIGIVNNTVYDPLQPELDSFKEELDKYFKNHTSPDVDLGDISGINASVVNIQKEIDRLNEVAKNLNESLIDLQELGKYEQYIK

SEQ ID NO: 13427 - protein, 1211 aa, Artificial Sequence
  SARS-CoV-2/Iceland/189/2020__EPI_ISL_417709 spike protein (1-1211)(N914C_S1123C)
MFVFLVLLPLVSSQCVNLTTRTQLPPAYTNSFTRGVYYPDKVFRSSVLHSTQDLFLPFFSNVTWFHAIHVSGTNGTKRFDNPVLPFNDGVYFASTEKSNIIRGWIFGTTLDSKTQSLLIVNNATNVVIKVCEFQFCNDPFLGVYYHKNNKSWMESEFRVYSSANNCTFEYVSQPFLMDLEGKQGNFKNLREFVFKNIDGYFKIYSKHTPINLVRDLPQGFSALEPLVDLPIGINITRFQTLLALHRSYLTPGDSSSGWTAGAAAYYVGYLQPRTFLLKYNENGTITDAVDCALDPLSETKCTLKSFTVEKGIYQTSNFRVQPTESIVRFPNITNLCPFGEVFNATRFASVYAWNRKRISNCVADYSVLYNSASFSTFKCYGVSPTKLNDLCFTNVYADSFVIRGDEVRQIAPGQTGKIADYNYKLPDDFTGCVIAWNSNNLDSKVGGNYNYLYRLFRKSNLKPFERDISTEIYQAGSTPCNGVEGFNCYFPLQSYGFQPTNGVGYQPYRVVVLSFELLHAPATVCGPKKSTNLVKNKCVNFNFNGLTGTGVLTESNKKFLPFQQFGRDIADTTDAVRDPQTLEILDITPCSFGGVSVITPGTNTSNQVAVLYQGVNCTEVPVAIHADQLTPTWRVYSTGSNVFQTRAGCLIGAEHVNNSYECDIPIGAGICASYQTQTNSPRRARSVASQSIIAYTMSLGAENSVAYSNNSIAIPTNFTISVTTEILPVSMTKTSVDCTMYICGDSTECSNLLLQYGSFCTQLNRALTGIAVEQDKNTQEVFAQVKQIYKTPPIKDFGGFNFSQILPDPSKPSKRSFIEDLLFNKVTLADAGFTKQYGDCLGDIAARDLICAQKFNGLTVLPPLLTDEMIAQYTSALLAGTITSGWTFGAGAALQIPFAMQMAYRFNGIGVTQCVLYENQKLIANQFNSAIGKIQDSLSSTASALGKLQDVVNQNAQALNTLVKQLSSNFGAISSVLNDILSRLDKVEAEVQIDRLITGRLQSLQTYVTQQLIRAAEIRASANLAATKMSECVLGQSKRVDFCGKGYHLMSFPQSAPHGVVFLHVTYVPAQEKNFTTAPAICHDGKAHFPREGVFVSNGTHWFVTQRNFYEPQIITTDNTFVCGNCDVVIGIVNNTVYDPLQPELDSFKEELDKYFKNHTSPDVDLGDISGINASVVNIQKEIDRLNEVAKNLNESLIDLQELGKYEQYIK

SEQ ID NO: 13428 - protein, 1211 aa, Artificial Sequence
  SARS-CoV-2/Australia/NSW56/2020__EPI_ISL_417408 spike protein (1-1211)(N914C_S1123C)
MFVFLVLLPLVSSQCVNLTTRTQLPPAYTNSFTRGVYYPDKVFRSSVLHSTQDLFLPFFSNVTWFHAIHVSGTNGTKRFDNPVLPFNDGVYFASTEKSNIIRGWIFGTTLDSKTQSLLIVNNATNVVIKVCEFQFCNDPFLGVYYHKNNKSWMESEFRVYSSANNCTFEYVSQPFLMDLEGKQGNFKNLREFVFKNIDGYFKIYSKHTPINLVRDLPQGFSALEPLVDLPIGINITRFQTLLALHRSYLTPGDSSSGWTAGAAAYYVGYLQPRTFLLKYNENGTITDAVDCALDPLSETKCTLKSFTVEKGIYQTSNFRVQPTESIVRFPNITNLCPFGEVFNATRFASVYAWNRKRISNCVADYSVLYNSASFSTFKCYGVSPTKLNDLCFTNVYADSFVIRGDEVRQIAPGQTGKIADYNYKLPDDFTGCVIAWNSNNLDSKVGGNYNYLYRLFRKSNLKPFERDISTEIYQAGSTPCNGVEGFNCYFPLQSYGFQPTNGVGYQPYRVVVLSFELLHAPATVCGPKKSTNLVKNKCVNFNFNGLTGTGVLTESNKKFLPFQQFGRDIADTTDAVRDPQTLEILDITPCSFGGVSVITPGTNTSNQVAVLYQDVNCTEVPVAIHADQLTPTWRVYSTGSNVFQTRAGCLIGAEHVNNSYECDIPIGAGICASYQTQTNSPRRARSVASQSIIAYTMSLGAENSVAYSNNSIAIPTNFTISVTTEILPVSMTKTSVDCTMYICGDSTECSNLLLQYGSFCTQLNRALTGIAVEQDKNTQEVFAQVKQIYKTPPIKDFGGFNFSQILPDSSKPSKRSFIEDLLFNKVTLADAGFIKQYGDCLGDIAARDLICAQKFNGLTVLPPLLTDEMIAQYTSALLAGTITSGWTFGAGAALQIPFAMQMAYRFNGIGVTQCVLYENQKLIANQFNSAIGKIQDSLSSTASALGKLQDVVNQNAQALNTLVKQLSSNFGAISSVLNDILSRLDKVEAEVQIDRLITGRLQSLQTYVTQQLIRAAEIRASANLAATKMSECVLGQSKRVDFCGKGYHLMSFPQSAPHGVVFLHVTYVPAQEKNFTTAPAICHDGKAHFPREGVFVSNGTHWFVTQRNFYEPQIITTDNTFVCGNCDVVIGIVNNTVYDPLQPELDSFKEELDKYFKNHTSPDVDLGDISGINASVVNIQKEIDRLNEVAKNLNESLIDLQELGKYEQYIK

SEQ ID NO: 13429 - protein, 1211 aa, Artificial Sequence
  SARS-CoV-2/Iceland/280/2020__EPI_ISL_417608 spike protein (1-1211)(N914C_S1123C)
MFVFLVLLPLVSSQCVNLTTRTQLPPAYTNSFTRGVYYPDKVFRSSVLHSTQDLFLPFFSNVTWFHAIHVSGTNGTKRFDNPVLPFNDGVYFASTEKSNIIRGWIFGTTLDSKTQSLLIVNNATNVVIKVCEFQFCNDPFLGVYYHKNNKSWMESEFRVYSSANNCTFEYVSQPFLMDLEGKQGNFKNLREFVFKNIDGYFKIYSKHTPINLVRDLPQGFSALEPLVDLPIGINITRFQTLLALHRSYLTPGDSSSGWTAGAAAYYVGYLQPRTFLLKYNENGTITDAVDCALDPLSETKCTLKSFTVEKGIYQTSNFRVQPTESIVRFPNITNLCPFGEVFNATRFASVYAWNRKRISNCVADYSVLYNSASFSTFKCYGVSPTKLNDLCFTNVYADSFVIRGDEVRQIAPGQTGKIADYNYKLPDDFTGCVIAWNSNNLDSKVGGNYNYLYRLFRKSNLKPFERDISTEIYQAGSTPCNGVEGFNCYFPLQSYGFQPTNGVGYQPYRVVVLSFELLHAPATVCGPKKSTNLVKNKCVNFNFNGLTGTGVLTESNKKFLPFQQFGRDIADTTDAVRDPQTLEILDITPCSFGGVSVITPGTNTSNQVAVLYQGVNCTEVPVAIHADQLTPTWRVYSTGSNVFQTRAGCLIGAEHVNNSYECDIPIGAGICASYHTQTNSPRRARSVASQSIIAYTMSLGAENSVAYSNNSIAIPTNFTISVTTEILPVSMTKTSVDCTMYICGDSTECSNLLLQYGSFCTQLNRALTGIAVEQDKNTQEVFAQVKQIYKTPPIKDFGGFNFSQILPDPSKPSKRSFIEDLLFNKVTLADAGFIKQYGDCLGDIAARDLICAQKFNGLTVLPPLLTDEMIAQYTSALLAGTITSGWTFGAGAALQIPFAMQMAYRFNGIGVTQCVLYENQKLIANQFNSAIGKIQDSLSSTASALGKLQDVVNQNAQALNTLVKQLSSNFGAISSVLNDILSRLDKVEAEVQIDRLITGRLQSLQTYVTQQLIRAAEIRASANLAATKMSECVLGQSKRVDFCGKGYHLMSFPQSAPHGVVFLHVTYVPAQEKNFTTAPAICHDGKAHFPREGVFVSNGTHWFVTQRNFYEPQIITTDNTFVCGNCDVVIGIVNNTVYDPLQPELDSFKEELDKYFKNHTSPDVDLGDISGINASVVNIQKEIDRLNEVAKNLNESLIDLQELGKYEQYIK

SEQ ID NO: 13430 - protein, 1211 aa, Artificial Sequence; identical to SEQ ID NO: 13385
  SARS-CoV-2/Iceland/247/2020__EPI_ISL_417575 spike protein (1-1211)(N914C_S1123C)

SEQ ID NO: 13431 - protein, 1211 aa, Artificial Sequence
  SARS-CoV-2/Iceland/238/2020__EPI_ISL_417566 spike protein (1-1211)(N914C_S1123C)
MFVFLVLLPLVSSQCVNLTTRTQLPPAYTNSFTRGVYYPDKVFRSSVLHSTQDLFLPFFSNVTWFHAIHVSGTNGTKRFDNPVLPFNDGVYFASTEKSNIIRGWIFGTTLDSKTQSLLIVNNATNVVIKVCEFQFCNDPFLGVYYHKNNKSWMESEFRVYSSANNCTFEYVSQPFLMDLEGKQGNFKNLREFVFKNIDGYFKIYSKHTPINLVRDLPQGFSALEPLVDLPIGINITRFQTLLALHRSYLTPGDSSSGWTAGAAAYYVGYLQPRTFLLKYNENGTITDAVDCALDPLSETKCTLKSFTVEKGIYQTSNFRVQPTESIVRFPNITNLCPFGEVFNATRFASVYAWNRKRISNCVADYSVLYNSASFSTFKCYGVSPTKLNDLCFTNVYADSFVIRGDEVRQIAPGQTGKIADYNYKLPDDFTGCVIAWNSNNLDSKVGGNYNYLYRLFRKSNLKPFERDISTEIYQAGSTPCNGVEGFNCYFPLQSYGFQPTNGVGYQPYRVVVLSFELLHAPATVCGPKKSTNLVKNKCVNFNFNGLTGTGVLTESNKKFLPFQQFGRDIADTTDAVRDPQTLEILDITPCSFGGVSVITPGTNTSNQVAVLYQGVNCTEVPVAIHADQLTPTWRVYSTGSNVFQTRAGCLIGAEHVNNSYECDIPIGAGICASYQTQTNSPRRARSVASQSIIAYTMSLGAENSVAYSNNSIAIPTNFTISVTTEILPVSMTKTSVDCTMYICGDSTECSNLLLQYGSFCTQLNRALTGIAVEQDKNTQEVFAQVKQIYKTPPIKDFGGFNFSQILPDPSKPSKRSFIEDLLFNKVTLADVGFIKQYGDCLGDIAARDLICAQKFNGLTVLPPLLTDEMIAQYTSALLAGTITSGWTFGAGAALQIPFAMQMAYRFNGIGVTQCVLYENQKLIANQFNSAIGKIQDSLSSTASALGKLQDVVNQNAQALNTLVKQLSSNFGAISSVLNDILSRLDKVEAEVQIDRLITGRLQSLQTYVTQQLIRAAEIRASANLAATKMSECVLGQSKRVDFCGKGYHLMSFPQSAPHGVVFLHVTYVPAQEKNFTTAPAICHDGKAHFPREGVFVSNGTHWFVTQRNFYEPQIITTDNTFVCGNCDVVIGIVNNTVYDPLQPELDSFKEELDKYFKNHTSPDVDLGDISGINASVVNIQKEIDRLNEVAKNLNESLIDLQELGKYEQYIK

SEQ ID NO: 13432 - protein, 1211 aa, Artificial Sequence
  SARS-CoV-2/Greece/16/2020__EPI_ISL_418265 spike protein (1-1211)(N914C_S1123C)
MFVFLVLLPLVSSQCVNLTTRTQLPPAYTNSFTRGVYYPDKVFRSSVLHSTQDLFLPFFSNVTWFHAIHVSGTNGTKRFDNPVLPFNDGVYFASTEKSNIIRGWIFGTTLDSKTQSLLIVNNATNVVIKVCEFQFCNDPFLGVYYHKNNKSWMESEFRVYSSANNCTFEYVSQPFLMDLEGKQGNFKNLREFVFKNVDGYFKIYSKHTPINLVRDLPQGFSALEPLVDLPIGINITRFQTLLALHRSYLTPGDSSSGWTAGAAAYYVGYLQPRTFLLKYNENGTITDAVDCALDPLSETKCTLKSFTVEKGIYQTSNFRVQPTESIVRFPNITNLCPFGEVFNATRFASVYAWNRKRISNCVADYSVLYNSASFSTFKCYGVSPTKLNDLCFTNVYADSFVIRGDEVRQIAPGQTGKIADYNYKLPDDFTGCVIAWNSNNLDSKVGGNYNYLYRLFRKSNLKPFERDISTEIYQAGSTPCNGVEGFNCYFPLQSYGFQPTNGVGYQPYRVVVLSFELLHAPATVCGPKKSTNLVKNKCVNFNFNGLTGTGVLTESNKKFLPFQQFGRDIADTTDAVRDPQTLEILDITPCSFGGVSVITPGTNTSNQVAVLYQDVNCTEVPVAIHADQLTPTWRVYSTGSNVFQTRAGCLIGAEHVNNSYECDIPIGAGICASYQTQTNSPRRARSVASQSIIAYTMSLGAENSVAYSNNSIAIPTNFTISVTTEILPVSMTKTSVDCTMYICGDSTECSNLLLQYGSFCTQLNRALTGIAVEQDKNTQEVFAQVKQIYKTPPIKDFGGFNFSQILPDPSKPSKRSFIEDLLFNKVTLADAGFIKQYGDCLGDIAARDLICAQKFNGLTVLPPLLTDEMIAQYTSALLAGTITSGWTFGAGAALQIPFAMQMAYRFNGIGVTQCVLYENQKLIANQFNSAIGKIQDSLSSTASALGKLQDVVNQNAQALNTLVKQLSSNFGAISSVLNDILSRLDKVEAEVQIDRLITGRLQSLQTYVTQQLIRAAEIRASANLAATKMSECVLGQSKRVDFCGKGYHLMSFPQSAPHGVVFLHVTYVPAQEKNFTTAPAICHDGKAHFPREGVFVSNGTHWFVTQRNFYEPQIITTDNTFVCGNCDVVIGIVNNTVYDPLQPELDSFKEELDKYFKNHTSPDVDLGDISGINASVVNIQKEIDRLNEVAKNLNESLIDLQELGKYEQYIK

SEQ ID NO: 13433 - protein, 1211 aa, Artificial Sequence
  SARS-CoV-2/Iceland/319/2020__EPI_ISL_417648 spike protein (1-1211)(N914C_S1123C)
MFVFLVLLPLVSSQCVNLTTRTQLPPAYTNSFTRGVYYPDKVFRSSVLHSTQDLFLPFFSNVTWFHAIHVSGTNGTKRFDNPVLPFNDGVYFASTEKSNIIRGWIFGTTLDSKTQSLLIVNNATNVVIKVCEFQFCNDPFLGVYYHKNNKSWMESEFRVYSSANNCTFEYVSQPFLIDLEGKQGNFKNLREFVFKNIDGYFKIYSKHTPINLVRDLPQGFSALEPLVDLPIGINITRFQTLLALHRSYLTPGDSSSGWTAGAAAYYVGYLQPRTFLLKYNENGTITDAVDCALDPLSETKCTLKSFTVEKGIYQTSNFRVQPTESIVRFPNITNLCPFGEVFNATRFASVYAWNRKRISNCVADYSVLYNSASFSTFKCYGVSPTKLNDLCFTNVYADSFVIRGDEVRQIAPGQTGKIADYNYKLPDDFTGCVIAWNSNNLDSKVGGNYNYLYRLFRKSNLKPFERDISTEIYQAGSTPCNGVEGFNCYFPLQSYGFQPTNGVGYQPYRVVVLSFELLHAPATVCGPKKSTNLVKNKCVNFNFNGLTGTGVLTESNKKFLPFQQFGRDIADTTDAVRDPQTLEILDITPCSFGGVSVITPGTNTSNQVAVLYQGVNCTEVPVAIHADQLTPTWRVYSTGSNVFQTRAGCLIGAEHVNNSYECDIPIGAGICASYQTQTNSPRRARSVASQSIIAYTMSLGAENSVAYSNNSIAIPTNFTISVTTEILPVSMTKTSVDCTMYICGDSTECSNLLLQYGSFCTQLNRALTGIAVEQDKNTQEVFAQVKQIYKTPPIKDFGGFNFSQILPDPSKPSKRSFIEDLLFNKVTLADAGFIKQYGDCLGDIAARDLICAQKFNGLTVLPPLLTDEMIAQYTSALLAGTITSGWTFGAGAALQIPFAMQMAYRFNGIGVTQCVLYENQKLIANQFNSAIGKIQDSLSSTASALGKLQDVVNQNAQALNTLVKQLSSNFGAISSVLNDILSRLDKVEAEVQIDRLITGRLQSLQTYVTQQLIRAAEIRASANLAATKMSECVLGQSKRVDFCGKGYHLMSFPQSAPHGVVFLHVTYVPAQEKNFTTAPAICHDGKAHFPREGVFVSNGTHWFVTQRNFYEPQIITTDNTFVCGNCDVVIGIVNNTVYDPLQPELDSFKEELDKYFKNHTSPDVDLGDISGINASVVNIQKEIDRLNEVAKNLNESLIDLQELGKYEQYIK

SEQ ID NO: 13434 - protein, 1211 aa, Artificial Sequence
  SARS-CoV-2/Congo/94/2020__EPI_ISL_417947 spike protein (1-1211)(N914C_S1123C)
MFVFLVLLPLVSSQCVNLTTRTQLPPAYTNSFTRGVYYPDKVFRSSVLHSTQDLFLPFFSNVTWFHAIHVSGTNGTKRFDNPVLPFNDGVYFASTEKSNIIRGWIFGTTLDSKTQSLLIVNNATNVVIKVCEFQFCNDPFLGVYYHKNNKSWMESEFRVYSSANNCTFEYVSQPFLMDLEGKQGNFKNLREFVFKNIDGYFKIYSKHTPINLVRDLPQGFSALEPLVDLPIGINITRFQTLLALHRSYLTPGDSSSGWTAGAAAYYVGYLQPRTFLLKYNENGTITDAVDCALDPLSETKCTLKSFTVEKGIYQTSNFRVQPTESIVRFPNITNLCPFGEVFNATRFASVYAWNRKRISNCVADYSVLYNSASFSTFKCYGVSPTKLNDLCFTNVYADSFVIRGDEVRQIAPGQTGKIADYNYKLPDDFTGCVIAWNSNNLDSKVGGNYNYLYRLFRKSNLKPFERDISTEIYQAGSTPCNGVEGFNCYFPLQSYGFQPTNGVGYQPYRVVVLSFELLHAPATVCGPKKSTNLVKNKCVNFNFNGLTGTGVLTESNKKFLPFQQFGRDIADTTDAVRDPQTLEILDITPCSFGGVSVITPGTNTSNQVAVLYQGVNCTEVPVAIHADQLTPTWRVYSTGSNVFQTRAGCLIGAEHVNNSYECDIPIGAGICASYQTQTNSPRRARSVASQSIIAYTMSLGAENSVAYSNNSIAIPTNFTISVTTEILPVSMTKTSVDCTMYICGDSTECSNLLLQYGSFCTQLNRALTGIAVEQDKNTQEVFAQVKQIYKTPPIKDFGGFNFSQILPDPSKPSKRSFIEDILFNKVTLADAGFIKQYGDCLGDIAARDLICAQKFNGLTVLPPLLTDEMIAQYTSALLAGTITSGWTFGAGAALQIPFAMQMAYRFNGIGVTQCVLYENQKLIANQFNSAIGKIQDSLSSTASALGKLQDVVNQNAQALNTLVKQLSSNFGAISSVLNDILSRLDKVEAEVQIDRLITGRLQSLQTYVTQQLIRAAEIRASANLAATKMSECVLGQSKRVDFCGKGYHLMSFPQSAPHGVVFLHVTYVPAQEKNFTTAPAICHDGKAHFPREGVFVSNGTHWFVTQRNFYEPQIITTDNTFVCGNCDVVIGIVNNTVYDPLQPELDSFKEELDKYFKNHTSPDVDLGDISGINASVVNIQKEIDRLNEVAKNLNESLIDLQELGKYEQYIK

SEQ ID NO: 13435 - protein, 1211 aa, Artificial Sequence
  SARS-CoV-2/Congo/158/2020__EPI_ISL_417950 spike protein (1-1211)(N914C_S1123C)
MFVFLVLLPLVSSQCVNLTTRTQLPPAYTNSFTRGVYYPDKVFRSSVLHSTQDLFLPFFSNVTWFHAIHVSGTNGTKRFDNPVLPFNDGVYFASTEKSNIIRGWIFGTTLDSKTQSLLIVNNATNVVIKVCEFQFCNDPFLGVYYHKNNKSWMESEFRVYSSANNCTFEYVSQPFLMDLEGKQGNFKNLREFVFKNIDGYFKIYSKHTPINLVRDLPQGFSALEPLVDLPIGINITRFQTLLALHRSYLTPGDSSSGWTAGAAAYYVGYLQPRTFLLKYNENGTITDAVDCALDPLSETKCTLKSFTVEKGIYQTSNFRVQPTESIVRFPNITNLCPFGEVFNATRFASVYAWNRKRISNCVADYSVLYNSASFSTFKCYGVSPTKLNDLCFTNVYADSFVIRGDEVRQIAPGQTGKIADYNYKLPDDFTGCVIAWNSNNLDSKVGGNYNYLYRLFRKSNLKPFERDISTEIYQAGSTPCNGVEGFNCYFPLQSYGFQPTNGVGYQPYRVVVLSFELLHAPATVCGPKKSTNLVKNKCVNFNFNGLTGTGVLTESNKKFLPFQQFGRDIADTTDAVRDPQTLEILDITPCSFGGVSVITPGTNTSNQVAVLYQDVNCTEVPVAIHADQLTPTWRVYSTGSNVFQTRAGCLIGAEHVNNSYECDIPIGAGICASYQTQTNSPRRARSVASQSIIAYTMSLGAENSVAYSNNSIAIPTNFTISVTTEILPVSMTKTSVDCTMYICGDSTECSNLLLQYGSFCTQLNRALTGIAVEQDKNTQEVFAQVKQIYKTPPIKDFGGFNFSQILPDPSKPSKRSFIEDLLFNKVTLADAGFIKQYGDCLGDIAARDLICAQKFNGLTVLPPLLTDEMIAQYTSALLAGTITSGWTFGAGAALQIPFAMQMAYRFNGIGVTQCVLYENQKLIANQFNSAIGKIQDSLSSTASALGKLQDVVNQNAQALNTLVKQLSSNFGAISSVLNDILSRLDKVEAEVQIDRLITGRLQSLQTYVTQQLIRAAEIRASANLAATKMSECVLGQSKRVDFCGKGYHLMSFPQSAPHGVVFLHVTYVPAQEKNFTTAPAICHDGKAHFPREGVFVSNGTHWFVTQRNFYEPQIITTDNTFLCGNCDVVIGIVNNTVYDPLQPELDSFKEELDKYFKNHTSPDVDLGDISGINASVVNIQKEIDRLNEVAKNLNESLIDLQELGKYEQYIK

SEQ ID NO: 13436 - protein, 1211 aa, Artificial Sequence
  SARS-CoV-2/USA/UT-00034/2020__EPI_ISL_417977 spike protein (1-1211)(N914C_S1123C)
MFVFLVLLPLVSSQCVNLTTRTQLPPAYTNSFTRGVYYPDKVFRSSVLHSTQDLFLPFFSNVTWFHAIHVSGTNGTKRFDNPVLPFNDGVYFASTEKSNIIRGWIFGTTLDSKTQSLLIVNNATNVVIKVCEFQFCNDPFLGVYYYKNNKSWMESEFRVYSSANNCTFEYVSQPFLMDLEGKQGNFKNLREFVFKNIDGYFKIYSKHTPINLVRDLPQGFSALEPLVDLPIGINITRFQTLLALHRSYLTPGDSSSGWTAGAAAYYVGYLQPRTFLLKYNENGTITDAVDCALDPLSETKCTLKSFTVEKGIYQTSNFRVQPTESIVRFPNITNLCPFGEVFNATRFASVYAWNRKRISNCVADYSVLYNSASFSTFKCYGVSPTKLNDLCFTNVYADSFVIRGDEVRQIAPGQTGKIADYNYKLPDDFTGCVIAWNSNNLDSKVGGNYNYLYRLFRKSNLKPFERDISTEIYQAGSTPCNGVEGFNCYFPLQSYGFQPTNGVGYQPYRVVVLSFELLHAPATVCGPKKSTNLVKNKCVNFNFNGLTGTGVLTESNKKFLPFQQFGRDIADTTDAVRDPQTLEILDITPCSFGGVSVITPGTNTSNQVAVLYQGVNCTEVPVAIHADQLTPTWRVYSTGSNVFQTRAGCLIGAEHVNNSYECDIPIGAGICASYQTQTNSPRRARSVASQSIIAYTMSLGAENSVAYSNNSIAIPTNFTISVTTEILPVSMTKTSVDCTMYICGDSTECSNLLLQYGSFCTQLNRALTGIAVEQDKNTQEVFAQVKQIYKTPPIKDFGGFNFSQILPDPSKPSKRSFIEDLLFNKVTLADAGFIKQYGDCLGDIAARDLICAQKFNGLTVLPPLLTDEMIAQYTSALLAGTITSGWTFGAGAALQIPFAMQMAYRFNGIGVTQCVLYENQKLIANQFNSAIGKIQDSLSSTASALGKLQDVVNQNAQALNTLVKQLSSNFGAISSVLNDILSRLDKVEAEVQIDRLITGRLQSLQTYVTQQLIRAAEIRASANLAATKMSECVLGQSKRVDFCGKGYHLMSFPQSAPHGVVFLHVTYVPAQEKNFTTAPAICHDGKAHFPREGVFVSNGTHWFVTQRNFYEPQIITTDNTFVCGNCDVVIGIVNNTVYDPLQPELDSFKEELDKYFKNHTSPDVDLGDISGINASVVNIQKEIDRLNEVAKNLNESLIDLQELGKYEQYIK

SEQ ID NO: 13437 - protein, 1211 aa, Artificial Sequence
  SARS-CoV-2/USA/UT-00033/2020__EPI_ISL_417976 spike protein (1-1211)(N914C_S1123C)
MFVFLVLLPLVSSQCVNLTTRTQLPPAYTNSFTRGVYYPDKVFRSSVLHSTQDLFLPFFSNVTWFHAIHVSGTNGTKRFDNPVLPFNDGVYFASTEKSNIIRGWIFGTTLDSKTQSLLIVNNATNVVIKVCEFQFCNDPFLGVYYHKNNKSWMESEFRVYSSANNCTFEYVSQPFLMDLEGKQGNFKNLREFVFKNIDGYFKIYSKHTPINLVRDLPQGFSALEPLVDLPIGINITRFQTLLALHRSYLTPGDSSSGLTAGAAAYYVGYLQPRTFLLKYNENGTITDAVDCALDPLSETKCTLKSFTVEKGIYQTSNFRVQPTESIVRFPNITNLCPFGEVFNATRFASVYAWNRKRISNCVADYSVLYNSASFSTFKCYGVSPTKLNDLCFTNVYADSFVIRGDEVRQIAPGQTGKIADYNYKLPDDFTGCVIAWNSNNLDSKVGGNYNYLYRLFRKSNLKPFERDISTEIYQAGSTPCNGVEGFNCYFPLQSYGFQPTNGVGYQPYRVVVLSFELLHAPATVCGPKKSTNLVKNKCVNFNFNGLTGTGVLTESNKKFLPFQQFGRDIADTTDAVRDPQTLEILDITPCSFGGVSVITPGTNTSNQVAVLYQGVNCTEVPVAIHADQLTPTWRVYSTGSNVFQTRAGCLIGAEHVNNSYECDIPIGAGICASYQTQTNSPRRARSVASQSIIAYTMSLGAENSVAYSNNSIAIPTNFTISVTTEILPVSMTKTSVDCTMYICGDSTECSNLLLQYGSFCTQLNRALTGIAVEQDKNTQEVFAQVKQIYKTPPIKDFGGFNFSQILPDPSKPSKRSFIEDLLFNKVTLADAGFIKQYGDCLGDIAARDLICAQKFNGLTVLPPLLTDEMIAQYTSALLAGTITSGWTFGAGAALQIPFAMQMAYRFNGIGVTQCVLYENQKLIANQFNSAIGKIQDSLSSTASALGKLQDVVNQNAQALNTLVKQLSSNFGAISSVLNDILSRLDKVEAEVQIDRLITGRLQSLQTYVTQQLIRAAEIRASANLAATKMSECVLGQSKRVDFCGKGYHLMSFPQSAPHGVVFLHVTYVPAQEKNFTTAPAICHDGKAHFPREGVFVSNGTHWFVTQRNFYEPQIITTDNTFVCGNCDVVIGIVNNTVYDPLQPELDSFKEELDKYFKNHTSPDVDLGDISGINASVVNIQKEIDRLNEVAKNLNESLIDLQELGKYEQYIK

SEQ ID NO: 13438 - protein, 1211 aa, Artificial Sequence
  SARS-CoV-2/USA/WI-13/2020__EPI_ISL_417516 spike protein (1-1211)(N914C_S1123C)
MFVFLVLLPLVSSQCVNLTTRTQLPPAYTNSFTRGVYYPDKVFRSSVLHSTQDLFLPFFSNVTWFHAIHVSGTNGTKRFDNPVLPFNDGVYFASTEKSNIIRGWIFGTTLDSKTQSLLIVNNATNVVIKVCEFQFCNDPFLGVYYHKNNKSWMESEFRVYSSANNCTFEYVSQPFLMDLEGKQGNFKNLREFVFKNIDGYFKIYSKHTPINLVRDLPQGFSALEPLVDLPIGINITRFQTLLALHRSYLTPGDSSSGWTAGAAAYYVGYLQPRTFLLKYNENGTITDAVDCALDPLSETKCTLKSFTVEKGIYQTSNFRVLPTESIVRFPNITNLCPFGEVFNATRFASVYAWNRKRISNCVADYSVLYNSASFSTFKCYGVSPTKLNDLCFTNVYADSFVIRGDEVRQIAPGQTGKIADYNYKLPDDFTGCVIAWNSNNLDSKVGGNYNYLYRLFRKSNLKPFERDISTEIYQAGSTPCNGVEGFNCYFPLQSYGFQPTNGVGYQPYRVVVLSFELLHAPATVCGPKKSTNLVKNKCVNFNFNGLTGTGVLTESNKKFLPFQQFGRDIADTTDAVRDPQTLEILDITPCSFGGVSVITPGTNTSNQVAVLYQGVNCTEVPVAIHADQLTPTWRVYSTGSNVFQTRAGCLIGAEHVNNSYECDIPIGAGICASYQTQTNSPRRARSVASQSIIAYTMSLGAENSVAYSNNSIAIPTNFTISVTTEILPVSMTKTSVDCTMYICGDSTECSNLLLQYGSFCTQLNRALTGIAVEQDKNTQEVFAQVKQIYKTPPIKDFGGFNFSQILPDPSKPSKRSFIEDLLFNKVTLADAGFIKQYGDCLGDIAARDLICAQKFNGLTVLPPLLTDEMIAQYTSALLAGTITSGWTFGAGAALQIPFAMQMAYRFNGIGVTQCVLYENQKLIANQFNSAIGKIQDSLSSTASALGKLQDVVNQNAQALNTLVKQLSSNFGAISSVLNDILSRLDKVEAEVQIDRLITGRLQSLQTYVTQQLIRAAEIRASANLAATKMSECVLGQSKRVDFCGKGYHLMSFPQSAPHGVVFLHVTYVPAQEKNFTTAPAICHDGKAHFPREGVFVSNGTHWFVTQRNFYEPQIITTDNTFVCGNCDVVIGIVNNTVYDPLQPELDSFKEELDKYFKNHTSPDVDLGDISGINASVVNIQKEIDRLNEVAKNLNESLIDLQELGKYEQYIK

SEQ ID NO: 13439 - protein, 1210 aa, Artificial Sequence
  SARS-CoV-2/India/1-27/2020__EPI_ISL_413522 spike protein (1-1210)(N913C_S1122C)
MFVFLVLLPLVSSQCVNLTTRTQLPPAYTNSFTRGVYYPDKVFRSSVLHSTQDLFLPFFSNVTWFHAIHVSGTNGTKRFDNPVLPFNDGVYFASTEKSNIIRGWIFGTTLDSKTQSLLIVNNATNVVIKVCEFQFCNDPFLGVYHKNNKSWMESEFRVYSSANNCTFEYVSQPFLMDLEGKQGNFKNLREFVFKNIDGYFKIYSKHTPINLVRDLPQGFSALEPLVDLPIGINITRFQTLLALHRSYLTPGDSSSGWTAGAAAYYVGYLQPRTFLLKYNENGTITDAVDCALDPLSETKCTLKSFTVEKGIYQTSNFRVQPTESIVRFPNITNLCPFGEVFNATRFASVYAWNRKRISNCVADYSVLYNSASFSTFKCYGVSPTKLNDLCFTNVYADSFVIRGDEVIQIAPGQTGKIADYNYKLPDDFTGCVIAWNSNNLDSKVGGNYNYLYRLFRKSNLKPFERDISTEIYQAGSTPCNGVEGFNCYFPLQSYGFQPTNGVGYQPYRVVVLSFELLHAPATVCGPKKSTNLVKNKCVNFNFNGLTGTGVLTESNKKFLPFQQFGRDIADTTDAVRDPQTLEILDITPCSFGGVSVITPGTNTSNQVAVLYQDVNCTEVPVAIHADQLTPTWRVYSTGSNVFQTRAGCLIGAEHVNNSYECDIPIGAGICASYQTQTNSPRRARSVASQSIIAYTMSLGAENSVAYSNNSIAIPTNFTISVTTEILPVSMTKTSVDCTMYICGDSTECSNLLLQYGSFCTQLNRALTGIAVEQDKNTQEVFAQVKQIYKTPPIKDFGGFNFSQILPDPSKPSKRSFIEDLLFNKVTLADAGFIKQYGDCLGDIAARDLICAQKFNGLTVLPPLLTDEMIAQYTSALLAGTITSGWTFGAGAALQIPFAMQMAYRFNGIGVTQCVLYENQKLIANQFNSAIGKIQDSLSSTASALGKLQDVVNQNAQALNTLVKQLSSNFGAISSVLNDILSRLDKVEAEVQIDRLITGRLQSLQTYVTQQLIRAAEIRASANLAATKMSECVLGQSKRVDFCGKGYHLMSFPQSAPHGVVFLHVTYVPAQEKNFTTAPAICHDGKAHFPREGVFVSNGTHWFVTQRNFYEPQIITTDNTFVCGNCDVVIGIVNNTVYDPLQPELDSFKEELDKYFKNHTSPDVDLGDISGINASVVNIQKEIDRLNEVAKNLNESLIDLQELGKYEQYIK

SEQ ID NO: 13440 - protein, 1205 aa, Artificial Sequence
  SARS-CoV-2/pangolin/Guangxi/P4L/2017__EPI_ISL_410538 spike protein (1-1205)(N908C_S1117C)
MFVFLFVLPLVSSQCVNLTTRTGIPPGYTNSSTRGVYYPDKVFRSSILHLTQDLFLPFFSNVTWFNTINYQGGFKKFDNPVLPFNDGVYFASTEKSNIIRGWIFGTTLDARTQSLLIVNNATNVVIKVCEFQFCTDPFLGVYYHNNNKTWVENEFRVYSSANNCTFEYISQPFLMDLEGKQGNFKNLREFVFKNVDGYFKIYSKHTPIDLVRDLPRGFAALEPLVDLPIGINITRFQTLLALHRSYLTPGNLESGWTTGAAAYYVGYLQQRTFLLSYNQNGTITDAVDCSLDPLSETKCTLKSLTVEKGIYQTSNFRVQPTISIVRFPNITNLCPFGEVFNASKFASVYAWNRKRISNCVADYSVLYNSTSFSTFKCYGVSPTKLNDLCFTNVYADSFVVKGDEVRQIAPGQTGVIADYNYKLPDDFTGCVIAWNSVKQDALTGGNYGYLYRLFRKSKLKPFERDISTEIYQAGSTPCNGQVGLNCYYPLERYGFHPTTGVNYQPFRVVVLSFELLNGPATVCGPKLSTTLVKDKCVNFNFNGLTGTGVLTTSKKQFLPFQQFGRDISDTTDAVRDPQTLEILDITPCSFGGVSVITPGTNTSNQVAVLYQDVNCTEVPMAIHAEQLTPAWRVYSAGANVFQTRAGCLVGAEHVNNSYECDIPVGAGICASYHSMSSLRSVNQRSIIAYTMSLGAENSVAYSNNSIAIPTNFTISVTTEILPVSMTKTSVDCTMYICGDSIECSNLLLQYGSFCTQLNRALTGIAVEQDKNTQEVFAQVKQIYKTPPIKDFGGFNFSQILPDPSKPSKRSFIEDLLFNKVTLADAGFIKQYGDCLGDIAARDLICAQKFNGLTVLPPLLTDEMIAQYTSALLAGTITSGWTFGAGAALQIPFAMQMAYRFNGIGVTQCVLYENQKLIANQFNSAIGKIQDSLSSTASALGKLQDVVNQNAQALNTLVKQLSSNFGAISSVLNDILSRLDKVEAEVQIDRLITGRLQSLQTYVTQQLIRAAEIRASANLAATKMSECVLGQSKRVDFCGKGYHLMSFPQSAPHGVVFLHVTYVPAQEKNFTTAPAICHEGKAHFPREGVFVSNGTHWFITQRNFYEPQIITTDNTFVCGSCDVVIGIVNNTVYDPLQPELDSFKEELDKYFKNHTSPDVDLGDISGINASVVNIQKEIDRLNEVAKNLNESPIDLQELGKYEQYIK

SEQ ID NO: 13441 - protein, 1205 aa, Artificial Sequence
  SARS-CoV-2/pangolin/Guangxi/P5L/2017__EPI_ISL_410540 spike protein (1-1205)(N908C_S1117C)
MFVFLFVLPLVSSQCVNLTTRTGIPPGYTNSSTRGVYYPDKVFRSSILHLTQDLFLPFFSNVTWFNTINYQGGFKKFDNPVLPFNDGVYFASTEKSNIIRGWIFGTTLDARTQSLLIVNNATNVVIKVCEFQFCTDPFLGVYYHNNNKTWVENEFRVYSSANNCTFEYISQPFLMDLEGKQGNFKNLREFVFKNVDGYFKIYSKHTPIDLVRDLPRGFAALEPLVDLPIGINITRFQTLLALHRSYLTPGKLESGWTTGAAAYYVGYLQQRTFLLSYNQNGTITDAVDCSLDPLSETKCTLKSLTVEKGIYQTSNFRVQPTISIVRFPNITNLCPFGEVFNASKFASVYAWNRKRISNCVADYSVLYNSTSFSTFKCYGVSPTKLNDLCFTNVYADSFVVKGDEVRQIAPGQTGVIADYNYKLPDDFTGCVIAWNSVKQDALTGGNYGYLYRLFRKSKLKPFERDISTEIYQAGSTPCNGQVGLNCYYPLERYGFHPTTGVNYQPFRVVVLSFELLNGPATVCGPKLSTTLVKDKCVNFNFNGLTGTGVLTTSKKQFLPFQQFGRDISDTTDAVRDPQTLEILDITPCSFGGVSVITPGTNTSNQVAVLYQDVNCTEVPMAIHAEQLTPAWRVYSAGANVFQTRAGCLVGAEHVNNSYECDIPVGAGICASYHSMSSFRSVNQRSIIAYTMSLGAENSVAYSNNSIAIPTNFTISVTTEILPVSMTKTSVDCTMYICGDSIECSNLLLQYGSFCTQLNRALTGIAVEQDKNTQEVFAQVKQIYKTPPIKDFGGFNFSQILPDPSKPSKRSFIEDLLFNKVTLADAGFIKQYGDCLGDIAARDLICAQKFNGLTVLPPLLTDEMIAQYTSALLAGTITSGWTFGAGAALQIPFAMQMAYRFNGIGVTQCVLYENQKLIANQFNSAIGKIQDSLSSTASALGKLQDVVNQNAQALNTLVKQLSSNFGAISSVLNDILSRLDKVEAEVQIDRLITGRLQSLQTYVTQQLIRAAEIRASANLAATKMSECVLGQSKRVDFCGKGYHLMSFPQSAPHGVVFLHVTYVPAQEKNFTTAPAICHEGKAHFPREGVFVSNGTHWFITQRNFYEPQIITTDNTFVCGSCDVVIGIVNNTVYDPLQPELDSFKEELDKYFKNHTSPDVDLGDISGINASVVNIQKEIDRLNEVAKNLNESLIDLQELGKYEQYIK

SEQ ID NO: 13442 - protein, 1205 aa, Artificial Sequence
  SARS-CoV-2/pangolin/Guangxi/P5E/2017__EPI_ISL_410541 spike protein (1-1205)(N908C_S1117C)
MFVFLFVLPLVSSQCVNLTTRTGIPPGYTNSSTRGVYYPDKVFRSSILHLTQDLFLPFFSNVTWFNTITYQGGSKKFDNPVLPFNDGVYFASTEKSNIIRGWIFGTTLDARTQSLLIVNNATNVVIKVCEFQFCTDPFLGVYYHNNNKTWVENEFRVYSSANNCTFEYISQPFLMDLEGKQGNFKNLREFVFKNVDGYFKIYSKHTPIDLVRDLPRGFAALEPLVDLPIGINITRFQTLLALHRSYLTPGKLESGWTTGAAAYYVGYLQQRTFLLSYNQNGTITDAVDCSLDPLSETKCTLKSLTVEKGIYQTSNFRVQPTISIVRFPNITNLCPFGEVFNASKFASVYAWNRKRISNCVADYSVLYNSTSFSTFKCYGVSPTKLNDLCFTNVYADSFVVKGDEVRQIAPGQTGVIADYNYKLPDDFTGCVIAWNSVKQDALTGDNYGYLYRLFRKSKLKPFERDISTEIYQAGSTPCNGQVGLNCYYPLERYGFHPTTGVNYQPFRVVVLSFELLNGPATVCGPKLSTTLVKDKCVNFNFNGLTGTGVLTTSKKQFLPFQQFGRDISDTTDAVRDPQTLEILDITPCSFGGVSVITPGTNTSNQVAVLYQDVNCTEVPMAIHAEQLTPAWRVYSAGANVFQTRAGCLVGAEHVNNSYECDIPVGAGICASYHSMSSFRSVNQRSIIAYTMSLGAENSVAYSNNSIAIPTNFTISVTTEILPVSMTKTSVDCTMYICGDSIECSNLLLQYGSFCTQLNRALTGIAVEQDKNTQEVFAQVKQIYKTPPIKDFGGFNFSQILPDPSKPSKRSFIEDLLFNKVTLADAGFIKQYGDCLGDIAARDLICAQKFNGLTVLPPLLTDEMIAQYTSALLAGTITSGWTFGAGAALQIPFAMQMAYRFNGIGVTQCVLYENQKLIANQFNSAIGKIQDSLSSTASALGKLQDVVNQNAQALNTLVKQLSSNFGAISSVLNDILSRLDKVEAEVQIDRLITGRLQSLQTYVTQQLIRAAEIRASANLAATKMSECVLGQSKRVDFCGKGYHLMSFPQSAPHGVVFLHVTYVPAQEKNFTTAPAICHEGKAHFPREGVFVSNGTHWFITQRNFYEPQIITTDNTFVCGSCDVVIGIVNNTVYDPLQPELDSFKEELDKYFKNHTSPDVDLGDISGINASVVNIQKEIDRLNEVAKNLNESLIDLQELGKYEQYIK

SEQ ID NO: 13443 - protein, 1203 aa, Artificial Sequence
  SARS-CoV-2/pangolin/Guangxi/P1E/2017__EPI_ISL_410539 spike protein (1-1203)(N906C_S1115C)
MFVFLFVLPLVSSQCVNLTTRTGIQPGYTNSSTRGVYYPDKVFRSSILHLTQDLFLPFFSNVTWFNTINYQGGFKKFDNPVLPFNDGVYFASTEKSNIIRGWIFGTTLDARTQSLLIVNNATNVVIKVCEFQFCTDPFLGVYYHNNNKTWVENEFRVYSSANNCTFEYISQPFLMDLEGKQGNFKNLREFVFKNVDGYFKIYSKHTPIDLVRDLPRGFAALEPLVDLPIGINITRFQTLLALHRSYLTPGKLESGWTTGAAAYYVGYLQQRTFLLSYNQNGTITDAVDCSLDPLSETKCTLKSLTVEKGIYQTSNFRVQPTISIVRFPNITNLCPFGEVFNASKFASVYAWNRKRISNCVADYSVLYNSTSFSTFKCYGVSPTKLNDLCFTNVYADSFVVKGDEVRQIAPGQTGVIADYNYKLPDDFTGCVIAWNSVKQDALTGGNYLYRLFRKSKLKPFERDISTEIYQAGSTPCNGQVGLNCYYPLERYGFHPTTGVNYQPFRVVVLSFELLNGPATVCGPKLSTTLVKDKCVNFNFNGLTGTGVLTTSKKQFLPFQQFGRDISDTTDAVRDPQTLEILDITPCSFGGVSVITPGTNTSNQVAVLYQDVNCTEVPMAIHAEQLTPAWRVYSAGANVFQTRAGCLVGAEHVNNSYECDIPVGAGICASYHSMSSLRSVNQRSIIAYTMSLGAENSVAYSNNSIAIPTNFTISVTTEILPVSMTKTSVDCTMYICGDSIECSNLLLQYGSFCTQLNRALTGIAVEQDKNTQEVFAQVKQIYKTPPIKDFGGFNFSQILPDPSKPSKRSFIEDLLFNKVTLADAGFIKQYGDCLGDIAARDLICAQKFNGLTVLPPLLTDEMIAQYTSALLAGTITSGWTFGAGAALQIPFAMQMAYRFNGIGVTQCVLYENQKLIANQFNSAIGKIQDSLSSTASALGKLQDVVNQNAQALNTLVKQLSSNFGAISSVLNDILSRLDKVEAEVQIDRLITGRLQSLQTYVTQQLIRAAEIRASANLAATKMSECVLGQSKRVDFCGKGYHLMSFPQSAPHGVVFLHVTYVPAQEKNFTTAPAICHEGKAHFPREGVFVSNGTHWFITQRNFYEPQIITTDNTFVCGSCDVVIGIVNNTVYDPLQPELDSFKEELDKYFKNHTSPDVDLGDISGINASVVNIQKEIDRLNEVAKNLNESLIDLQELGKYEQYIK

SEQ ID NO: 13444 - protein, 1147 aa, Artificial Sequence
  SARS-CoV-2/Wuhan/WIV05/2019__EPI_ISL_402128 spike protein (1-1147)(N914C_S1123C)
MFVFLVLLPLVSSQCVNLTTRTQLPPAYTNSFTRGVYYPDKVFRSSVLHSTQDLFLPFFSNVTWFHAIHVSGTNGTKRFDNPVLPFNDGVYFASTEKSNIIRGWIFGTTLDSKTQSLLIVNNATNVVIKVCEFQFCNDPFLGVYYHKNNKSWMESEFRVYSSANNCTFEYVSQPFLMDLEGKQGNFKNLREFVFKNIDGYFKIYSKHTPINLVRDLPQGFSALEPLVDLPIGINITRFQTLLALHRSYLTPGDSSSGWTAGAAAYYVGYLQPRTFLLKYNENGTITDAVDCALDPLSETKCTLKSFTVEKGIYQTSNFRVQPTESIVRFPNITNLCPFGEVFNATRFASVYAWNRKRISNCVADYSVLYNSASFSTFKCYGVSPTKLNDLCFTNVYADSFVIRGDEVRQIAPGQTGKIADYNYKLPDDFTGCVIAWNSNNLDSKVGGNYNYLYRLFRKSNLKPFERDISTEIYQAGSTPCNGVEGFNCYFPLQSYGFQPTNGVGYQPYRVVVLSFELLHAPATVCGPKKSTNLVKNKCVNFNFNGLTGTGVLTESNKKFLPFQQFGRDIADTTDAVRDPQTLEILDITPCSFGGVSVITPGTNTSNQVAVLYQDVNCTEVPVAIHADQLTPTWRVYSTGSNVFQTRAGCLIGAEHVNNSYECDIPIGAGICASYQTQTNSPRRARSVASQSIIAYTMSLGAENSVAYSNNSIAIPTNFTISVTTEILPVSMTKTSVDCTMYICGDSTECSNLLLQYGSFCTQLNRALTGIAVEQDKNTQEVFAQVKQIYKTPPIKDFGGFNFSQILPDPSKPSKRSFIEDLLFNKVTLADAGFIKQYGDCLGDIAARDLICAQKFNGLTVLPPLLTDEMIAQYTSALLAGTITSGWTFGAGAALQIPFAMQMAYRFNGIGVTQCVLYENQKLIANQFNSAIGKIQDSLSSTASALGKLQDVVNQNAQALNTLVKQLSSNFGAISSVLNDILSRLDKVEAEVQIDRLITGRLQSLQTYVTQQLIRAAEIRASANLAATKMSECVLGQSKRVDFCGKGYHLMSFPQSAPHGVVFLHVTYVPAQEKNFTTAPAICHDGKAHFPREGVFVSNGTHWFVTQRNFYEPQIITTDNTFVCGNCDVVIGIVNNTVYDPLQPELDS

SEQ ID NO: 13445 - protein, 1143 aa, Artificial Sequence
  SARS-CoV-2/bat/Yunnan/RaTG13/2013__EPI_ISL_402131 spike protein (1-1143)(N910C_S1119C)
MFVFLVLLPLVSSQCVNLTTRTQLPPAYTNSSTRGVYYPDKVFRSSVLHLTQDLFLPFFSNVTWFHAIHVSGTNGIKRFDNPVLPFNDGVYFASTEKSNIIRGWIFGTTLDSKTQSLLIVNNATNVVIKVCEFQFCNDPFLGVYYHKNNKSWMESEFRVYSSANNCTFEYVSQPFLMDLEGKQGNFKNLREFVFKNIDGYFKIYSKHTPINLVRDLPPGFSALEPLVDLPIGINITRFQTLLALHRSYLTPGDSSSGWTAGAAAYYVGYLQPRTFLLKYNENGTITDAVDCALDPLSETKCTLKSFTVEKGIYQTSNFRVQPTDSIVRFPNITNLCPFGEVFNATTFASVYAWNRKRISNCVADYSVLYNSTSFSTFKCYGVSPTKLNDLCFTNVYADSFVITGDEVRQIAPGQTGKIADYNYKLPDDFTGCVIAWNSKHIDAKEGGNFNYLYRLFRKANLKPFERDISTEIYQAGSKPCNGQTGLNCYYPLYRYGFYPTDGVGHQPYRVVVLSFELLNAPATVCGPKKSTNLVKNKCVNFNFNGLTGTGVLTESNKKFLPFQQFGRDIADTTDAVRDPQTLEILDITPCSFGGVSVITPGTNASNQVAVLYQDVNCTEVPVAIHADQLTPTWRVYSTGSNVFQTRAGCLIGAEHVNNSYECDIPIGAGICASYQTQTNSRSVASQSIIAYTMSLGAENSVAYSNNSIAIPTNFTISVTTEILPVSMTKTSVDCTMYICGDSTECSNLLLQYGSFCTQLNRALTGIAVEQDKNTQEVFAQVKQIYKTPPIKDFGGFNFSQILPDPSKPSKRSFIEDLLFNKVTLADAGFIKQYGDCLGDIAARDLICAQKFNGLTVLPPLLTDEMIAQYTSALLAGTITSGWTFGAGAALQIPFAMQMAYRFNGIGVTQCVLYENQKLIANQFNSAIGKIQDSLSSTASALGKLQDVVNQNAQALNTLVKQLSSNFGAISSVLNDILSRLDKVEAEVQIDRLITGRLQSLQTYVTQQLIRAAEIRASANLAATKMSECVLGQSKRVDFCGKGYHLMSFPQSAPHGVVFLHVTYVPAQEKNFTTAPAICHDGKAHFPREGVFVSNGTHWFVTQRNFYEPQIITTDNTFVCGSCDVVIGIVNNTVYDPLQPELDS

SEQ ID NO: 13446 - protein, 1147 aa, Artificial Sequence
  SARS-CoV-2/Wuhan/HBCDC-HB-01/2019__EPI_ISL_402132 spike protein (1-1147)(N914C_S1123C)
MFVFLVLLPLVSSQCVNLTTRTQLPPAYTNSITRGVYYPDKVFRSSVLHSTQDLFLPFFSNVTWFHAIHVSGTNGTKRFDNPVLPFNDGVYFASTEKSNIIRGWIFGTTLDSKTQSLLIVNNATNVVIKVCEFQFCNDPFLGVYYHKNNKSWMESEFRVYSSANNCTFEYVSQPFLMDLEGKQGNFKNLREFVFKNIDGYFKIYSKHTPINLVRDLPQGFSALEPLVDLPIGINITRFQTLLALHRSYLTPGDSSSGWTAGAAAYYVGYLQPRTFLLKYNENGTITDAVDCALDPLSETKCTLKSFTVEKGIYQTSNFRVQPTESIVRFPNITNLCPFGEVFNATRFASVYAWNRKRISNCVADYSVLYNSASFSTFKCYGVSPTKLNDLCFTNVYADSFVIRGDEVRQIAPGQTGKIADYNYKLPDDFTGCVIAWNSNNLDSKVGGNYNYLYRLFRKSNLKPFERDISTEIYQAGSTPCNGVEGFNCYFPLQSYGFQPTNGVGYQPYRVVVLSFELLHAPATVCGPKKSTNLVKNKCVNFNFNGLTGTGVLTESNKKFLPFQQFGRDIADTTDAVRDPQTLEILDITPCSFGGVSVITPGTNTSNQVAVLYQDVNCTEVPVAIHADQLTPTWRVYSTGSNVFQTRAGCLIGAEHVNNSYECDIPIGAGICASYQTQTNSPRRARSVASQSIIAYTMSLGAENSVAYSNNSIAIPTNFTISVTTEILPVSMTKTSVDCTMYICGDSTECSNLLLQYGSFCTQLNRALTGIAVEQDKNTQEVFAQVKQIYKTPPIKDFGGFNFSQILPDPSKPSKRSFIEDLLFNKVTLADAGFIKQYGDCLGDIAARDLICAQKFNGLTVLPPLLTDEMIAQYTSALLAGTITSGWTFGAGAALQIPFAMQMAYRFNGIGVTQCVLYENQKLIANQFNSAIGKIQDSLSSTASALGKLQDVVNQNAQALNTLVKQLSSNFGAISSVLNDILSRLDKVEAEVQIDRLITGRLQSLQTYVTQQLIRAAEIRASANLAATKMSECVLGQSKRVDFCGKGYHLMSFPQSAPHGVVFLHVTYVPAQEKNFTTAPAICHDGKAHFPREGVFVSNGTHWFVTQRNFYEPQIITTDNTFVCGNCDVVIGIVNNTVYDPLQPELDS

SEQ ID NO: 13447 - protein, 1147 aa, Artificial Sequence
  SARS-CoV-2/Guangdong/20SF028/2020__EPI_ISL_403936 spike protein (1-1147)(N914C_S1123C)
MFVFLVLLPLVSSQCVNLTTRTQLPPAYTNSFTRGVYYPDKVFRSSVLYSTQDLFLPFFSNVTWFHAIHVSGTNGTKRFDNPVLPFNDGVYFASTEKSNIIRGWIFGTTLDSKTQSLLIVNNATNVVIKVCEFQFCNDPFLGVYYHKNNKSWMESEFRVYSSANNCTFEYVSQPFLMDLEGKQGNFKNLREFVFKNIDGYFKIYSKHTPINLVRDLPQGFSALEPLVDLPIGINITRFQTLLALHRSYLTPGDSSSGWTAGAAAYYVGYLQPRTFLLKYNENGTITDAVDCALDPLSETKCTLKSFTVEKGIYQTSNFRVQPTESIVRFPNITNLCPFGEVFNATRFASVYAWNRKRISNCVADYSVLYNSASFSTFKCYGVSPTKLNDLCFTNVYADSFVIRGDEVRQIAPGQTGKIADYNYKLPDDFTGCVIAWNSNNLDSKVGGNYNYLYRLFRKSNLKPFERDISTEIYQAGSTPCNGVEGFNCYFPLQSYGFQPTNGVGYQPYRVVVLSFELLHAPATVCGPKKSTNLVKNKCVNFNFNGLTGTGVLTESNKKFLPFQQFGRDIADTTDAVRDPQTLEILDITPCSFGGVSVITPGTNTSNQVAVLYQDVNCTEVPVAIHADQLTPTWRVYSTGSNVFQTRAGCLIGAEHVNNSYECDIPIGAGICASYQTQTNSPRRARSVASQSIIAYTMSLGAENSVAYSNNSIAIPTNFTISVTTEILPVSMTKTSVDCTMYICGDSTECSNLLLQYGSFCTQLNRALTGIAVEQDKNTQEVFAQVKQIYKTPPIKDFGGFNFSQILPDPSKPSKRSFIEDLLFNKVTLADAGFIKQYGDCLGDIAARDLICAQKFNGLTVLPPLLTDEMIAQYTSALLAGTITSGWTFGAGAALQIPFAMQMAYRFNGIGVTQCVLYENQKLIANQFNSAIGKIQDSLSSTASALGKLQDVVNQNAQALNTLVKQLSSNFGAISSVLNDILSRLDKVEAEVQIDRLITGRLQSLQTYVTQQLIRAAEIRASANLAATKMSECVLGQSKRVDFCGKGYHLMSFPQSAPHGVVFLHVTYVPAQEKNFTTAPAICHDGKAHFPREGVFVSNGTHWFVTQRNFYEPQIITTDNTFVCGNCDVVIGIVNNTVYDPLQPELDS

SEQ ID NO: 13448 - protein, 1147 aa, Artificial Sequence
  SARS-CoV-2/Shenzhen/SZTH-001/2020__EPI_ISL_406592 spike protein (1-1147)(N914C_S1123C)
MFVFLVLLPLVSSQCVNLTTRTQLPPAYTNSFTRGVYYPDKVFRSSVLHSTQDLFLPFFSNVTWFHAIHVSGTNGTKRFDNPVLPFNDGVYFASTEKSNIIRGWIFGTTLDSKTQSLLIVNNATNVVIKVCEFQFCNDPFLGVYYHKNNKSWMESEFRVYSSANNCTFEYVSQPFLMDLEGKQGNFKNLREFVFKNIDGYFKIYSKHTPINLVRDLPQGFSALEPLVDLPIGINITRFQTLLALHRSYLTPGDSSSGWTAGAAAYYVGYLQPRTFLLKYNENGTITDAVDCALDPLSETKCTLKSFTVEKGIYQTSNFRVQPTESIVRFPNITNLCPFGEVFNATRFASVYAWNRKRISNCVADYSVLYNSASFSTFKCYGVSPTKLNDLCFTNVYADSFVIRGDEVRQIAPGQTGKIADYNYKLPDDFTGCVIAWNSNNLDSKVGGNYNYLYRLFRKSNLKPFERDISTEIYQAGSTPCNGVEGFNCYFPLQSYGFQPTNGVGYQPYRVVVLSFELLHAPATVCGPKKSTNLVKNKCVNFNFNGLTGTGVLTESNKKFLPFQQFGRDIADTTDAVRDPQTLEILDITPCSFGGVSVITPGTNTSNQVAVLYQDVNCTEVPVAIHADQLTPTWRVYSTGSNVFQTRAGCLIGAEHVNNSYECDIPIGAGICASYQTQTNSPRRARSVASQSIIAYTMSLGAENSVAYSNNSIAIPTNFTISVTTEILPVSMTKTSVDCTMYICGDSTECSNLLLQYGSFCTQLNRALTGIAVEQDKNTQEVFAQVKQIYKTPPIKDFGGFNFSQILPDPSKPSKRSFIEDLLFNKVTLADAGFIKQYGDCLGDIAARDLICAQKFNGLTVLPPLLTDEMIAQYTSALLAGTITSGWTFGAGAALQIPFAMQMAYRFNGIGVTQCVLYENQKLIANQFNSAIGKIQDSLSSTASALGKLQDVVNQNAQALNTLVKQLSSNFGAISSVLNDILSRLDKVEAEVQIDRLITGRLQSLQTYVTQQLIRAAEIRASANLAATKMSECVLGQSKRVDFCGKGYHLMSFPQSAPHGVVFLHVTYVPAQEKNFTTAPAICHDGKAHFPREGVFVSNGTHWFVTQRNFYEPQIITTDNTFVCGNCDVLIGIVNNTVYDPLQPELDS

SEQ ID NO: 13449 - protein, 1147 aa, Artificial Sequence
  SARS-CoV-2/Shenzhen/SZTH-004/2020__EPI_ISL_406595 spike protein (1-1147)(N914C_S1123C)
MFVFLVLLPLVSSQCVNLTTRTQLPPAYTNSFTRGVYYPDKVFRSSVLHSTQDLFLPFFSNVTWFHAIHVSGTNGTKRFDNPVLPFNDGVYFASTEKSNIIRGWIFGTTLDSKTQSLLIVNNATNVVIKVCEFQFCNDPFLGVYYHKNNKSWMESEFRVYSSANNCTFEYVSQPFLMDLEGKQGNFKNLREFVFKNIDGYFKIYSKHTPINLVRDLPQGFSALEPLVDLPIGINITRFQTLLALHRSYLTPGDSSSGWTAGAAAYYVGYLQPRTFLLKYNENGTITDAVDCALDPLSETKCTLKSFTVEKGIYQTSNFRVQPTESIVRFPNITNLCPFGEVFNATRFASVYAWDRKRISNCVAYYSVLYNSASFSTFKCYGVSPTKLNDLCFTNVYADSFVIRGDEVRQIAPGQTGKIADYNYKLPDDFTGCVIAWNSNNLDSKVGGNYNYLYRLFRKSNLKPFERDISTEIYQAGSTPCNGVEGFNCYFPLQSYGFQPTNGVGYQPYRVVVLSFELLHAPATVCGPKKSTNLVKNKCVNFNFNGLTGTGVLTESNKKFLPFQQFGRDIADTTDAVRDPQTLEILDITPCSFGGVSVITPGTNTSNQVAVLYQDVNCTEVPVAIHADQLTPTWRVYSTGSNVFQTRAGCLIGAEHVNNSYECDIPIGAGICASYQTQTNSPRRARSVASQSIIAYTMSLGAENSVAYSNNSIAIPTNFTISVTTEILPVSMTKTSVDCTMYICGDSTECSNLLLQYGSFCTQLNRALTGIAVEQDKNTQEVFAQVKQIYKTPPIKDFGGFNFSQILPDPSKPSKRSFIEDLLFNKVTLADAGFIKQYGDCLGDIAARDLICAQKFNGLTVLPPLLTDEMIAQYTSALLAGTITSGWTFGAGAALQIPFAMQMAYRFNGIGVTQCVLYENQKLIANQFNSAIGKIQDSLSSTASALGKLQDVVNQNAQALNTLVKQLSSNFGAISSVLNDILSRLDKVEAEVQIDRLITGRLQSLQTYVTQQLIRAAEIRASANLAATKMSECVLGQSKRVDFCGKGYHLMSFPQSAPHGVVFLHVTYVPAQEKNFTTAPAICHDGKAHFPREGVFVSNGTHWFVTQRNFYEPQIITTDNTFVCGNCDVVIGIVNNTVYDPLQPELDS

SEQ ID NO: 13450 - protein, 1147 aa, Artificial Sequence
  SARS-CoV-2/France/IDF0372/2020__EPI_ISL_406596 spike protein (1-1147)(N914C_S1123C)
MFVFLVLLPLVSSQCVNLTTRTQLPPAYTNSFTRGVYYPDKVFRSSVLHSTQDLFLPFFSNVTWFHAIHVSGTNGTKRFDNPVLPFNDGVYFASTEKSNIIRGWIFGTTLDSKTQSLLIVNNATNVVIKVCEFQFCNDPFLGVYYHKNNKSWMESEFRVYSSANNCTFEYVSQPFLMDLEGKQGNFKNLREFVFKNIDGYFKIYSKHTPINLVRDLPQGFSALEPLVDLPIGINITRFQTLLALHRSYLTPGDSSSGWTAGAAAYYVGYLQPRTFLLKYNENGTITDAVDCALDPLSETKCTLKSFTVEKGIYQTSNFRVQPTESIVRFPNITNLCPFGEVFNATRFASVYAWNRKRISNCVADYSFLYNSASFSTFKCYGVSPTKLNDLCFTNVYADSFVIRGDEVRQIAPGQTGKIADYNYKLPDDFTGCVIAWNSNNLDSKVGGNYNYLYRLFRKSNLKPFERDISTEIYQAGSTPCNGVEGFNCYFPLQSYGFQPTNGVGYQPYRVVVLSFELLHAPATVCGPKKSTNLVKNKCVNFNFNGLTGTGVLTESNKKFLPFQQFGRDIADTTDAVRDPQTLEILDITPCSFGGVSVITPGTNTSNQVAVLYQDVNCTEVPVAIHADQLTPTWRVYSTGSNVFQTRAGCLIGAEHVNNSYECDIPIGAGICASYQTQTNSPRRARSVASQSIIAYTMSLGAENSVAYSNNSIAIPTNFTISVTTEILPVSMTKTSVDCTMYICGDSTECSNLLLQYGSFCTQLNRALTGIAVEQDKNTQEVFAQVKQIYKTPPIKDFGGFNFSQILPDPSKPSKRSFIEDLLFNKVTLADAGFIKQYGDCLGDIAARDLICAQKFNGLTVLPPLLTDEMIAQYTSALLAGTITSGWTFGAGAALQIPFAMQMAYRFNGIGVTQCVLYENQKLIANQFNSAIGKIQDSLSSTASALGKLQDVVNQNAQALNTLVKQLSSNFGAISSVLNDILSRLDKVEAEVQIDRLITGRLQSLQTYVTQQLIRAAEIRASANLAATKMSECVLGQSKRVDFCGKGYHLMSFPQSAPHGVVFLHVTYVPAQEKNFTTAPAICHDGKAHFPREGVFVSNGTHWFVTQRNFYEPQIITTDNTFVCGNCDVVIGIVNNTVYDPLQPELDS

SEQ ID NO: 13451 - protein, 1147 aa, Artificial Sequence
  SARS-CoV-2/Australia/VIC01/2020__EPI_ISL_406844 spike protein (1-1147)(N914C_S1123C)
MFVFLVLLPLVSSQCVNLTTRTQLPPAYTNSFTRGVYYPDKVFRSSVLHSTQDLFLPFFSNVTWFHAIHVSGTNGTKRFDNPVLPFNDGVYFASTEKSNIIRGWIFGTTLDSKTQSLLIVNNATNVVIKVCEFQFCNDPFLGVYYHKNNKSWMESEFRVYSSANNCTFEYVSQPFLMDLEGKQGNFKNLREFVFKNIDGYFKIYSKHTPINLVRDLPQGFSALEPLVDLPIGINITRFQTLLALHRRYLTPGDSSSGWTAGAAAYYVGYLQPRTFLLKYNENGTITDAVDCALDPLSETKCTLKSFTVEKGIYQTSNFRVQPTESIVRFPNITNLCPFGEVFNATRFASVYAWNRKRISNCVADYSVLYNSASFSTFKCYGVSPTKLNDLCFTNVYADSFVIRGDEVRQIAPGQTGKIADYNYKLPDDFTGCVIAWNSNNLDSKVGGNYNYLYRLFRKSNLKPFERDISTEIYQAGSTPCNGVEGFNCYFPLQSYGFQPTNGVGYQPYRVVVLSFELLHAPATVCGPKKSTNLVKNKCVNFNFNGLTGTGVLTESNKKFLPFQQFGRDIADTTDAVRDPQTLEILDITPCSFGGVSVITPGTNTSNQVAVLYQDVNCTEVPVAIHADQLTPTWRVYSTGSNVFQTRAGCLIGAEHVNNSYECDIPIGAGICASYQTQTNSPRRARSVASQSIIAYTMSLGAENSVAYSNNSIAIPTNFTISVTTEILPVSMTKTSVDCTMYICGDSTECSNLLLQYGSFCTQLNRALTGIAVEQDKNTQEVFAQVKQIYKTPPIKDFGGFNFSQILPDPSKPSKRSFIEDLLFNKVTLADAGFIKQYGDCLGDIAARDLICAQKFNGLTVLPPLLTDEMIAQYTSALLAGTITSGWTFGAGAALQIPFAMQMAYRFNGIGVTQCVLYENQKLIANQFNSAIGKIQDSLSSTASALGKLQDVVNQNAQALNTLVKQLSSNFGAISSVLNDILSRLDKVEAEVQIDRLITGRLQSLQTYVTQQLIRAAEIRASANLAATKMSECVLGQSKRVDFCGKGYHLMSFPQSAPHGVVFLHVTYVPAQEKNFTTAPAICHDGKAHFPREGVFVSNGTHWFVTQRNFYEPQIITTDNTFVCGNCDVVIGIVNNTVYDPLQPELDS

SEQ ID NO: 13452 - protein, 1147 aa, Artificial Sequence
  SARS-CoV-2/Germany/BavPat1/2020__EPI_ISL_406862 spike protein (1-1147)(N914C_S1123C)
MFVFLVLLPLVSSQCVNLTTRTQLPPAYTNSFTRGVYYPDKVFRSSVLHSTQDLFLPFFSNVTWFHAIHVSGTNGTKRFDNPVLPFNDGVYFASTEKSNIIRGWIFGTTLDSKTQSLLIVNNATNVVIKVCEFQFCNDPFLGVYYHKNNKSWMESEFRVYSSANNCTFEYVSQPFLMDLEGKQGNFKNLREFVFKNIDGYFKIYSKHTPINLVRDLPQGFSALEPLVDLPIGINITRFQTLLALHRSYLTPGDSSSGWTAGAAAYYVGYLQPRTFLLKYNENGTITDAVDCALDPLSETKCTLKSFTVEKGIYQTSNFRVQPTESIVRFPNITNLCPFGEVFNATRFASVYAWNRKRISNCVADYSVLYNSASFSTFKCYGVSPTKLNDLCFTNVYADSFVIRGDEVRQIAPGQTGKIADYNYKLPDDFTGCVIAWNSNNLDSKVGGNYNYLYRLFRKSNLKPFERDISTEIYQAGSTPCNGVEGFNCYFPLQSYGFQPTNGVGYQPYRVVVLSFELLHAPATVCGPKKSTNLVKNKCVNFNFNGLTGTGVLTESNKKFLPFQQFGRDIADTTDAVRDPQTLEILDITPCSFGGVSVITPGTNTSNQVAVLYQGVNCTEVPVAIHADQLTPTWRVYSTGSNVFQTRAGCLIGAEHVNNSYECDIPIGAGICASYQTQTNSPRRARSVASQSIIAYTMSLGAENSVAYSNNSIAIPTNFTISVTTEILPVSMTKTSVDCTMYICGDSTECSNLLLQYGSFCTQLNRALTGIAVEQDKNTQEVFAQVKQIYKTPPIKDFGGFNFSQILPDPSKPSKRSFIEDLLFNKVTLADAGFIKQYGDCLGDIAARDLICAQKFNGLTVLPPLLTDEMIAQYTSALLAGTITSGWTFGAGAALQIPFAMQMAYRFNGIGVTQCVLYENQKLIANQFNSAIGKIQDSLSSTASALGKLQDVVNQNAQALNTLVKQLSSNFGAISSVLNDILSRLDKVEAEVQIDRLITGRLQSLQTYVTQQLIRAAEIRASANLAATKMSECVLGQSKRVDFCGKGYHLMSFPQSAPHGVVFLHVTYVPAQEKNFTTAPAICHDGKAHFPREGVFVSNGTHWFVTQRNFYEPQIITTDNTFVCGNCDVVIGIVNNTVYDPLQPELDS

SEQ ID NO: 13453 - protein, 1147 aa, Artificial Sequence
  SARS-CoV-2/Wuhan/HBCDC-HB-02/2020__EPI_ISL_412978 spike protein (1-1147)(N914C_S1123C)
MFVFLVLLPLVSSQCVNLTTRTQLPPAYTNSFTRGVYYPDKVFRSSVLHSTQDLFLPFFSNVTWFHAIHVSGTNGTKRFDNPVLPFNDGVYFASTEKSNIIRGWIFGTTLDSKTQSLLIVNNATNVVIKVCEFQFCNDPFLGVYYHKNNKSWMESEFRVYSSANNCTFEYVSQPFLMDLEGKQGNFKNLREFVFKNIDGYFKIYSKHTPINLVRDLPQGFSALEPLVDLPIGINITRFQTLLALHRSYLTPGDSSSGWTAGAAAYYVGYLQPRTFLLKYNENGTITDAVDCALDPLSETKCTLKSFTVEKGIYQTSNFRVQPTESIVRFPNITNLCPFGEVFNATRFASVYAWNRKRISNCVADYSVLYNSASFSTFKCYGVSPTKLNDLCFTNVYADSFVIRGDEVRQIAPGQTGKIADYNYKLPDDFTGCVIAWNSNNLDSKVGGNYNYLYRLFRKSNLKPFERDISTEIYQAGSTPCNGVEGFNCYFPLQSYGFQPTNGVGYQPYRVVVLSFELLHAPATVCGPKKSTNLVKNKCVNFNFNGLTGTGVLTESNKKFLPFQQFGRDIADTTDAVRDPQTLEILDITPCSFGGVSVITPGTNTSNQVAVLYQDVNCTEVPVAIHADQLTPTWRVYSTGSNVFQTRAGCLIGAEHVNNSYECDIPIGAGICASYQTQTNSPRRARSVASQSIIAYTMSLGAENSVAYSNNSIAIPTNFTISVTTEILPVSMTKTSVDCTMYICGDSTECSNFLLQYGSFCTQLNRALTGIAVEQDKNTQEVFAQVKQIYKTPPIKDFGGFNFSQILPDPSKPSKRSFIEDLLFNKVTLADAGFIKQYGDCLGDIAARDLICAQKFNGLTVLPPLLTDEMIAQYTSALLAGTITSGWTFGAGAALQIPFAMQMAYRFNGIGVTQCVLYENQKLIANQFNSAIGKIQDSLSSTASALGKLQDVVNQNAQALNTLVKQLSSNFGAISSVLNDILSRLDKVEAEVQIDRLITGRLQSLQTYVTQQLIRAAEIRASANLAATKMSECVLGQSKRVDFCGKGYHLMSFPQSAPHGVVFLHVTYVPAQEKNFTTAPAICHDGKAHFPREGVFVSNGTHWFVTQRNFYEPQIITTDNTFVCGNCDVVIGIVNNTVYDPLQPELDS

SEQ ID NO: 13454 - protein, 1147 aa, Artificial Sequence
  SARS-CoV-2/Australia/QLD02/2020__EPI_ISL_407896 spike protein (1-1147)(N914C_S1123C)
MFVFLVLLPLVSSQCVNLTTRTQLPPAYTNSFTRGVYYPDKVFRSSVLHSTQDLFLPFFSNVTWFHAIHVSGTNGTKRFDNPVLPFNDGVYFASTEKSNIIRGWIFGTTLDSKTQSLLIVNNATNVVIKVCEFQFCNDPFLGVYYHKNNKSWMESEFRVYSSANNCTFEYVSQPFLMDLEGKQGNFKNLREFVFKNIDGYFKIYSKHTPINLVRDLPQGFSALEPLVDLPIGINITRFQTLLALHRSYLTPGDSSSGWTAGAAAYYVGYLQPRTFLLKYNENGTITDAVDCALDPLSETKCTLKSFTVEKGIYQTSNFRVQPTESIVRFPNITNLCPFGEVFNATRFASVYAWNRKRISNCVADYSVLYNSASFSTFKCYGVSPTKLNDLCFTNVYADSFVIRGDEVRQIAPGQTGKIADYNYKLPDDFTGCVIAWNSNNLDSKVGGNYNYLYRLFRKSNLKPFERDISTEIYQAGSTPCNGVEGFNCYFPLQSYGFQPTNGVGYQPYRVVVLSFELLHAPATVCGPKKSTNLVKNKCVNFNFNGLTGTGVLTESNKKFLPFQQFGRDIADTTDAVRDPQTLEILDITPCSFGGVSVITPGTNTSNQVAVLYQDVNCTEVPVAIHADQLTPTWRVYSTGSNVFQTRAGCLIGAEHVNNSYECDIPIGAGICASYQTQTNSPRRARSVASQSIIAYTMSLGAENSVAYSNNSIAIPTNFTISVTTEILPVSMTKTSVDCTMYICGDSTECSNLLLQYGSFCTQLNRALTGIAVEQDKNTQEVFAQVKQIYKTPPIKDFGGFNFSQILPDPSKPSKRSFIEDLLFNKVTLADAGFIKQYGDCLGDIAARDLICAQKFNGLTVLPPLLTDEMIAQYTSALLAGTITSGWTFGAGAALQIPFAMQMAYRFNGIGVTQCVLYENQKLIANQFNSAIGKIQDSLSSTASALGKLQDVVNQNAQALNTLVKQLSSNFGAISSVLNDILSRLDKVEAEVQIDRLITGRLQSLQTYVTQQLIRAAEIRASANLAATKMSECVLGQSKRVDFCGKGYHLMSFPQSAPHGVVFLHVTYVPAQEKNFTTAPAICHDGKAHFPREGVFVSNGTHWFVTQRNFYEPQIITTDNTFVCGNCDVVIGIVNNTVYDPLQLELDS

SEQ ID NO: 13455 - protein, 1147 aa, Artificial Sequence
  SARS-CoV-2/India/1-31/2020__EPI_ISL_413523 spike protein (1-1147)(N914C_S1123C)
MFVFLVLLPLVSSQCVNLTTRTQLPPAYTNSFTRGVYYPDKVFRSSVLHSTQDLFLPFFSNVTWFHAIHVSGTNGTKRFDNPVLPFNDGVYFASTEKSNIIRGWIFGTTLDSKTQSLLIVNNATNVVIKVCEFQFCNDPFLGVYYHKNNKSWMESEFRVYSSANNCTFEYVSQPFLMDLEGKQGNFKNLREFVFKNIDGYFKIYSKHTPINLVRDLPQGFSALEPLVDLPIGINITRFQTLLALHRSYLTPGDSSSGWTAGAAAYYVGYLQPRTFLLKYNENGTITDAVDCALDPLSETKCTLKSFTVEKGIYQTSNFRVQPTESIVRFPNITNLCPFGEVFNATRFASVYAWNRKRISNCVADYSVLYNSASFSTFKCYGVSPTKLNDLCFTNVYADSFVIRGDEVRQIAPGQTGKIADYNYKLPDDFTGCVIAWNSNNLDSKVGGNYNYLYRLFRKSNLKPFERDISTEIYQAGSTPCNGVEGFNCYFPLQSYGFQPTNGVGYQPYRVVVLSFELLHAPATVCGPKKSTNLVKNKCVNFNFNGLTGTGVLTESNKKFLPFQQFGRDIADTTDAVRDPQTLEILDITPCSFGGVSVITPGTNTSNQVAVLYQDVNCTEVPVAIHADQLTPTWRVYSTGSNVFQTRAGCLIGAEHVNNSYECDIPIGAGICASYQTQTNSPRRARSVASQSIIAYTMSLGAENSVAYSNNSIAIPTNFTISVTTEILPVSMTKTSVDCTMYICGDSTECSNLLLQYGSFCTQLNRALTGIAVEQDKNTQEVFAQVKQIYKTPPIKDFGGFNFSQILPDPSKPSKRSFIEDLLFNKVTLADAGFIKQYGDCLGDIAARDLICAQKFNGLTVLPPLLTDEMIAQYTSALLAGTITSGWTFGAGAALQIPFAMQMAYRFNGIGVTQCVLYENQKLIANQFNSVIGKIQDSLSSTASALGKLQDVVNQNAQALNTLVKQLSSNFGAISSVLNDILSRLDKVEAEVQIDRLITGRLQSLQTYVTQQLIRAAEIRASANLAATKMSECVLGQSKRVDFCGKGYHLMSFPQSAPHGVVFLHVTYVPAQEKNFTTAPAICHDGKAHFPREGVFVSNGTHWFVTQRNFYEPQIITTDNTFVCGNCDVVIGIVNNTVYDPLQPELDS

SEQ ID NO: 13456 - protein, 1147 aa, Artificial Sequence
  SARS-CoV-2/Guangdong/GD2020087-P0008/2020__EPI_ISL_413863 spike protein (1-1147)(N914C_S1123C)
MFVFLVLLPLVSSQCVNLTTRTQLPPAYTNSFTRGVYYPDKVFRSSVLHSTQDLFLPFFSNVTWFHAIHVSGTNGTKRFDNPVLPFNDGVYFASTEKSNIIRGWIFGTTLDSKTQSLLIVNNATNVVIKVCEFQFCNDPFLGVYYHKNNKSWMESEFRVYSSANNCTFEYVSQPFLMDLEGKQGNFKNLREFVFKNIDGYFKIYSKHTPINLVRDLPQGFSALEPLVDLPIGINITRFQTLLALHRSYLTPGDSSSGWTAGAAAYYVGYLQPRTFLLKYNENGTITDAVDCALDPLSETKCTLKSFTVEKGIYQTSNFRVQPTESIVRFPNITNLCPFGEVFNATRFASVYAWNRKRISNCVADYSVLYNSASFSTFKCYGVSPTKLNDLCFTNVYADSFVIRGDEVREIAPGQTGKIADYNYKLPDDFTGCVIAWNSNNLDSKVGGNYNYLYRLFRKSNLKPFERDISTEIYQAGSTPCNGVEGFNCYFPLQSYGFQPTNGVGYQPYRVVVLSFELLHAPATVCGPKKSTNLVKNKCVNFNFNGLTGTGVLTESNKKFLPFQQFGRDIADTTDAVRDPQTLEILDITPCSFGGVSVITPGTNTSNQVAVLYQDVNCTEVPVAIHADQLTPTWRVYSTGSNVFQTRAGCLIGAEHVNNSYECDIPIGAGICASYQTQTNSPRRARSVASQSIIAYTMSLGAENSVAYSNNSIAIPTNFTISVTTEILPVSMTKTSVDCTMYICGDSTECSNLLLQYGSFCTQLNRALTGIAVEQDKNTQEVFAQVKQIYKTPPIKDFGGFNFSQILPDPSKPSKRSFIEDLLFNKVTLADAGFIKQYGDCLGDIAARDLICAQKFNGLTVLPPLLTDEMIAQYTSALLAGTITSGWTFGAGAALQIPFAMQMAYRFNGIGVTQCVLYENQKLIANQFNSAIGKIQDSLSSTASALGKLQDVVNQNAQALNTLVKQLSSNFGAISSVLNDILSRLDKVEAEVQIDRLITGRLQSLQTYVTQQLIRAAEIRASANLAATKMSECVLGQSKRVDFCGKGYHLMSFPQSAPHGVVFLHVTYVPAQEKNFTTAPAICHDGKAHFPREGVFVSNGTHWFVTQRNFYEPQIITTDNTFVCGNCDVVIGIVNNTVYDPLQPELDS

SEQ ID NO: 13457 - protein, 1147 aa, Artificial Sequence
  SARS-CoV-2/Sweden/01/2020__EPI_ISL_411951 spike protein (1-1147)(N914C_S1123C)
MFVFLVLLPLVSSQCVNLTTRTQLPPAYTNSFTRGVYYPDKVFRSSVLHSTQDLFLPFFSNVTWFHAIHVSGTNGTKRFDNPVLPFNDGVYFASTEKSNIIRGWIFGTTLDSKTQSLLIVNNATNVVIKVCEFQFCNDPFLGVYYHKNNKSWMESEFRVYSSANNCTFEYVSQPFLMDLEGKQGNFKNLREFVFKNIDGYFKIYSKHTPINLVRDLPQGFSALEPLVDLPIGINITRFQTLLALHRSYLTPGDSSSGWTAGAAAYYVGYLQPRTFLLKYNENGTITDAVDCALDPLSETKCTLKSFTVEKGIYQTSNFRVQPTESIVRFPNITNLCPFGEVFNATRFASVYAWNRKRISNCVADYSVLYNSASFSTFKCYGVSPTKLNDLCFTNVYADSFVIRGDEVRQIAPGQTGKIADYNYKLPDDFTGCVIAWNSNNLDSKVGGNYNYLYRLFRKSNLKPFERDISTEIYQAGSTPCNGVEGFNCYFPLQSYGFQPTNGVGYQPYRVVVLSFELLHAPATVCGPKKSTNLVKNKCVNFNFNGLTGTGVLTESNKKFLPFQQFGRDIADTTDAVRDPQTLEILDITPCSFGGVSVITPGTNTSNQVAVLYQDVNCTEVPVAIHADQLTPTWRVYSTGSNVFQTRAGCLIGAEHVNNSYECDIPIGAGICASYQTQTNSPRRARSVASQSIIAYTMSLGAENSVAYSNNSIAIPTNFTISVTTEILPVSMTKTSVDCTMYICGDSTECSNLLLQYGSFCTQLNRALTGIAVEQDKNTQEVFAQVKQIYKTPPIKDCGGFNFSQILPDPSKPSKRSFIEDLLFNKVTLADAGFIKQYGDCLGDIAARDLICAQKFNGLTVLPPLLTDEMIAQYTSALLAGTITSGWTFGAGAALQIPFAMQMAYRFNGIGVTQCVLYENQKLIANQFNSAIGKIQDSLSSTASALGKLQDVVNQNAQALNTLVKQLSSNFGAISSVLNDILSRLDKVEAEVQIDRLITGRLQSLQTYVTQQLIRAAEIRASANLAATKMSECVLGQSKRVDFCGKGYHLMSFPQSAPHGVVFLHVTYVPAQEKNFTTAPAICHDGKAHFPREGVFVSNGTHWFVTQRNFYEPQIITTDNTFVCGNCDVVIGIVNNTVYDPLQPELDS

SEQ ID NO: 13458 - protein, 1147 aa, Artificial Sequence
  SARS-CoV-2/Tianmen/HBCDC-HB-07/2020__EPI_ISL_412983 spike protein (1-1147)(N914C_S1123C)
MFVFLVLLPLVSSQCVNLTTRTQLPPAYTNSFTRGVYYPDKVFRSSVLHSTQDLFLPFFSNVTWFHAIHVSGTNGTKRFDNPVLPFNDGVYFASTEKSNIIRGWIFGTTLDSKTQSLLIVNNATNVVIKVCEFQFCNDPFLGVYYHKNNKSWMESEFRVYSSANNCTFEYVSQPFLMDLEGKQGNFKNLREFVFKNIDGYFKIYSKHTPINLVRDLPQGFSALEPLVDLPIGINITRFQTLLALHRSYLTPGDSSSGWTAGAAAYYVGYLQPRTFLLKYNENGTITDAVDCALDPLSETKCTLKSFTVEKGIYQTSNFRVQPTESIVRFPNITNLCPFGEVFNATRFASVYAWNRKRISNCVADYSVLYNSASFSTFKCYGVSPTKLNDLCFTNVYADSFVIRGDEVRQIAPGQTGKIADYNYKLPDDFTGCVIAWNSNNLDSKVGGNYNYLYRLFRKSNLKPFERDISTEIYQAGSTPCNGVEGFNCYFPLQSYGFQPTNGVGYQPYRVVVLSFELLHAPATVCGPKKSTNLVKNKCVNFNFNGLTGTGVLTESNKKFLPFQQFGRDIADTTDAVRDPQTLEILDITPCSFGGVSVITPGTNTSNQVAVLYQDLNCTEVPVAIHADQLTPTWRVYSTGSNVFQTRAGCLIGAEHVNNSYECDIPIGAGICASYQTQTNSPRRARSVASQSIIAYTMSLGAENSVAYSNNSIAIPTNFTISVTTEILPVSMTKTSVDCTMYICGDSTECSNLLLQYGSFCTQLNRALTGIAVEQDKNTQEVFAQVKQIYKTPPIKDFGGFNFSQILPDPSKPSKRSFIEDLLFNKVTLADAGFIKQYGDCLGDIAARDLICAQKFNGLTVLPPLLTDEMIAQYTSALLAGTITSGWTFGAGAALQIPFAMQMAYRFNGIGVTQCVLYENQKLIANQFNSAIGKIQDSLSSTASALGKLQDVVNQNAQALNTLVKQLSSNFGAISSVLNDILSRLDKVEAEVQIDRLITGRLQSLQTYVTQQLIRAAEIRASANLAATKMSECVLGQSKRVDFCGKGYHLMSFPQSAPHGVVFLHVTYVPAQEKNFTTAPAICHDGKAHFPREGVFVSNGTHWFVTQRNFYEPQIITTDNTFVCGNCDVVIGIVNNTVYDPLQPELDS

SEQ ID NO: 13459 - protein, 1147 aa, Artificial Sequence
  SARS-CoV-2/Hong Kong/case42_VM20002493/2020__EPI_ISL_414527 spike protein (1-1147)(N914C_S1123C)
MFVFLVLLPLVSSQCVNLTTRTQLPPAYTNSFTRGVYYPDKVFRSSVLHSTQDLFLPFFSNVTWFHAIHVSGTNGTKRFDNPVLPFNDGVYFASTEKSNIIRGWIFGTTLDSKTQSLLIVNNATNVVIKVCEFQFCNDPFLGVYYHKNNKSWMESEFRVYSSANNCTFEYVSQPFLMDLEGKQGNFKNLREFVFKNIDGYFKIYSKHTPINLVRDLPQGFSALEPLVDLPIGINITRFQTLLALHRSYLTPGDSSSGWTAGAAAYYVGYLQPRTFLLKYNENGTITDAVDCALDPLSETKCTLKSFTVEKGIYQTSNFRVQPTESIVRFPNITNLCPFGEVFNATRFASVYAWNRKRISNCVADYSVLYNSASFSTFKCYGVSPTKLNDLCFTNVYADSFVIRGDEVRQIAPGQTGKIADYNYKLPDDFTGCVIAWNSNNLDSKVGGNYNYLYRLFRKSNLKPFERDISTEIYQAGSTPCNGVEGFNCYFPLQSYGFQPTNGVGYQPYRVVVLSFELLHAPATVCGPKKSTNLVKNKCVNFNFNGLTGTGVLTESNKKFLPFQQFGRDIADTTDAVRDPQTLEILDITPCSFGGVSVITPGTNTSNQVAVLYQDVNCTEVPVAIHADQLTPTWRVYSTGSNVFQTRAGCLIGAEHVNNSYECDIPIGAGICASYQTQTNSPRRARSVASQSIIAYTMSLGAENSVAYSNNSIAIPTNFAISVTTEILPVSMTKTSVDCTMYICGDSTECSNLLLQYGSFCTQLNRALTGIAVEQDKNTQEVFAQVKQIYKTPPIKDFGGFNFSQILPDPSKPSKRSFIEDLLFNKVTLADAGFIKQYGDCLGDIAARDLICAQKFNGLTVLPPLLTDEMIAQYTSALLAGTITSGWTFGAGAALQIPFAMQMAYRFNGIGVTQCVLYENQKLIANQFNSAIGKIQDSLSSTASALGKLQDVVNQNAQALNTLVKQLSSNFGAISSVLNDILSRLDKVEAEVQIDRLITGRLQSLQTYVTQQLIRAAEIRASANLAATKMSECVLGQSKRVDFCGKGYHLMSFPQSAPHGVVFLHVTYVPAQEKNFTTAPAICHDGKAHFPREGVFVSNGTHWFVTQRNFYEPQIITTDNTFVCGNCDVVIGIVNNTVYDPLQPELDS

SEQ ID NO: 13460 - protein, 1147 aa, Artificial Sequence
  SARS-CoV-2/USA/CruiseA-23/2020__EPI_ISL_414482 spike protein (1-1147)(N914C_S1123C)
MFVFLVLLPLVSSQCVNLTTRTQLPPAYTNSFTRGVYYPDKVFRSSVLHSTQDLFLPFFSNVTWFHAIHVSGTNGTKRFDNPVLPFNDGVYFASTEKSNIIRGWIFGTTLDSKTQSLLIVNNATNVVIKVCEFQFCNDPFLGVYYHKNNKSWMESEFRVYSSANNCTFEYVSQPFLMDLEVKQGNFKNLREFVFKNIDGYFKIYSKHTPINLVRDLPQGFSALEPLVDLPIGINITRFQTLLALHRSYLTPGDSSSGWTAGAAAYYVGYLQPRTFLLKYNENGTITDAVDCALDPLSETKCTLKSFTVEKGIYQTSNFRVQPTESIVRFPNITNLCPFGEVFNATRFASVYAWNRKRISNCVADYSVLYNSASFSTFKCYGVSPTKLNDLCFTNVYADSFVIRGDEVRQIAPGQTGKIADYNYKLPDDFTGCVIAWNSNNLDSKVGGNYNYLYRLFRKSNLKPFERDISTEIYQAGSTPCNGVEGFNCYFPLQSYGFQPTNGVGYQPYRVVVLSFELLHAPATVCGPKKSTNLVKNKCVNFNFNGLTGTGVLTESNKKFLPFQQFGRDIADTTDAVRDPQTLEILDITPCSFGGVSVITPGTNTSNQVAVLYQDVNCTEVPVAIHADQLTPTWRVYSTGSNVFQTRAGCLIGAEHVNNSYECDIPIGAGICASYQTQTNSPRRARSVASQSIIAYTMSLGAENSVAYSNNSIAIPTNFTISVTTEILPVSMTKTSVDCTMYICGDSTECSNLLLQYGSFCTQLNRALTGIAVEQDKNTQEVFAQVKQIYKTPPIKDFGGFNFSQILPDPSKPSKRSFIEDLLFNKVTLADAGFIKQYGDCLGDIAARDLICAQKFNGLTVLPPLLTDEMIAQYTSALLAGTITSGWTFGAGAALQIPFAMQMAYRFNGIGVTQCVLYENQKLIANQFNSAIGKIQDSLSSTASALGKLQDVVNQNAQALNTLVKQLSSNFGAISSVLNDILSRLDKVEAEVQIDRLITGRLQSLQTYVTQQLIRAAEIRASANLAATKMSECVLGQSKRVDFCGKGYHLMSFPQSAPHGVVFLHVTYVPAQEKNFTTAPAICHDGKAHFPREGVFVSNGTHWFVTQRNFYEPQIITTDNTFVCGNCDVVIGIVNNTVYDPLQPELDS

SEQ ID NO: 13461 - protein, 1147 aa, Artificial Sequence
  SARS-CoV-2/Hong Kong/case85_VM20002868/2020__EPI_ISL_414519 spike protein (1-1147)(N914C_S1123C)
MFVFLVLVPLVSSQCVNLTTRTQLPPAYTNSFTRGVYYPDKVFRSSVLHSTQDLFLPFFSNVTWFHAIHVSGTNGTKRFDNPVLPFNDGVYFASTEKSNIIRGWIFGTTLDSKTQSLLIVNNATNVVIKVCEFQFCNDPFLGVYYHKNNKSWMESEFRVYSSANNCTFEYVSQPFLMDLEGKQGNFKNLREFVFKNIDGYFKIYSKHTPINLVRDLPQGFSALEPLVDLPIGINITRFQTLLALHRSYLTPGDSSSGWTAGAAAYYVGYLQPRTFLLKYNENGTITDAVDCALDPLSETKCTLKSFTVEKGIYQTSNFRVQPTESIVRFPNITNLCPFGEVFNATRFASVYAWNRKRISNCVADYSVLYNSASFSTFKCYGVSPTKLNDLCFTNVYADSFVIRGDEVRQIAPGQTGKIADYNYKLPDDFTGCVIAWNSNNLDSKVGGNYNYLYRLFRKSNLKPFERDISTEIYQAGSTPCNGVEGFNCYFPLQSYGFQPTNGVGYQPYRVVVLSFELLHAPATVCGPKKSTNLVKNKCVNFNFNGLTGTGVLTESNKKFLPFQQFGRDIADTTDAVRDPQTLEILDITPCSFGGVSVITPGTNTSNQVAVLYQDVNCTEVPVAIHADQLTPTWRVYSTGSNVFQTRAGCLIGAEHVNNSYECDIPIGAGICASYQTQTNSPRRARSVASQSIIAYTMSLGAENSVAYSNNSIAIPTNFTISVTTEILPVSMTKTSVDCTMYICGDSTECSNLLLQYGSFCTQLNRALTGIAVEQDKNTQEVFAQVKQIYKTPPIKDFGGFNFSQILPDPSKPSKRSFIEDLLFNKVTLADAGFIKQYGDCLGDIAARDLICAQKFNGLTVLPPLLTDEMIAQYTSALLAGTITSGWTFGAGAALQIPFAMQMAYRFNGIGVTQCVLYENQKLIANQFNSAIGKIQDSLSSTASALGKLQDVVNQNAQALNTLVKQLSSNFGAISSVLNDILSRLDKVEAEVQIDRLITGRLQSLQTYVTQQLIRAAEIRASANLAATKMSECVLGQSKRVDFCGKGYHLMSFPQSAPHGVVFLHVTYVPAQEKNFTTAPAICHDGKAHFPREGVFVSNGTHWFVTQRNFYEPQIITTDNTFVCGNCDVVIGIVNNTVYDPLQPELDS

SEQ ID NO: 13462 - protein, 1147 aa, Artificial Sequence; identical to SEQ ID NO: 13452
  SARS-CoV-2/England/200990660/2020__EPI_ISL_414523 spike protein (1-1147)(N914C_S1123C)

SEQ ID NO: 13463 - protein, 1147 aa, Artificial Sequence
  SARS-CoV-2/Australia/NSW09/2020__EPI_ISL_413595 spike protein (1-1147)(N914C_S1123C)
MFVFLVLLPLVSSQCVNLTTRTQLPPAYTNSFTRGVYYPDKVFRSSVLHSTQDLFLPFFSNVTWFHAIHVSGTNGTKRFDNPVLPFNDGVYFASTEKSNIIRGWIFGTTLDSKTQSLLIVNNATNVVIKVCEFQFCNDPFLGVYYHKNNKSWMESEFRVYSSANNCTFEYVSQPFLMDLEGKQGNFKNLREFVFKNIDGYFKIYSKHTPINLVRDLPQGFSALEPLVDLPIGINITRFQTLLALHRSYLTPGDSSSGWTAGAAAYYVGYLQPRTFLLKYNENGTITDAVDCALDPLSETKCTLKSFTVEKGIYQTSNFRVQPTESIVRFPNITNLCPFGEVFNATRFASVYAWNRKRISNCVADYSVLYNSASFSTFKCYGVSPTKLNDLCFTNVYADSFVIRGDEVRQIAPGQTGKIADYNYKLPDDFTGCVIAWNSNNLDSKVGGNYNYLYRLFRKSNLKPFERDISTEIYQAGSTPCNGVEGFNCYFPLQSYGFQPTNGVGYQPYRVVVLSFELLHAPATVCGPKKSTNLVKNKCVNFNFNGLTGTGVLTESNKKFLPFQQFGRDIADTTDAVRDPQTLEILDITPCSFGGVSVITPGTNTSNQVAVLYQDVNCTEVPVAIHADQLTPTWRVYSTGSNVFQTRAGCLIGAEHVNNSYECDIPIGAGICASYQTQTNSPRRARSVASQSIIAYTMSLGAENSVAYSNNSIAIPTNFTISVTTEILPVSMTKTSVDCTMYICGDSTECSNLLLQYGSFCTQLNRALTGIAVEQDKNTQEVFAQVKQIYKTPPIKDFGGFNFSQILPDPSKPSKRSFIEDLLFNKVTLADAGFIKQYGDCLGDIAARDLICAQKFNGLTVLPPLLTDEMIAQYTSALLAGTITSGWTFGAGAALQIPFAMQMAYRFNGIGVTQCVLYENQKLIANQFNSAIGKIQDSLSFTASALGKLQDVVNQNAQALNTLVKQLSSNFGAISSVLNDILSRLDKVEAEVQIDRLITGRLQSLQTYVTQQLIRAAEIRASANLAATKMSECVLGQSKRVDFCGKGYHLMSFPQSAPHGVVFLHVTYVPAQEKNFTTAPAICHDGKAHFPREGVFVSNGTHWFVTQRNFYEPQIITTDNTFVCGNCDVVIGIVNNTVYDPLQPELDS

SEQ ID NO: 13464 - protein, 1147 aa, Artificial Sequence; identical to SEQ ID NO: 13444
  SARS-CoV-2/Australia/NSW10/2020__EPI_ISL_413596 spike protein (1-1147)(N914C_S1123C)

SEQ ID NO: 13465 - protein, 1147 aa, Artificial Sequence
  SARS-CoV-2/Switzerland/1000477797/2020__EPI_ISL_413023 spike protein (1-1147)(N914C_S1123C)
MFVFLVLLPLVSSQCVNLTTRTQLPPAYTNSFTRGVYYPDKVFRSSVLHSTQDLFLPFFSNVTWFHAIHVSGTNGTKRFDNPVLPFNDGVYFASTEKSNIIRGWIFGTTLDSKTQSLLIVNNATNVVIKVCEFQFCNDPFLGVYYHKNNKSWMESEFRVYSSANNCTFEYVSQPFLMDLEGKQGNFKNLREFVFKNIDGYFNIYSKHTPINLVRDLPQGFSALEPLVDLPIGINITRFQTLLALHRSYLTPGDSSSGWTAGAAAYYVGYLQPRTFLLKYNENGTITDAVDCALDPLSETKCTLKSFTVEKGIYQTSNFRVQPTESIVRFPNITNLCPFGEVFNATRFASVYAWNRKRISNCVADYSVLYNSASFSTFKCYGVSPTKLNDLCFTNVYADSFVIRGDEVRQIAPGQTGKIADYNYKLPDDFTGCVIAWNSNNLDSKVGGNYNYLYRLFRKSNLKPFERDISTEIYQAGSTPCNGVEGFNCYFPLQSYGFQPTNGVGYQPYRVVVLSFELLHAPATVCGPKKSTNLVKNKCVNFNFNGLTGTGVLTESNKKFLPFQQFGRDIADTTDAVRDPQTLEILDITPCSFGGVSVITPGTNTSNQVAVLYQGVNCTEVPVAIHADQLTPTWRVYSTGSNVFQTRAGCLIGAEHVNNSYECDIPIGAGICASYQTQTNSPRRARSVASQSIIAYTMSLGAENSVAYSNNSIAIPTNFTISVTTEILPVSMTKTSVDCTMYICGDSTECSNLLLQYGSFCTQLNRALTGIAVEQDKNTQEVFAQVKQIYKTPPIKDFGGFNFSQILPDPSKPSKRSFIEDLLFNKVTLADAGFIKQYGDCLGDIAARDLICAQKFNGLTVLPPLLTDEMIAQYTSALLAGTITSGWTFGAGAALQIPFAMQMAYRFNGIGVTQCVLYENQKLIANQFNSAIGKIQDSLSSTASALGKLQDVVNQNAQALNTLVKQLSSNFGAISSVLNDILSRLDKVEAEVQIDRLITGRLQSLQTYVTQQLIRAAEIRASANLAATKMSECVLGQSKRVDFCGKGYHLMSFPQSAPHGVVFLHVTYVPAQEKNFTTAPAICHDGKAHFPREGVFVSNGTHWFVTQRNFYEPQIITTDNTFVCGNCDVVIGIVNNTVYDPLQPELDS

SEQ ID NO: 13466 - protein, 1147 aa, Artificial Sequence
  SARS-CoV-2/Belgium/BA-02291/2020__EPI_ISL_415159 spike protein (1-1147)(N914C_S1123C)
MFVFLVLLPLVSSQCVNLTTRTQLPPAYTNSFTRGVYYPDKVFRSSVLHSTQDLFLPFFSNVTWFHAIHVSGTNGTKRFDNPVLPFNDGVYFASTEKSNIIRGWIFGTTLDSKTQSLLIVNNATNVVIKVCEFQFCNDPFLGVYYHKNNKSWMESEFRVYSSANNCTFEYVSQPFLMDLEGKQGNFKNLREFVFKNIDGYFKIYSKHTPINLVRDLPQGFSALEPLVDLPIGINITRFQTLLALHRSYLTPGDSSSGWTAGAAAYYVGYLQPRTFLLKYNENGTITDAVDCALDPLSETKCTLKSFTVEKGIYQTSNFRVQPTESIVRFPNITNLCPFGEVFNATRFASVYAWNRKRISNCVADYSVLYNSASFSTFKCYGVSPTKLNDLCFTNVYADSFVIRGDEVRQIAPGQTGKIADYNYKLPDDFTGCVIAWNSNNLDSKVGGNYNYLYRLFRRSNLKPFERDISTEIYQAGSTPCNGVEGFNCYFPLQSYGFQPTNGVGYQPYRVVVLSFELLPAPATVCGPKKSTNLVKNKCVNFNFNGLTGTGVLTESNKKFLPFQQFGRDIADTTDAVRDPQTLEILDITPCSFGGVSVITPGTNTSNQVAVLYQGVNCTEVPVAIHADQLTPTWRVYSTGSNVFQTRAGCLIGAEHVNNSYECDIPIGAGICASYQTQTNSPRRARSVASQSIIAYTMSLGAENSVAYSNNSIAIPTNFTISVTTEILPVSMTKTSVDCTMYICGDSTECSNLLLQYGSFCTQLNRALTGIAVEQDKNTQEVFAQVKQIYKTPPIKDFGGFNFSQILPDPSKPSKRSFIEDLLFNKVTLADAGFIKQYGDCLGDIAARDLICAQKFNGLTVLPPLLTDEMIAQYTSALLAGTITSGWTFGAGAALQIPFAMQMAYRFNGIGVTQCVLYENQKLIANQFNSAIGKIQDSLSSAAPALGKLQDVVNQNAQALNTLVKQLSSNFGAISSVLNDILSRLDKVEAEVQIDRLITGRLQSLQTYVTQQLIRAAEIRASANLAATKMSECVLGQSKRVDFCGKGYHLMSFPQSAPHGVVFLHVTYVPAQEKNFTTAPAICHDGKAHFPREGVFVSNGTHWFVTQRNFYEPQIITTDNTFVCGNCDVVIGIVNNTVYDPLQPELDS

SEQ ID NO: 13467 - protein, 1147 aa, Artificial Sequence
  SARS-CoV-2/USA/WA8-UW5/2020__EPI_ISL_413486 spike protein (1-1147)(N914C_S1123C)
MFVFLVLLPLVSSQCVNLTTRTQLPPAYTNSFTRGVYYPDKVFRSSVLHSTQDLFLPFFSNVTWFHAIHVSGTNGTKRFDNPVLPFNDGVYFASTEKSNIIRGWIFGTTLDSKTQSLLIVNNATNVVIKVCEFQFCNDPFLGVYYHKNNKSWMESEFRVYSSANNCTFEYVSQPFLMDLEGKQGNFKNLREFVFKNIDGYFKIYSKHTPINLVRDLPQGFSALEPLVDLPIGINITRFQTLLALHRSYLTPGDSSSGWTAGAAAYYVGYLQPRTFLLKYNENGTITDAVDCALDPLSETKCTLKSFTVEKGIYQTSNFRVQPTESIVRFPNITNLCPFGEVFNATRFASVYAWNRKRISNCVADYSVLYNSASFSTFKCYGVSPTKLNDLCFTNVYADSFVIRGDEVRQIAPGQTGKIADYNYKLPDDFTGCVIAWNSNNLDSKVGGNYNYLYRLFRKSNLKPFERDISTEIYQAGSTPCNGVEGFNCYFPLQSYGFQPTNGVGYQPYRVVVLSFELLHAPATVCGPKKSTNLVKNKCVNFNFNGLTGTGVLTESNKKFLPFQQFGRDIADTTDAVRDPQTLEILDITPCSFGGVSVITPGTNTSNQVAVLYQDVNCTEVPVAIHADQLTPTWRVYSTGSNVFQTRAGCLIGAEYVNNSYECDIPIGAGICASYQTQTNSPRRARSVASQSIIAYTMSLGAENSVAYSNNSIAIPTNFTISVTTEILPVSMTKTSVDCTMYICGDSTECSNLLLQYGSFCTQLNRALTGIAVEQDKNTQEVFAQVKQIYKTPPIKDFGGFNFSQILPDPSKPSKRSFIEDLLFNKVTLADAGFIKQYGDCLGDIAARDLICAQKFNGLTVLPPLLTDEMIAQYTSALLAGTITSGWTFGAGAALQIPFAMQMAYRFNGIGVTQCVLYENQKLIANQFNSAIGKIQDSLSSTASALGKLQDVVNQNAQALNTLVKQLSSNFGAISSVLNDILSRLDKVEAEVQIDRLITGRLQSLQTYVTQQLIRAAEIRASANLAATKMSECVLGQSKRVDFCGKGYHLMSFPQSAPHGVVFLHVTYVPAQEKNFTTAPAICHDGKAHFPREGVFVSNGTHWFVTQRNFYEPQIITTDNTFVCGNCDVVIGIVNNTVYDPLQPELDS

SEQ ID NO: 13468 - protein, 1147 aa, Artificial Sequence
  SARS-CoV-2/England/20102000506/2020__EPI_ISL_415147 spike protein (1-1147)(N914C_S1123C)
MFVFLVLLPLVSSQCVNLTTRTQLPPAYTNSFTRGVYYPDKVFRSSVLHSTQDLFLPFFSNVTWFHAIHVSGTNGTKRFDNPVLPFNDGVYFASTEKSNIIRGWIFGTTLDSKTQSLLIVNNATNVVIKVCEFQFCNDPFLGVYYHKNNKSWMESEFRVYSSANNCTFEYVSQPFLMDLEGKQGNFKNLREFVFKNIDGYFKIYSKHTPINLVRDLPQGFSALEPLVDLPIGINITRFQTLLALHRSYLTPGDSSSGWTAGAAAYYVGYLQPRTFLLKYNENGTITDAVDCALDPLSETKCTLKSFTVEKGIYQTSNFRVQPTESIVRFPNITNLCPFGEVFNATRFASVYAWNRKRISNCVADYSVLYNSASFSTFKCYGVSPTKLNDLCFTNVYADSFVIRGDEVRQIAPGQTGKIADYNYKLPDDFTGCVIAWNSNNLDSKVGGNYNYLYRLFRKSNLKPFERDISTEIYQAGSTPCNGVEGFNCYFPLQSYGFQPTNGVGYQPYRVVVLSFELLHAPATVCGPKKSTNLVKNKCVNFNFNGLTGTGVLTESNKKFLPFQQFGRDIADTTDAVRDPQTLEILDITPCSFGGVSVITPGTNTSNQVAVLYQGVNCTEVPVAIHADQLTPTWRVYSTGSNVFQTRAGCLIGAEHVNNSYECDIPIGAGICASYQTQTNSPRRARSVASQSIIAYTMSLGAENSVAYSNNSIAIPTNFTISVTTEILPVSMTKTSVDCTMYICGDSTECSNLLLQYGSFCTQLNRALTGIAVEQDKNTQEVFAQVKQIYKTPPIKDFGGFNFSQILPDPSKPSKRSFIEDLLFNKVTLADAGFIKQYGYCLGDIAARDLICAQKFNGLTVLPPLLTDEMIAQYTSALLAGTITSGWTFGAGAALQIPFAMQMAYRFNGIGVTQCVLYENQKLIANQFNSAIGKIQDSLSSTASALGKLQDVVNQNAQALNTLVKQLSSNFGAISSVLNDILSRLDKVEAEVQIDRLITGRLQSLQTYVTQQLIRAAEIRASANLAATKMSECVLGQSKRVDFCGKGYHLMSFPQSAPHGVVFLHVTYVPAQEKNFTTAPAICHDGKAHFPREGVFVSNGTHWFVTQRNFYEPQIITTDNTFVCGNCDVVIGIVNNTVYDPLQPELDS

SEQ ID NO: 13469 - protein, 1147 aa, Artificial Sequence
  SARS-CoV-2/Belgium/VAG-03013/2020__EPI_ISL_415155 spike protein (1-1147)(N914C_S1123C)
MFVFLVLLPLVSSQCVNLTTRTQLPPAYTNSFTRGVYYPDKVFRSSVLHSTQDLFLPFFSNVTWFHAIHVSGTNGTKRFDNPVLPFNDGVYFASTEKSNIIRGWIFGTTLDSKTQSLLIVNNATNVVIKVCEFQFCNDPFLGVYYHKNNKSWMESEFRVYSSANNCTFEYVSQPFLMDLEGKQGNFKNLREFVFKNIDGYFKIYSKHTPINLVRDLPQGFSALEPLVDLPIGINITRFQTLLALHRSYLTPGDSSSGWTAGAAAYYVGYLQPRTFLLKYNENGTITDAVDCALDPLSETKCTLKSFTVEKGIYQTSNFRVQPTESIVRFPNITNLCPFGEVFNATRFASVYAWNRKRISNCVADYSVLYNSASFSTFKCYGVSPTKLNDLCFTNVYADSFVIRGDEVRQIAPGQTGKIADYNYKLPDDFTGCVIAWNSNNLDSKVGGNYNYLYRLFRKSNLKPFERDISTEIYQAGSTPCNGVEGFNCYFPLQSYGFQPTNGVGYQPYRVVVLSFELLHAPATVCGPKKSTNLVKNKCVNFNFNGLTGTGVLTESNKKFLPFQQFGRDIADTTDAVRDPQTLEILDITPCSFGGVSVITPGTNTSNQVAVLYQGVNCTEVPVAIHADQLTPTWRVYSTGSNVFQTRAGCLIGAEHVNNSYECDIPIGAGICASYQTQTNSPRRARSVASQSIIAYTMSLGAENSVAYSNNSIAIPTNFTISVTTEILPVSMTKTSVDCTMYICGDSTECSNLLLQYGSFCTQLNRALTGIAVEQDKNTQEVFAQVKQIYKTPPIKDFGGFNFSQILPDPSKPSKRSFIEDLLFNKVTLADAGFIKQYGDCLGDIAARDLICAQKFNGLTVLPPLLTDEMIAQYTSALLAGTITSGWTFGAGAALQIPFAMQMAYRFNGIGVTQCVLYENQKLIANQFNSAIGKIQDSLSSTATALGKLQDVVNQNAQALNTLVKQLSSNFGAISSVLNDILSRLDKVEAEVQIDRLITGRLQSLQTYVTQQLIRAAEIRASANLAATKMSECVLGQSKRVDFCGKGYHLMSFPQSAPHGVVFLHVTYVPAQEKNFTTAPAICHDGKAHFPREGVFVSNGTHWFVTQRNFYEPQIITTDNTFVCGNCDVVIGIVNNTVYDPLQPELDS

SEQ ID NO: 13470 - protein, 1147 aa, Artificial Sequence
  SARS-CoV-2/Belgium/BC-03016/2020__EPI_ISL_415157 spike protein (1-1147)(N914C_S1123C)
MFVFLVLLPLVSSQCVNLTTRTQLPPAYTNSFTRGVYYPDKVFRSSVLHSTQDLFLPFFSNVTWFHAIHVSGTNGTKRFDNPVLPFNDGVYFASTEKSNIIRGWIFGTTLDSKTQSLLIVNNATNVVIKVCEFQFCNDPFLGVYYHKNNKSWMESEFRVYSSANNCTFEYVSQPFLMDLEGKQGNFKNLREFVFKNIDGYFKIYSKHTPINLVRDLPQGFSALEPLVDLPIGINITRFQTLLALHRSYLTPGDSSSGWTAGAAAYYVGYLQPRTFLLKYNENGTITDAVDCALDPLSETKCTLKSFTVEKGIYQTSNFRVQPTESIVRFPNITNLCPFGEVFNATRFASVYAWNRKRISNCVADYSVLYNSASFSTFKCYGVSPTKLNDLCFTNVYADSFVIRGDEVRQIAPGQTGKIADYNYKLPDDFTGCVIAWNSNNLDSKVGGNYNYLYRLFRKSNLKPFERDISTEIYQAGSTPCNGVEGFNCYFPLQSYGFQPTNGVGYQPYRVVVLSFELLHAPATVCGPKKSTNLVKNKCVNFNFNGLTGTGVLTESNKKFLPFQQFGRDIADTTDAVRDPQTLEILDITPCSFGGVSVITPGTNTSNQVAVLYQGVNCTEVPVAIHADQLTPTWRVYSTGSNVFQTRAGCLIGAEHVNNSYECDIPIGAGICASYQTQTNSPRRARSVASQSIIAYTMSLGAENSVAYSNNSIAIPTNFTISVTTEILPVSMTKTSVDCTMYICGDSTECSNLLLQYGSFCTQLNRALTGIAVEQDKNTQEVFAQVKQIYKTPPIKDFGGFNFSQILPDPSKPSKRSFIEDLLFNKVTLADAGFIKQYGDCLGDIAARDLICAQKFNGLTVLPPLLTDEMIAQYTSALLAGTITSGWTFGAGAALQIPFAMQMAYRFNGIGVTQCVLYENQKLIANQFNSAIGKIQDSLSSTAPALGKLQDVVNQNAQALNTLVKQLSSNFGAISSVLNDILSRLDKVEAEVQIDRLITGRLQSLQTYVTQQLIRAAEIRASANLAATKMSECVLGQSKRVDFCGKGYHLMSFPQSAPHGVVFLHVTYVPAQEKNFTTAPAICHDGKAHFPREGVFVSNGTHWFVTQRNFYEPQIITTDNTFVCGNCDVVIGIVNNTVYDPLQPELDS

SEQ ID NO: 13471 - protein, 1147 aa, Artificial Sequence
  SARS-CoV-2/Germany/BavPat3/2020__EPI_ISL_414521 spike protein (1-1147)(N914C_S1123C)
MFVFLVLLPLVSSQCVNLTTRTQLPPAYTNSFTRGVYYPDKVFRSSVLHSTQDLFLPFFSNVTWFHAIHVSGTNGTKRFDNPVLPFNDGVYFASTEKSNIIRGWIFGTTLDSKTQSLLIVNNATNVVIKVCEFQFCNDPFLGVYYHKNNKSWMESEFRVYSSANNCTFEYVSQPFLMDLEGKQGNFKNLREFVFKNIDGYFKIYSKHTPINLVRDLPQGFSALEPLVDLPIGINITRFQTLLALHRSYLTPGDSSSGWTAGAAAYYVGYLQPRTFLLKYNENGTITDAVDCALDPLSETKCTLKSFTVEKGIYQTSNFRVQPTESIVRFPNITNLCPFGEVFNATRFASVYAWNRKRISNCVADYSVLYNSASFSTFKCYGVSPTKLNDLCFTNVYADSFVIRGDEVRQIAPGQTGKIADYNYKLPDDFTGCVIAWNSNNLDSKVGGNYNYLYRLFRKSNLKPFERDISTEIYQAGSTPCNGVEGFNCYFPLQSYGFQPTNGVGYQPYRVVVLSFELLHAPATVCGPKKSTNLVKNKCVNFNFNGLTGTGVLTESNKKFLPFQQFGRDIADTTDAVRDPQTLEILDITPCSFGGVSVITPGTNTSNQVAVLYQDVNCTEVPVAIHADQLTPTWRVYSTGSNVFQTRAGCLIGAEHVNNSYECDIPIGAGICASYQTQTNSPRRARSVASQSIIAYTMSLGAENSVAYSNNSIAIPTNFTISVTTEILPVSMTKTSVDCTMYICGDSTECSNLLLQYGSFCTQLNRALTGIAVEQDKNTQQVFAQVKQIYKTPPIKDFGGFNFSQILPDPSKPSKRSFIEDLLFNKVTLADAGFIKQYGDCLGDIAARDLICAQKFNGLTVLPPLLTDEMIAQYTSALLAGTITSGWTFGAGAALQIPFAMQMAYRFNGIGVTQCVLYENQKLIANQFNSAIGKIQDSLSSTASALGKLQDVVNQNAQALNTLVKQLSSNFGAISSVLNDILSRLDKVEAEVQIDRLITGRLQSLQTYVTQQLIRAAEIRASANLAATKMSECVLGQSKRVDFCGKGYHLMSFPQSAPHGVVFLHVTYVPAQEKNFTTAPAICHDGKAHFPREGVFVSNGTHWFVTQRNFYEPQIITTDNTFVCGNCDVVIGIVNNTVYDPLQPELDS

SEQ ID NO: 13472 - protein, 1147 aa, Artificial Sequence
  SARS-CoV-2/France/HF1805/2020__EPI_ISL_414628 spike protein (1-1147)(N914C_S1123C)
MFVFLVLLPLVSSQCVNLTTRTQLPPAYTNSFTRGVYYPDKVFRSSVLHSTQDLFLPFFSNVTWFHAIHVSGTNGTKRFDNPVLPFNDGVYFASTEKSNIIRGWIFGTTLDSKTQSLLIVNNATNVVIKVCEFQFCNDPFLGVYYHKNNKSWMESEFRVYSSANNCTFEYVSQPFLMDLEGKQGNFKNLREFVFKNIDGYFKIYSKHTPINLVRDLPQGFSALEPLVDLPIGINITRFQTLLALHRSYLTPGDSSSGWTAGAAAYYVGYLQPRTFLLKYNENGTITDAVDCALDPLSETKCTLKSFTVEKGIYQTSNFRVQPTESIVRFPNITNLCPFGEVFNATRFASVYAWNRKRISNCVADYSVLYNSASFSTFKCYGVSPTKLNDLCFTNVYADSFVIRGDEVRQIAPGQTGKIADYNYKLPDDFTGCVIAWNSNNLDSKVGGNYNYLYRLFRKSNLKPFERDISTEIYQAGSTPCNGVEGFNCYFPLQSYGFQPTNGVGYQPYRVVVLSFELLHAPATVCGPKKSTNLVKNKCVNFNFNGLTGTGVLTESNKKFLPFQQFGRDIADTTDAVRDPQTLEILDITPCSFGGVSVITPGTNTSNQVAVLYQGVNCTEVPVAIHADQLTPTWRVYSTGSNVFQTRAGCLIGAEHVNNSYECDIPIGAGICASYQTQTNSPRRARSVASQSIIAYTMSLGAENSVAYSNNSIAIPTNFTISVTTEILPVSMTKTSVDCTMYICGDSTECSNLLLQYGSFCTQLNRALTGIAVEQDKNTQEVFAQVKQIYKTPPIKDFGGFNFSQILPDPSKPSKRSFIEDLLFNKVTLADAGFIKQYGDCLGDIAARDLICAQKFNGLTVLPPLLTDEMIAQYTSALLAGTITSGWTFGAGAALQIPFAMQMAYRFNGIGVTQCVLYENQKLIANQFNSAIGKIQDSLSSTASALGKLQDVVNQNAQALNTLVKQLSSNFGAISSVLNDILSRLDKVEAEVQIDRLITGRLQSLQTYVTQQLIRAAEIRASANLAATKMSECVLGQSKRVDFCGKGYHLMSFPQSAPHGVVFLHVTYVPAQEKNFTTAPAICHDGKAHFPREGVFVSNGTHWFVTQRNFYEPQIITTDNTFVCGNCDVVIGVVNNTVYDPLQPELDS

SEQ ID NO: 13473 - protein, 1147 aa, Artificial Sequence
  SARS-CoV-2/Netherlands/ZuidHolland_9/2020__EPI_ISL_414445 spike protein (1-1147)(N914C_S1123C)
MFVFLVLLPLVSSQCVNLTTRTQLPPAYTNSFTRGVYYPDKVFRSSVLHSTQDLFLPFFSNVTWFHAIHVSGTNGTKRFDNPVLPFNDGVYFASTEKSNIIRGWIFGTTLDSKTQSLLIVNNATNVVIKVCEFQFCNDPFLGVYYHKNNKSWMESEFRVYSSANNCTFEYVSQPFLMDLEGKQGNFKNLREFVFKNIDGYFKIYSKHTPINLVRDLPQGFSALEPLVDLPIGINITRFQTLLALHRSYLTPGDSSSGWTAGAAAYYVGYLQPRTFLLKYNENGTITDAVDCALDPLSETKCTLKSFTVEKGIYQTSNFRVQPTESIVRFPNITNLCPFGEVFNATRFASVYAWNRKRISNCVADYSVLYNSASFSTFKCYGVSPTKLNDLCFTNVYADSFVIRGDEVRQIAPGQTGKIADYNYKLPDDFTGCVIAWNSNNLDSKVGGNYNYLYRLFRKSNLKPFERDISTEIYQAGSTPCNGVEGFNCYFPLQSYGFQPTNGVGYQPYRVVVLSFELLHAPATVCGPKKSTNLVKNKCVNFNFNGLTGTGVLTESNKKFLPFQQFGRDIADTTDAVRDPQTLEILDITPCSFGGVSVITPGTNTSNQVAVLYQGVNCTEVPVAIHADQLTPTWRVYSTGSNVFQTRAGCLIGAEHVNNSYECDIPIGAGICASYQTQTNSPRRARSVASQSIIAYTMSLGAENSVAYSNNSIAIPTNFTISVTTEILPVSMTKTSVDCTMYICGDSTECSNLLLQYGSFCTQLNRALTGIAVEQDKNTQEVFAQVKQIYKTPPIKDFGGFNFSQILPDPSKPSKRSFIEDLLFNKVTLADAGFIKQYGDCLGDIAARDLICVQKFNGLTVLPPLLTDEMIAQYTSALLAGTITSGWTFGAGAALQIPFAMQMAYRFNGIGVTQCVLYENQKLIANQFNSAIGKIQDSLSSTASALGKLQDVVNQNAQALNTLVKQLSSNFGAISSVLNDILSRLDKVEAEVQIDRLITGRLQSLQTYVTQQLIRAAEIRASANLAATKMSECVLGQSKRVDFCGKGYHLMSFPQSAPHGVVFLHVTYVPAQEKNFTTAPAICHDGKAHFPREGVFVSNGTHWFVTQRNFYEPQIITTDNTFVCGNCDVVIGIVNNTVYDPLQPELDS

SEQ ID NO: 13474 - protein, 1147 aa, Artificial Sequence
  SARS-CoV-2/Finland/FIN03032020A/2020__EPI_ISL_413602 spike protein (1-1147)(N914C_S1123C)
MFVFLVLLPLVSSQCVNLTTRTQLPPAYTNSFTRGVYYPDKVFRSSVLHSTQDLFLPFFSNVTWFHAIHVSGTNGTKRFDNPVLPFNDGVYFASTEKSNIIRGWIFGTTLDSKTQSLLIVNNATNVVIKVCEFQFCNDPFLGVYYHKNNKSWMESEFRVYSSANNCTFEYVSQPFLMDLEGKQGNFKNLREFVFKNIDGYFKIYSKHTPINLVRDLPQGFSALEPLVDLPIGINITRFQTLLALHRSYLTPGDSSSGWTAGAAAYYVGYLQPRTFLLKYNENGTITDAVDCALDPLSETKCTLKSFTVEKGIYQTSNFRVQPTESIVRFPNITNLCPFGEVFNATRFASVYAWNRKRISNCVADYSVLYNSASFSTFKCYGVSPTKLNDLCFTNVYADSFVIRGDEVRQIAPGQTGKIADYNYKLPDDFTGCVISWNSNNLDSKVGGNYNYLYRLFRKSNLKPFERDISTEIYQAGSTPCNGVEGFNCYFPLQSYGFQPTNGVGYQPYRVVVLSFELLHAPATVCGPKKSTNLVKNKCVNFNFNGLTGTGVLTESNKKFLPFQQFGRDIADTTDAVRDPQTLEILDITPCSFGGVSVITPGTNTSNQVAVLYQGVNCTEVPVAIHADQLTPTWRVYSTGSNVFQTRAGCLIGAEHVNNSYECDIPIGAGICASYQTQTNSPRRARSVASQSIIAYTMSLGAENSVAYSNNSIAIPTNFTISVTTEILPVSMTKTSVDCTMYICGDSTECSNLLLQYGSFCTQLNRALTGIAVEQDKNTQEVFAQVKQIYKTPPIKDFGGFNFSQILPDPSKPSKRSFIEDLLFNKVTLADAGFIKQYGDCLGDIAARDLICAQKFNGLTVLPPLLTDEMIAQYTSALLAGTITSGWTFGAGAALQIPFAMQMAYRFNGIGVTQCVLYENQKLIANQFNSAIGKIQDSLSSTASALGKLQDVVNQNAQALNTLVKQLSSNFGAISSVLNDILSRLDKVEAEVQIDRLITGRLQSLQTYVTQQLIRAAEIRASANLAATKMSECVLGQSKRVDFCGKGYHLMSFPQSAPHGVVFLHVTYVPAQEKNFTTAPAICHDGKAHFPREGVFVSNGTHWFVTQRNFYEPQIITTDNTFVCGNCDVVIGIVNNTVYDPLQPELDS

SEQ ID NO: 13475 - protein, 1147 aa, Artificial Sequence
  SARS-CoV-2/France/GE1977/2020__EPI_ISL_414632 spike protein (1-1147)(N914C_S1123C)
MFVFLVLLPLVSSQCVNLTTRTQLPPAYTNSFTRGVYYPDKVFRSSVLHSTQDLFLPFFSNVTWFHAIHVSGTNGTKRFDNPVLPFNDGVYFASTEKSNIIRGWIFGTTLDSKTQSLLIVNNATNVVIKVCEFQFCNDPFLGVYYHKNNKSWMESEFRVYSSANNCTFEYVSQPFLMDLEGKQGNFKNLREFVFKNIDGYFKIYSKHTPINLVRDLPQGFSALEPLVDLPIGINITRFQTLLALHRSYLTPGDSSSGWTAGAAAYYVGYLQPRTFLLKYNENGTITDAVDCALDPLSETKCTLKSFTVEKGIYQTSNFRVQPTESIVRFPNITNLCPFGEVFNATRFASVYAWNRKRISNCVADYSVLYNSASFSTFKCYGVSPTKLNDLCFTNVYADSFVIRGDEVRQIAPGQTGKIADYNYKLPDDFTGCVIAWNSNNLDSKVGGNYNYLYRLFRKSNLKPFERDISTEIYQAGSTPCNGVEGFNCYFPLQSYGFQPTNGVGYQPYRVVVLSFELLHAPATVCGPKKSTNLVKNKCVNFNFNGLTGTGVLTESNKKFLPFQQFGRDIADTTDAVRDPQTLEILDITPCSFGGVSVITPGTNTSNQVAVLYQGVNCTEVPVAIHADQLTPTWRVYSTGSNVFQTRAGCLIGAEHVNNSYECDIPIGAGICASYQTQTNSPRRARSVASQSIIAYTMSLGAENSVAYSNNSIAIPTNFTISVTTEILPVSMTKTSVDCTMYICGDSTECSNLLLQYGSFCTQLNRALTGIAVEQDKNTQEVFAQVKQIYKTPPIKDFGGFNFSQILPDPSKPSKRSFIEDLLFNKVTLADAGFIKQYGDCLGDIAARDLICAQKFNGLTVLPPLLTDEMIAQYTSALLAGTITSGWTFGAGAALQIPFAMQMAYRFNGIGVTQCVLYENQKLIANQFNSAIGKIQDSLFSTASALGKLQDVVNQNAQALNTLVKQLSSNFGAISSVLNDILSRLDKVEAEVQIDRLITGRLQSLQTYVTQQLIRAAEIRASANLAATKMSECVLGQSKRVDFCGKGYHLMSFPQSAPHGVVFLHVTYVPAQEKNFTTAPAICHDGKAHFPREGVFVSNGTHWFVTQRNFYEPQIITTDNTFVCGNCDVVIGIVNNTVYDPLQPELDS

SEQ ID NO: 13476 - protein, 1147 aa, Artificial Sequence
  SARS-CoV-2/Finland/FIN-313/2020__EPI_ISL_414641 spike protein (1-1147)(N914C_S1123C)
MFVFLVLLPLVSSQCVNLTTRTQLPPAYTNSFTRGVYYPDKVFRSSVLHSTQDLFLPFFSNVTWFHAIHVSGTNGTKRFDNPVLPFNDGVYFASTEKSNIIRGWIFGTTLDSKTQSLLIVNNATNVVIKVCEFQFCNDPFLGVYYHKNNKSWMESEFRVYSSANNCTFEYVSQPFLMDLEGKQGNFKNLREFVFKNIDGYFKIYSKHTPINLVRDLPQGFSALEPLVDLPIGINITRFKTLLALHRSYLTPGDSSSGWTAGAAAYYVGYLQPRTFLLKYNENGTITDAVDCALDPLSETKCTLKSFTVEKGIYQTSNFRVQPTESIVRFPNITNLCPFGEVFNATRFASVYAWNRKRISNCVADYSVLYNSASFSTFKCYGVSPTKLNDLCFTNVYADSFVIRGDEVRQIAPGQTGKIADYNYKLPDDFTGCVIAWNSNNLDSKVGGNYNYLYRLFRKSNLKPFERDISTEIYQAGSTPCNGVEGFNCYFPLQSYGFQPTNGVGYQPYRVVVLSFELLHAPATVCGPKKSTNLVKNKCVNFNFNGLTGTGVLTESNKKFLPFQQFGRDIADTTDAVRDPQTLEILDITPCSFGGVSVITPGTNTSNQVAVLYQGVNCTEVPVAIHADQLTPTWRVYSTGSNVFQTRAGCLIGAEHVNNSYECDIPIGAGICASYQTQTNSPRRARSVASQSIIAYTMSLGAENSVAYSNNSIAIPTNFTISVTTEILPVSMTKTSVDCTMYICGDSTECSNLLLQYGSFCTQLNRALTGIAVEQDKNTQEVFAQVKQIYKTPPIKDFGGFNFSQILPDPSKPSKRSFIEDLLFNKVTLADAGFIKQYGDCLGDIAARDLICAQKFNGLTVLPPLLTDEMIAQYTSALLAGTITSGWTFGAGAALQIPFAMQMAYRFNGIGVTQCVLYENQKLIANQFNSAIGKIQDSLSSTASALGKLQDVVNQNAQALNTLVKQLSSNFGAISSVLNDILSRLDKVEAEVQIDRLITGRLQSLQTYVTQQLIRAAEIRASANLAATKMSECVLGQSKRVDFCGKGYHLMSFPQSAPHGVVFLHVTYVPAQEKNFTTAPAICHDGKAHFPREGVFVSNGTHWFVTQRNFYEPQIITTDNTFVCGNCDVVIGIVNNTVYDPLQPELDS

SEQ ID NO: 13477 - protein, 1147 aa, Artificial Sequence
  SARS-CoV-2/Netherlands/ZuidHolland_2/2020__EPI_ISL_414556 spike protein (1-1147)(N914C_S1123C)
MFVFLVLLPLVSSQCVNLTTRTQLPPAYTNSFTRGVYYPDKVFRSSVLHSTQDLFLPFFSNVTWFHAIHVSGTNGTKRFDNPVLPFNDGVYFASTEKSNIIRGWIFGTTLDSKTQSLLIVNNATNVVIKVCEFQFCNDPFLGVYYHKNNKSWMESEFRVYSSANNCTFEYVSQPFLMDLEGKQGNFKNLREFVFKNIDGYFKIYSKHTPINLVRDLPQGFSALEPLVDLPIGINITRFQTLLALHRSYLTPGDSSSGWTAGAAAYYVGYLQPRTFLLKYNENGTITDAVDCALDPLSETKCTLKSFTVEKGIYQTSNFRVQPTESIVRFPNITNLCPFGEVFNATRFASVYAWNRKRISNCVADYSVLYNSASFSTFKCYGVSPTKLNDLCFTNVYADSFVIRGDEVRQIAPGQTGKIADYNYKLPDDFTGCVIAWNSNNLDSKVGGNYNYLYRLFRKSNLKPFERDISTEIYQAGSTPCNGVEGFNCYFPLQSYGFQPTNGVGYQPYRVVVLSFELLHAPATVCGPKKSTNLVKNKCVNFNFNGLTGTGVLTESNKKFLPFQQFGRDIADTTDAVRDPQTLEILDITPCSFGGVSVITPGTNTSNQVAVLYQGVNCTEVPVAIHADQLTPTWRVYSTGSNVFQTRAGCLIGAEHVNNSYECDIPIGAGICASYQTQTNSPRRARSVASQSIIAYTMSLGAENSVAYSNNSIAIPTNFTISVTTEILPVSMTKTSVDCTMYICGDSTECSNLLLQYGSFCTQLNRALTGIALEQDKNTQEVFAQVKQIYKTPPIKDFGGFNFSQILPDPSKPSKRSFIEDLLFNKVTLADAGFIKQYGDCLGDIAARDLICAQKFNGLTVLPPLLTDEMIAQYTSALLAGTITSGWTFGAGAALQIPFAMQMAYRFNGIGVTQCVLYENQKLIANQFNSAIGKIQDSLSSTASALGKLQDVVNQNAQALNTLVKQLSSNFGAISSVLNDILSRLDKVEAEVQIDRLITGRLQSLQTYVTQQLIRAAEIRASANLAATKMSECVLGQSKRVDFCGKGYHLMSFPQSAPHGVVFLHVTYVPAQEKNFTTAPAICHDGKAHFPREGVFVSNGTHWFVTQRNFYEPQIITTDNTFVCGNCDVVIGIVNNTVYDPLQPELDS

SEQ ID NO: 13478 - protein, 1147 aa, Artificial Sequence
  SARS-CoV-2/USA/WA-UW31/2020__EPI_ISL_414618 spike protein (1-1147)(N914C_S1123C)
MFVFLVLLPLVSSQCVNLTTRTQLPPAYTNSFTRGVYYPDKVFRSSVLHSTQDLFLPFFSNVTWFHAIHVSGTNGTKRFDNPVLPFNDGVYFASTEKSNIIRGWIFGTTLDSKTQSLLIVNNATNVVIKVCEFQFCNDPFLGVYYHKNNKSWMESEFRVYSSANNCTFEYVSQPFLMDLEGKQGNFKNLREFVFKNIDGYFKIYSKHTPINLVRDLPQGFSALEPLVDLPIGINITRFQTLLALHRSYLTPGDSSSGWTAGAAAYYVGYLQPRTFLLKYNENGTITDAVDCALDPLSETKCTLKSFTVEKGIYQTSNFRVQPTESIVRFPNITNLCPFGEVFNATRFASVYAWNRKRISNCVADYSVLYNSASFSTFKCYGVSPTKLNDLCFTNVYADSFVIRGDEVRQIAPGQTGKIADYNYKLPDDFTGCVIAWNSNNLDSKVGGNYNYLYRLFRKSNLKPFERDISTEIYQAGSTPCNGAEGFNCYFPLQSYGFQPTNGVGYQPYRVVVLSFELLHAPATVCGPKKSTNLVKNKCVNFNFNGLTGTGVLTESNKKFLPFQQFGRDIADTTDAVRDPQTLEILDITPCSFGGVSVITPGTNTSNQVAVLYQDVNCTEVPVAIHADQLTPTWRVYSTGSNVFQTRAGCLIGAEHVNNSYECDIPIGAGICASYQTQTNSPRRARSVASQSIIAYTMSLGAENSVAYSNNSIAIPTNFTISVTTEILPVSMTKTSVDCTMYICGDSTECSNLLLQYGSFCTQLNRALTGIAVEQDKNTQEVFAQVKQIYKTPPIKDFGGFNFSQILPDPSKPSKRSFIEDLLFNKVTLADAGFIKQYGDCLGDIAARDLICAQKFNGLTVLPPLLTDEMIAQYTSALLAGTITSGWTFGAGAALQIPFAMQMAYRFNGIGVTQCVLYENQKLIANQFNSAIGKIQDSLSSTASALGKLQDVVNQNAQALNTLVKQLSSNFGAISSVLNDILSRLDKVEAEVQIDRLITGRLQSLQTYVTQQLIRAAEIRASANLAATKMSECVLGQSKRVDFCGKGYHLMSFPQSAPHGVVFLHVTYVPAQEKNFTTAPAICHDGKAHFPREGVFVSNGTHWFVTQRNFYEPQIITTDNTFVCGNCDVVIGIVNNTVYDPLQPELDS

SEQ ID NO: 13479 - protein, 1147 aa, Artificial Sequence
  SARS-CoV-2/South Korea/SNU01/2020__EPI_ISL_411929 spike protein (1-1147)(N914C_S1123C)
MFVFLVLLPLVSSQCVNLTTRTQLPPAYTNSFTRGVYYPDKVFRSSVLHSTQDLFLPFFSNVTWFHAIHVSGTNGTKRFDNPVLPFNDGVYFASTEKSNIIRGWIFGTTLDSKTQSLLIVNNATNVVIKVCEFQFCNDPFLGVYYHKNNKSWMESEFRVYSSANNCTFEYVSQPFLMDLEGKQGNFKNLREFVFKNIDGYFKIYSKHTPINLVRDLPQGFWALEPLVDLPIGINITRFQTLLALHRSYLTPGDSSSGWTAGAAAYYVGYLQPRTFLLKYNENGTITDAVDCALDPLSETKCTLKSFTVEKGIYQTSNFRVQPTESIVRFPNITNLCPFGEVFNATRFASVYAWNRKRISNCVADYSVLYNSASFSTFKCYGVSPTKLNDLCFTNVYADSFVIRGDEVRQIAPGQTGKIADYNYKLPDDFTGCVIAWNSNNLDSKVGGNYNYLYRLFRKSNLKPFERDISTEIYQAGSTPCNGVEGFNCYFPLQSYGFQPTNGVGYQPYRVVVLSFELLHAPATVCGPKKSTNLVKNKCVNFNFNGLTGTGVLTESNKKFLPFQQFGRDIADTTDAVRDPQTLEILDITPCSFGGVSVITPGTNTSNQVAVLYQDVNCTEVPVAIHADQLTPTWRVYSTGSNVFQTRAGCLIGAEHVNNSYECDIPIGAGICASYQTQTNSPRRARSVASQSIIAYTMSLGAENSVAYSNNSIAIPTNFTISVTTEILPVSMTKTSVDCTMYICGDSTECSNLLLQYGSFCTQLNRALTGIAVEQDKNTQEVFAQVKQIYKTPPIKDFGGFNFSQILPDPSKPSKRSFIEDLLFNKVTLADAGFIKQYGDCLGDIAARDLICAQKFNGLTVLPPLLTDEMIAQYTSALLAGTITSGWTFGAGAALQIPFAMQMAYRFNGIGVTQCVLYENQKLIANQFNSAIGKIQDSLSSTASALGKLQDVVNQNAQALNTLVKQLSSNFGAISSVLNDILSRLDKVEAEVQIDRLITGRLQSLQTYVTQQLIRAAEIRASANLAATKMSECVLGQSKRVDFCGKGYHLMSFPQSAPHGVVFLHVTYVPAQEKNFTTAPAICHDGKAHFPREGVFVSNGTHWFVTQRNFYEPQIITTDNTFVCGNCDVVIGIVNNTVYDPLQPELDS

SEQ ID NO: 13480 - protein, 1147 aa, Artificial Sequence
  SARS-CoV-2/China/WF0004/2020__EPI_ISL_413694 spike protein (1-1147)(N914C_S1123C)
MFVFLVLLPLVSSQCVNLTTRTQLPPAYTNSFTRGVYYPDKVFRSSVLHSTQDLFLPFFSNVTWFHAIHVSGTNGTKRFDNPVLPFNDGVYFASTEKSNIIRGWIFGTTLDSKTQSLLIVNNATNVVIKVCEFQFCNDPFLGVYYHKNNKSWTESEFRVYSSANNCTFEYVSQPFLMDLEGKQGNFKNLREFVFKNIDGYFKIYSKHTPINLVRDLPQGFSALEPLVDLPIGINITRFQTLLALHRSYLTPGDSSSGWTAGAAAYYVGYLQPRTFLLKYNENGTITDAVDCALDPLSETKCTLKSFTVEKGIYQTSNFRVQPTESIVRFPNITNLCPFGEVFNATRFASVYAWNRKRISNCVADYSVLYNSASFSTFKCYGVSPTKLNDLCFTNVYADSFVIRGDEVRQIAPGQTGKIADYNYKLPDDFTGCVIAWNSNNLDSKVGGNYNYLYRLFRKSNLKPFERDISTEIYQAGSTPCNGVEGFNCYFPLQSYGFQPTNGVGYQPYRVVVLSFELLHAPATVCGPKKSTNLVKNKCVNFNFNGLTGTGVLTESNKKFLPFQQFGRDIADTTDAVRDPQTLEILDITPCSFGGVSVITPGTNTSNQVAVLYQDVNCTEVPVAIHADQLTPTWRVYSTGSNVFQTRAGCLIGAEHVNNSYECDIPIGAGICASYQTQTNSPRRARSVASQSIIAYTMSLGAENSVAYSNNSIAIPTNFTISVTTEILPVSMTKTSVDCTMYICGDSTECSNLLLQYGSFCTQLNRALTGIAVEQDKNTQEVFAQVKQIYKTPPIKDFGGFNFSQILPDPSKPSKRSFIEDLLFNKVTLADAGFIKQYGDCLGDIAARDLICAQKFNGLTVLPPLLTDEMIAQYTSALLAGTITSGWTFGAGAALQIPFAMQMAYRFNGIGVTQCVLYENQKLIANQFNSAIGKIQDSLSSTASALGKLQDVVNQNAQALNTLVKQLSSNFGAISSVLNDILSRLDKVEAEVQIDRLITGRLQSLQTYVTQQLIRAAEIRASANLAATKMSECVLGQSKRFDFCGKGYHLMSFPQSAPHGVVFLHVTYVPAQEKNFTTAPAICHDGKAHFPREGVFVSNGTHWFVTQRNFYEPQIITTDNTFVCGNCDVVIGIVNNTVYDPLQPELDS

SEQ ID NO: 13481 - protein, 1147 aa, Artificial Sequence
  SARS-CoV-2/China/WF0028/2020__EPI_ISL_413791 spike protein (1-1147)(N914C_S1123C)
MFVFLVLLPLVSSQCVNLTTRTQLPPAYTNSFTRGVYYPDKVFRSSVLHSTQDLFLPFFSNVTWFHAIHVSGTNGTKRFDNPVLPFNDGVYFASTEKSNIIRGWIFGTTLDSKTQSLLIVNNATNVVIKVCEFQFCNDPFLGVYYHKNNKSWMESEFRVYSSANNCTFEYVSQPFLMDLEGKQGNFKNLREFVFKNIDGYFKIYSKHTPINLVRDLPQGFSALEPLVDLPIGINITRFQTLLALHRSYLTPGDSSSGWTAGAAAYYVGYLQPRTFLLKYNENGTITDAVDCALDPLSETKCTLKSFTVEKGIYQTSNFRVQPTESIVRFPNITNLCPFGEVFNATRFASVYAWNRKRISNCVADYSVLYNSASFSTFKCYGVSPTKLNDLCFTNVYADSFVIRGDEVRQIAPGQTGKIADYNYKLPDDFTGCVIAWNSNNLDSKVGGNYNYLYRLFRKSNLKPFERDISTEIYQAGSTPCNGVEGFNCYFPLQSYGFQPTNGVGYQPYRVVVLSFELLHAPATVCGPKKSTNLVKNKCVNFNFNGLTGTGVLTESNKKFLPFQQFGRDIADTTDAVRDPQTLEILDITPCSFGGVSVITPGTNTSNQVAVLYQDVNCTEVPVAIHADQLTPTWRVYSTGSNVFQTRAGCLIGAEHVNNSYECDIPIGAGICASYQTQTNSPRRARSVASQSIIAYTMSLGAENSVAYSNNSIAIPTNFTISVTTEILPVSMTKTSVDCTMYICGDSTECSNLLLQYGSFCTQLNRALTGIAVEQDKNTQEVFAQVKQIYKTPPIKDFGGFNFSQILPDPSKPSKRSFIEDLLFNKVTLADAGFIKQYGDCLGDIAARDLICAQKFNGLTVLPPLLTDEMIAQYTSALLAGTITSGWTFGAGAALQIPFAMQMAYRFNGIGVTQCVLYENQKLIANQFNSAIGKIQDSLSSTASALGKLQDVVNQNAQALNTLVKQLSSNFGAISSVLNDILSRLDKVEAEVQIDRLITGRLQSLQTYVTQQLIRAAEIRASANLAATKMSECVLGQSKRVDFCGKGYHLMSFPQSAPHGVVFLHVTYVPAQEKNFTTAPAICHDGKAHFPREGVFVSNGTHWFVTQRNFYEPQIITTDNTFVCGNCDVVIGIVNNTVYDPLQPELES

SEQ ID NO: 13482 - protein, 1147 aa, Artificial Sequence
  SARS-CoV-2/2019-nCoV/USA-CruiseA-18/2020__MT159716.1 spike protein (1-1147)(N914C_S1123C)
MFVFLVLLPLVSSQCVNLTTRTQLPPAYTNSFTRGVYYPDKVFRSSVLHSTQDLFLPFFSNVTWFHAIHVSGTNGTKRFDNPVLPFNDGVYFASTEKSNIIRGWIFGTTLDSKTQSLLIVNNATNVVIKVCEFQFCNDPFLGVYYHKNNKSWMESELRVYSSANNCTFEYVSQPFLMDLEGKQGNFKNLREFVFKNIDGYFKIYSKHTPINLVRDLPQGFSALEPLVDLPIGINITRFQTLLALHRSYLTPGDSSSGWTAGAAAYYVGYLQPRTFLLKYNENGTITDAVDCALDPLSETKCTLKSFTVEKGIYQTSNFRVQPTESIVRFPNITNLCPFGEVFNATRFASVYAWNRKRISNCVADYSVLYNSASFSTFKCYGVSPTKLNDLCFTNVYADSFVIRGDEVRQIAPGQTGKIADYNYKLPDDFTGCVIAWNSNNLDSKVGGNYNYLYRLFRKSNLKPFERDISTEIYQAGSTPCNGVEGFNCYFPLQSYGFQPTNGVGYQPYRVVVLSFELLHAPATVCGPKKSTNLVKNKCVNFNFNGLTGTGVLTESNKKFLPFQQFGRDIADTTDAVRDPQTLEILDITPCSFGGVSVITPGTNTSNQVAVLYQDVNCTEVPVAIHADQLTPTWRVYSTGSNVFQTRAGCLIGAEHVNNSYECDIPIGAGICASYQTQTNSPRRARSVASQSIIAYTMSLGAENSVAYSNNSIAIPTNFTISVTTEILPVSMTKTSVDCTMYICGDSTECSNLLLQYGSFCTQLNRALTGIAVEQDKNTQEVFAQVKQIYKTPPIKDFGGFNFSQILPDPSKPSKRSFIEDLLFNKVTLADAGFIKQYGDCLGDIAARDLICAQKFNGLTVLPPLLTDEMIAQYTSALLAGTITSGWTFGAGAALQIPFAMQMAYRFNGIGVTQCVLYENQKLIANQFNSAIGKIQDSLSSTASALGKLQDVVNQNAQALNTLVKQLSSNFGAISSVLNDILSRLDKVEAEVQIDRLITGRLQSLQTYVTQQLIRAAEIRASANLAATKMSECVLGQSKRVDFCGKGYHLMSFPQSAPHGVVFLHVTYVPAQEKNFTTAPAICHDGKAHFPREGVFVSNGTHWFVTQRNFYEPQIITTDNTFVCGNCDVVIGIVNNTVYDPLQPELDS

SEQ ID NO: 13483 - protein, 1147 aa, Artificial Sequence
  SARS-CoV-2/SARS-CoV-2/Yunnan-01/human/2020/CHN__MT049951.1 spike protein (1-1147)(N914C_S1123C)
MFVFLVLLPLVSSQCVNLTTRTQLPPANTNSFTRGVYYPDKVFRSSVLHSTQDLFLPFFSNVTWFHAIHVSGTNGTKRFDNPVLPFNDGVYFASTEKSNIIRGWIFGTTLDSKTQSLLIVNNATNVVIKVCEFQFCNDPFLGVYYHKNNKSWMESEFRVYSSANNCTFEYVSQPFLMDLEGKQGNFKNLREFVFKNIDGYFKIYSKHTPINLVRDLPQGFSALEPLVDLPIGINITRFQTLLALHRSYLTPGDSSSGWTAGAAAYYVGYLQPRTFLLKYNENGTITDAVDCALDPLSETKCTLKSFTVEKGIYQTSNFRVQPTESIVRFPNITNLCPFGEVFNATRFASVYAWNRKRISNCVADYSVLYNSASFSTFKCYGVSPTKLNDLCFTNVYADSFVIRGDEVRQIAPGQTGKIADYNYKLPDDFTGCVIAWNSNNLDSKVGGNYNYLYRLFRKSNLKPFERDISTEIYQAGSTPCNGVEGFNCYFPLQSYGFQPTNGVGYQPYRVVVLSFELLHAPATVCGPKKSTNLVKNKCVNFNFNGLTGTGVLTESNKKFLPFQQFGRDIADTTDAVRDPQTLEILDITPCSFGGVSVITPGTNTSNQVAVLYQDVNCTEVPVAIHADQLTPTWRVYSTGSNVFQTRAGCLIGAEHVNNSYECDIPIGAGICASYQTQTNSPRRARSVASQSIIAYTMSLGAENSVAYSNNSIAIPTNFTISVTTEILPVSMTKTSVDCTMYICGDSTECSNLLLQYGSFCTQLNRALTGIAVEQDKNTQEVFAQVKQIYKTPPIKDFGGFNFSQILPDPSKPSKRSFIEDLLFNKVTLADAGFIKQYGDCLGDIAARDLICAQKFNGLTVLPPLLTDEMIAQYTSALLAGTITSGWTFGAGAALQIPFAMQMAYRFNGIGVTQCVLYENQKLIANQFNSAIGKIQDSLSSTASALGKLQDVVNQNAQALNTLVKQLSSNFGAISSVLNDILSRLDKVEAEVQIDRLITGRLQSLQTYVTQQLIRAAEIRASANLAATKMSECVLGQSKRVDFCGKGYHLMSFPQSAPHGVVFLHVTYVPAQEKNFTTAPAICHDGKAHFPREGVFVSNGTHWFVTQRNFYEPQIITTDNTFVCGNCDVVIGIVNNTVYDPLQPELDS

SEQ ID NO: 13484 - protein, 1147 aa, Artificial Sequence
  SARS-CoV-2/USA/WA-UW292/2020__EPI_ISL_418077 spike protein (1-1147)(N914C_S1123C)
MFVFLVLLPLVSSQCVNLTTRTQLPPAYTNSFTRGVYYPDKVFRSSVLHSTQDLFLPFFSNVTWFHAIHVSGTNGTKRFDNPVLPFNDGVYFASTEKSNIIRGWIFGTTLDSKTQSLLIVNNATNVVIKVCEFQFCNDPFLGVYYHKNNKSWMESEFRVYSSANNCTFEYVSQPFLMDLEGKQGNFKNLREFVFKNIDGYFKIYSKHTPINLVRDLPQGFSALEPLVDLPIGINITRFQTLLALHRSYLTPGDSSSGWTAGAAAYYVGYLQPRTFLLKYNENGTITDAVDCALDPLSETKCTLKSFTVEKGIYQTSNFRVQPTESIVRFPNITNLCPFGEVFNATRFASVYAWNRKRISNCVADYSVLYNSASFSTFKCYGVSPTKLNDLCFTNVYADSFVIRGDEVRQIAPGQTGKIADYNYKLPDDFTGCVIAWNSNNLDSKVGGNYNYLYRLFRKSNLKPFERDISTEIYQASSTPCNGVEGFNCYFPLQSYGFQPTNGVGYQPYRVVVLSFELLHAPATVCGPKKSTNLVKNKCVNFNFNGLTGTGVLTESNKKFLPFQQFGRDIADTTDAVRDPQTLEILDITPCSFGGVSVITPGTNTSNQVAVLYQDVNCTEVPVAIHADQLTPTWRVYSTGSNVFQTRAGCLIGAEHVNNSYECDIPIGAGICASYQTQTNSPRRARSVASQSIIAYTMSLGAENSVAYSNNSIAIPTNFTISVTTEILPVSMTKTSVDCTMYICGDSTECSNLLLQYGSFCTQLNRALTGIAVEQDKNTQEVFAQVKQIYKTPPIKDFGGFNFSQILPDPSKPSKRSFIEDLLFNKVTLADAGFIKQYGDCLGDIAARDLICAQKFNGLTVLPPLLTDEMIAQYTSALLAGTITSGWTFGAGAALQIPFAMQMAYRFNGIGVTQCVLYENQKLIANQFNSAIGKIQDSLSSTASALGKLQDVVNQNAQALNTLVKQLSSNFGAISSVLNDILSRLDKVEAEVQIDRLITGRLQSLQTYVTQQLIRAAEIRASANLAATKMSECVLGQSKRVDFCGKGYHLMSFPQSAPHGVVFLHVTYVPAQEKNFTTAPAICHDGKAHFPREGVFVSNGTHWFVTQRNFYEPQIITTDNTFVCGNCDVVIGIVNNTVYDPLQPELDS

SEQ ID NO: 13485 - protein, 1147 aa, Artificial Sequence
  SARS-CoV-2/Iceland/192/2020__EPI_ISL_417819 spike protein (1-1147)(N914C_S1123C)
MFVFFVLLPLVSSQCVNLTTRTQLPPAYTNSFTRGVYYPDKVFRSSVLHSTQDLFLPFFSNVTWFHAIHVSGTNGTKRFDNPVLPFNDGVYFASTEKSNIIRGWIFGTTLDSKTQSLLIVNNATNVVIKVCEFQFCNDPFLGVYYHKNNKSWMESEFRVYSSANNCTFEYVSQPFLMDLEGKQGNFKNLREFVFKNIDGYFKIYSKHTPINLVRDLPQGFSALEPLVDLPIGINITRFQTLLALHRSYLTPGDSSSGWTAGAAAYYVGYLQPRTFLLKYNENGTITDAVDCALDPLSETKCTLKSFTVEKGIYQTSNFRVQPTESIVRFPNITNLCPFGEVFNATRFASVYAWNRKRISNCVADYSVLYNSASFSTFKCYGVSPTKLNDLCFTNVYADSFVIRGDEVRQIAPGQTGKIADYNYKLPDDFTGCVIAWNSNNLDSKVGGNYNYLYRLFRKSNLKPFERDISTEIYQAGSTPCNGVEGFNCYFPLQSYGFQPTNGVGYQPYRVVVLSFELLHAPATVCGPKKSTNLVKNKCVNFNFNGLTGTGVLTESNKKFLPFQQFGRDIADTTDAVRDPQTLEILDITPCSFGGVSVITPGTNTSNQVAVLYQGVNCTEVPVAIHADQLTPTWRVYSTGSNVFQTRAGCLIGAEHVNNSYECDIPIGAGICASYQTQTNSPRRARSVASQSIIAYTMSLGAENSVAYSNNSIAIPTNFTISVTTEILPVSMTKTSVDCTMYICGDSTECSNLLLQYGSFCTQLNRALTGIAVEQDKNTQEVFAQVKQIYKTPPIKDFGGFNFSQILPDPSKPSKRSFIEDLLFNKVTLADAGFIKQYGDCLGDIAARDLICAQKFNGLTVLPPLLTDEMIAQYTSALLAGTITSGWTFGAGAALQIPFAMQMAYRFNGIGVTQCVLYENQKLIANQFNSAIGKIQDSLSSTASALGKLQDVVNQNAQALNTLVKQLSSNFGAISSVLNDILSRLDKVEAEVQIDRLITGRLQSLQTYVTQQLIRAAEIRASANLAATKMSECVLGQSKRVDFCGKGYHLMSFPQSAPHGVVFLHVTYVPAQEKNFTTAPAICHDGKAHFPREGVFVSNGTHWFVTQRNFYEPQIITTDNTFVCGNCDVVIGIVNNTVYDPLQPELDS

SEQ ID NO: 13486 - protein, 1147 aa, Artificial Sequence
  SARS-CoV-2/Belgium/ULG-6939/2020__EPI_ISL_417020 spike protein (1-1147)(N914C_S1123C)
MFVFLVLLPLVSSQCVNLTTRTQLPPAYTNSFTRGVYYPDKVFRSSVLHSTQDLFLPFFSNVTWFHAIHVSGTNGTKRFDNPVLPFNDGVYFASTEKSNIIRGWIFGTTLDSKTQSLLIVNNATNVVIKVCEFQFCNDPFLGVYYHKNNKSWMESEFRVYSSANNCTFEYVSQPFLMDLEGKQGNFKNLREFVFKNIDGYFKIYSKHTPINLVRDLPQGFSALEPLVDLPIGINITRFQTLLALHRSYLTPGDSSSGWTAGAAAYYVGYLQPRTFLLKYNENGTITDAVDCALDPLSETKCTLKSFTVEKGIYQTSNFRVQPTESIVRFPNITNLCPFGEVFNATRFASVYAWNRKRISNCVADYSVLYNSASFSTFKCYGVSPTKLNDLCFTNVYADSFVIRGDEVRQIAPGQTGKIADYNYKLPDDFTGCVIAWNSNNLDSKVGGNYNYLYRLFRKSNLKPFERDISTEIYQAGSTPCNGVEGFNCYFPLQSYGFQPTNGVGYQPYRVVVLSFELLHAPATVCGPKKSTNLVKNKCVNFNFNGLTGTGVLTESNKKFLPFQQFGRDIADTTDAVRDPQTLEILDITPCSFGGVSVITPGTNTSNQVAVLYQGVNCTEVPVAIHADQLTPTWRVYSTGSNVFQTRAGCLIGAEHVNNSYECDIPIGAGICASYQTQTNSPRRARSVASQSIIAYTMSLGAENSVVYSNNSIAIPTNFTISVTTEILPVSMTKTSVDCTMYICGDSTECSNLLLQYGSFCTQLNRALTGIAVEQDKNTQEVFAQVKQIYKTPPIKDFGGFNFSQILPDPSKPSKRSFIEDLLFNKVTLADAGFIKQYGDCLGDIAARDLICAQKFNGLTVLPPLLTDEMIAQYTSALLAGTITSGWTFGAGAALQIPFAMQMAYRFNGIGVTQCVLYENQKLIANQFNSAIGKIQDSLSSTASALGKLQDVVNQNAQALNTLVKQLSSNFGAISSVLNDILSRLDKVEAEVQIDRLITGRLQSLQTYVTQQLIRAAEIRASANLAATKMSECVLGQSKRVDFCGKGYHLMSFPQSAPHGVVFLHVTYVPAQEKNFTTAPAICHDGKAHFPREGVFVSNGTHWFVTQRNFYEPQIITTDNTFVCGNCDVVIGIVNNTVYDPLQPELDS

SEQ ID NO: 13487 - protein, 1147 aa, Artificial Sequence
  SARS-CoV-2/France/HF2496/2020__EPI_ISL_418231 spike protein (1-1147)(N914C_S1123C)
MFVFLVLLPLVSSQCVNLTTRTQLPPAYTNSFTRGVYYPDKVFRSSVLHSTQDLFLPFFSNVTWFHAIHVSGTNGTKRFDNPVLPFNDGVYFASTEKSNIIRGWIFGTTLDSKTQSLLIVNNATNVVIKVCEFQFCNDPFLGVYYHKNNKSWMESEFRVYSSANNCTFEYVSQPFLMDLEGKQGNFKNLREFVFKNIDGYFKIYSKHTPINLVRDLPQGFSALEPLVDLPIGINITRFQTLLALHRSYLTPGDSSSGWTAGAAAYYVGYLQPRTFLLKYNENGTITDAVDCALDPLSETKCTLKSFTVEKGIYQTSNFRVQPTESIVRFPNITNLCPFGEVFNATRFASVYAWNRKRISNCVADYSVLYNSASFSTFKCYGVSPTKLNDLCFTNVYADSFVIRGDEVRQIAPGQTGKIADYNYKLPDDFTGCVIAWNSNNLDSKVGGNYNYLYRLFRKSNLKPFERDISTEIYQAGSTPCNGVEGFNCYFPLQSYGFQPTNGVGYQPYRVVVLSFELLHAPATVCGPKKSTNLVKNKCVNFNFNGLTGTGVLTESNKKFLPFQQFGRDIADTTDAVRDPQTLEILDITPCSFGGVSVITPGTNTSNQVAVLYQGVNCTEVPVAIHADQLTPTWRVYSTGSNVFQTRAGCLIGAEHVNNSYECDIPIGAGICASYQTQTNSPRRARSVASQSIIAYTMSLGAENSVAYSNNSIAIPTNFTISVTTEILPVSMTKTSVDCTMYICGDSTECSNLLLQYGSFCTQLNRALTGIAVEQDKNTQEVFAQVKQIYKTPPIKDFGGFNFSQILPDPSKPSKRSFIEDLLFNKVTLADAGFIKQYGDCLGDIVARDLICAQKFNGLTVLPPLLTDEMIAQYTSALLAGTITSGWTFGAGAALQIPFAMQMAYRFNGIGVTQCVLYENQKLIANQFNSAIGKIQDSLSSTASALGKLQDVVNQNAQALNTLVKQLSSNFGAISSVLNDILSRLDKVEAEVQIDRLITGRLQSLQTYVTQQLIRAAEIRASANLAATKMSECVLGQSKRVDFCGKGYHLMSFPQSAPHGVVFLHVTYVPAQEKNFTTAPAICHDGKAHFPREGVFVSNGTHWFVTQRNFYEPQIITTDNTFVCGNCDVVIGIVNNTVYDPLQPELDS

SEQ ID NO: 13488 - protein, 1147 aa, Artificial Sequence
  SARS-CoV-2/USA/WA-UW291/2020__EPI_ISL_418076 spike protein (1-1147)(N914C_S1123C)
MFVFLVLLPLVSSQCVNLTTRTQLPPAYTNSFTRGVYYPDKVFRSSVLHSTQDLFLPFFSNVTWFHAIHVSGTNGTKRFDNPVLPFNDGVYFASTEKSNIIRGWIFGTTLDSKTQSLLIVNNATNVVIKVCEFQFCNDPFLGVYYHKNNKSWMESEFRVYSSANNCTFEYVSQPFLMDLEGKQGNFKNLREFVFKNIDGYFKIYSKHTPINLVRDLPQGFSALEPLVDLPIGINITRFQTLLALHRSYLTPGDSSSGWTAGAAAYYVGYLQPRTFLLKYNENGTITDAVDCALDPLSETKCTLKSFTVEKGIYQTSNFRVQPTESIVRFPNITNLCPFGEVFNATRFASVYAWNRKRISNCVADYSVLYNSASFSTFKCYGVSPTKLNDLCFTNVYADSFVIRGDEVRQIAPGQTGKIADYNYKLPDDFTGCVIAWNSNNLDSKVGGNYNYLYRLFRKSNLKPFERDISTEIYQAGSTPCNGVEGFNCYFPLQSYGFQPTNGVGYQPYRVVVLSFELLHAPATVCGPKKSTNLVKNKCVNFNFNGLTGTGVLTESNKKFLPFQQFGRDIADTTDAVRDPQTLEILDITPCSFGGVSVITPGTNTSNQVAVLYQGVNCTEVPVAIHADQLTPTWRVYSTGSNVFQTRAGCLIGAEHVNNSYECDIPIGAGICASYQTQTNSPRRARSVASQSIIAYTMSLGAENSVAYSNNSIAIPTNFTISVTTEILPVSMTKTSVDCTMYICGDSTECSNLLLQYGSFCTQLNRALTGIAVEQDKNTQEVFAQVKQIYKTPPIKDFGGFNFSQILPDPSKPSKRSFIEDLLFNKVTLADAGFIKQYGDCLGDIAARDLICAQKFNGLTVLPPLLTDEMIAQYTSALLAGTITSGWTFGAGAALQIPFAMQMAYRFNGIGVTQCVLYENQKLIANQFNSAIGKIQYSLSSTASALGKLQDVVNQNAQALNTLVKQLSSNFGAISSVLNDILSRLDKVEAEVQIDRLITGRLQSLQTYVTQQLIRAAEIRASANLAATKMSECVLGQSKRVDFCGKGYHLMSFPQSAPHGVVFLHVTYVPAQEKNFTTAPAICHDGKAHFPREGVFVSNGTHWFVTQRNFYEPQIITTDNTFVCGNCDVVIGIVNNTVYDPLQPELDS

SEQ ID NO: 13489 - protein, 1147 aa, Artificial Sequence; identical to SEQ ID NO: 13452
  SARS-CoV-2/Portugal/PT0034/2020__EPI_ISL_418019 spike protein (1-1147)(N914C_S1123C)

SEQ ID NO: 13490 - protein, 1147 aa, Artificial Sequence; identical to SEQ ID NO: 13444
  SARS-CoV-2/Iceland/202/2020__EPI_ISL_417750 spike protein (1-1147)(N914C_S1123C)

SEQ ID NO: 13491 - protein, 1147 aa, Artificial Sequence
  SARS-CoV-2/USA/WA-UW261/2020__EPI_ISL_418046 spike protein (1-1147)(N914C_S1123C)
MFVFLVLLPLVSSQCVNLTTRTQLPPAYTNSFTRGVYYPDKVFRSSVLHSTQDLFLPFFSNVTWFHAIHVSGTNGTKRFDNPVLPFNDGVYFASTEKSNIIRGWIFGTTLDSKTQSLLIVNNATNVVIKVCEFQFCNDPFLGVYYHKNNKSWMESEFRVYSSANNCTFEYVSQPFLMDLEGKQGNFKNLREFVFKNIDGYFKIYSKHTPINLVRDLPQGFSALEPLVDLPIGINITRFQTLLALHRSYLTPGDSSSGWTAGAAAYYVGYLQPRTFLLKYNENGTITDAVDCALDPLSETKCTLKSFTVEKGIYQTSNFRVQPTESIVRFPNITNLCPFGEVFNATRFTSVYAWNRKRISNCVADYSVLYNSASFSTFKCYGVSPTKLNDLCFTNVYADSFVIRGDEVRQIAPGQTGKIADYNYKLPDDFTGCVIAWNSNNLDSKVGGNYNYLYRLFRKSNLKPFERDISTEIYQAGSTPCNGVEGFNCYFPLQSYGFQPTNGVGYQPYRVVVLSFELLHAPATVCGPKKSTNLVKNKCVNFNFNGLTGTGVLTESNKKFLPFQQFGRDIADTTDAVRDPQTLEILDITPCSFGGVSVITPGTNTSNQVAVLYQDVNCTEVPVAIHADQLTPTWRVYSTGSNVFQTRAGCLIGAEHVNNSYECDIPIGAGICASYQTQTNSPRRARSVASQSIIAYTMSLGAENSVAYSNNSIAIPTNFTISVTTEILPVSMTKTSVDCTMYICGDSTECSNLLLQYGSFCTQLNRALTGIAVEQDKNTQEVFAQVKQIYKTPPIKDFGGFNFSQILPDPSKPSKRSFIEDLLFNKVTLADAGFIKQYGDCLGDIAARDLICAQKFNGLTVLPPLLTDEMIAQYTSALLAGTITSGWTFGAGAALQIPFAMQMAYRFNGIGVTQCVLYENQKLIANQFNSAIGKIQDSLSSTASALGKLQDVVNQNAQALNTLVKQLSSNFGAISSVLNDILSRLDKVEAEVQIDRLITGRLQSLQTYVTQQLIRAAEIRASANLAATKMSECVLGQSKRVDFCGKGYHLMSFPQSAPHGVVFLHVTYVPAQEKNFTTAPAICHDGKAHFPREGVFVSNGTHWFVTQRNFYEPQIITTDNTFVCGNCDVVIGIVNNTVYDPLQPELDS

SEQ ID NO: 13492 - protein, 1147 aa, Artificial Sequence
  SARS-CoV-2/Portugal/PT0035/2020__EPI_ISL_418020 spike protein (1-1147)(N914C_S1123C)
MFVFLVLLPLVSSQCVNLTTRTQLPPAYTNSFTRGVYYPDKVFRSSVLHSTQDLFLPFFSNVTWFHAIHVSGTNGTKRFDNPVLPFNDGVYFASTEKSNIIRGWIFGTTLDSKTQSLLIVNNATNVVIKVCEFQFCNDPFLGVYYHKNNKSWMESEFRVYSSANNCTFEYVSQPFLMDLEGKQGNFKNLREFVFKNIDGYFKIYSKHTPINLVRDLPQGFSALEPLVDLPIGINITRFQTLLALHRSYLTPGDSSSGWTAGAAAYYVGYLQPRTFLLKYNENGTITDAVDCALDPLSETKCTLKSFTVEKGIYQTSNFRVQPTESIVRFPNITNLCPFGEVFNATRFASVYAWNRKRISNCVADYSVLYNSASFSTFKCYGVSPTKLNDLCFTNVYADSFVIRGDEVRQIAPGQTGKIADYNYKLPDDFTGCVIAWNSNNLDSKVGGNYNYLYRLFRKSNLKPFERDISTEIYQAGSTPCNGVEGFNCYFPLQSYGFQPTNGVGYQPYRVVVLSFELLHAPATVCGPKKSTNLVKNKCVNFNFNGLTGTGVLTESNKKFLPFQQFGRDIADTTDAVRDPQTLEILDITPCSFGGVSVITPGTNTSNQVAVLYQDVNCTEVPVAIHADQLTPTWRVYSTGSNVFQTRAGCLIGAEHVNNSYECDIPIGAGICASYQTQTNSPRRARSVASQSIIAYTMSLGAENSVAYSNNSIAIPTNFTISVTTEILPVSMTKTSVDCTMYICGDSTECSNLLLQYGSFCTQLNRALTGIAVEQDKNTQEVFAQVKQIYKTPPIKDFGGFNFSQILPDPSKPSKRSFIEDLLFNKVTLADAGFIKQYGDCLGDISARDLICAQKFNGLTVLPPLLTDEMIAQYTSALLAGTITSGWTFGAGAALQIPFAMQMAYRFNGIGVTQCVLYENQKLIANQFNSAIGKIQDSLSSTASALGKLQDVVNQNAQALNTLVKQLSSNFGAISSVLNDILSRLDKVEAEVQIDRLITGRLQSLQTYVTQQLIRAAEIRASANLAATKMSECVLGQSKRVDFCGKGYHLMSFPQSAPHGVVFLHVTYVPAQEKNFTTAPAICHDGKAHFPREGVFVSNGTHWFVTQRNFYEPQIITTDNTFVCGNCDVVIGIVNNTVYDPLQPELDS

SEQ ID NO: 13493 - protein, 1147 aa, Artificial Sequence
  SARS-CoV-2/USA/NY-NYUMC7/2020__EPI_ISL_418192 spike protein (1-1147)(N914C_S1123C)
MFVFLVLLPLVSSQCVNLTTRTQLPPAYTNSFTRGVYYPDKVFRSSVLHSTQDLFLPFFSNVTWFHAIHVSGTNGTKRFDNPVLPFNDGVYFASTEKSNIIRGWIFGTTLDSKTQSLLIVNNATNVVIKVCEFQFCNDPFLGVYHHKNNKSWMESEFRVYSSANNCTFEYVSQPFLMDLEGKQGNFKNLREFVFKNIDGYFKIYSKHTPINLVRDLPQGFSALEPLVDLPIGINITRFQTLLALHRSYLTPGDSSSGWTAGAAAYYVGYLQPRTFLLKYNENGTITDAVDCALDPLSETKCTLKSFTVEKGIYQTSNFRVQPTESIVRFPNITNLCPFGEVFNATRFASVYAWNRKRISNCVADYSVLYNSASFSTFKCYGVSPTKLNDLCFTNVYADSFVIRGDEVRQIAPGQTGKIADYNYKLPDDFTGCVIAWNSNNLDSKVGGNYNYLYRLFRKSNLKPFERDISTEIYQAGSTPCNGVEGFNCYFPLQSYGFQPTNGVGYQPYRVVVLSFELLHAPATVCGPKKSTNLVKNKCVNFNFNGLTGTGVLTESNKKFLPFQQFGRDIADTTDAVRDPQTLEILDITPCSFGGVSVITPGTNTSNQVAVLYQGVNCTEVPVAIHADQLTPTWRVYSTGSNVFQTRAGCLIGAEHVNNSYECDIPIGAGICASYQTQTNSPRRARSVASQSIIAYTMSLGAENSVAYSNNSIAIPTNFTISVTTEILPVSMTKTSVDCTMYICGDSTECSNLLLQYGSFCTQLNRALTGIAVEQDKNTQEVFAQVKQIYKTPPIKDFGGFNFSQILPDPSKPSKRSFIEDLLFNKVTLADAGFIKQYGDCLGDIAARDLICAQKFNGLTVLPPLLTDEMIAQYTSALLAGTITSGWTFGAGAALQIPFAMQMAYRFNGIGVTQCVLYENQKLIANQFNSAIGKIQDSLSSTASALGKLQDVVNQNAQALNTLVKQLSSNFGAISSVLNDILSRLDKVEAEVQIDRLITGRLQSLQTYVTQQLIRAAEIRASANLAATKMSECVLGQSKRVDFCGKGYHLMSFPQSAPHGVVFLHVTYVPAQEKNFTTAPAICHDGKAHFPREGVFVSNGTHWFVTQRNFYEPQIITTDNTFVCGNCDVVIGIVNNTVYDPLQPELDS

SEQ ID NO: 13494 - protein, 1147 aa, Artificial Sequence
  SARS-CoV-2/Iceland/189/2020__EPI_ISL_417709 spike protein (1-1147)(N914C_S1123C)
MFVFLVLLPLVSSQCVNLTTRTQLPPAYTNSFTRGVYYPDKVFRSSVLHSTQDLFLPFFSNVTWFHAIHVSGTNGTKRFDNPVLPFNDGVYFASTEKSNIIRGWIFGTTLDSKTQSLLIVNNATNVVIKVCEFQFCNDPFLGVYYHKNNKSWMESEFRVYSSANNCTFEYVSQPFLMDLEGKQGNFKNLREFVFKNIDGYFKIYSKHTPINLVRDLPQGFSALEPLVDLPIGINITRFQTLLALHRSYLTPGDSSSGWTAGAAAYYVGYLQPRTFLLKYNENGTITDAVDCALDPLSETKCTLKSFTVEKGIYQTSNFRVQPTESIVRFPNITNLCPFGEVFNATRFASVYAWNRKRISNCVADYSVLYNSASFSTFKCYGVSPTKLNDLCFTNVYADSFVIRGDEVRQIAPGQTGKIADYNYKLPDDFTGCVIAWNSNNLDSKVGGNYNYLYRLFRKSNLKPFERDISTEIYQAGSTPCNGVEGFNCYFPLQSYGFQPTNGVGYQPYRVVVLSFELLHAPATVCGPKKSTNLVKNKCVNFNFNGLTGTGVLTESNKKFLPFQQFGRDIADTTDAVRDPQTLEILDITPCSFGGVSVITPGTNTSNQVAVLYQGVNCTEVPVAIHADQLTPTWRVYSTGSNVFQTRAGCLIGAEHVNNSYECDIPIGAGICASYQTQTNSPRRARSVASQSIIAYTMSLGAENSVAYSNNSIAIPTNFTISVTTEILPVSMTKTSVDCTMYICGDSTECSNLLLQYGSFCTQLNRALTGIAVEQDKNTQEVFAQVKQIYKTPPIKDFGGFNFSQILPDPSKPSKRSFIEDLLFNKVTLADAGFTKQYGDCLGDIAARDLICAQKFNGLTVLPPLLTDEMIAQYTSALLAGTITSGWTFGAGAALQIPFAMQMAYRFNGIGVTQCVLYENQKLIANQFNSAIGKIQDSLSSTASALGKLQDVVNQNAQALNTLVKQLSSNFGAISSVLNDILSRLDKVEAEVQIDRLITGRLQSLQTYVTQQLIRAAEIRASANLAATKMSECVLGQSKRVDFCGKGYHLMSFPQSAPHGVVFLHVTYVPAQEKNFTTAPAICHDGKAHFPREGVFVSNGTHWFVTQRNFYEPQIITTDNTFVCGNCDVVIGIVNNTVYDPLQPELDS

SEQ ID NO: 13495 - protein, 1147 aa, Artificial Sequence
  SARS-CoV-2/Australia/NSW56/2020__EPI_ISL_417408 spike protein (1-1147)(N914C_S1123C)
MFVFLVLLPLVSSQCVNLTTRTQLPPAYTNSFTRGVYYPDKVFRSSVLHSTQDLFLPFFSNVTWFHAIHVSGTNGTKRFDNPVLPFNDGVYFASTEKSNIIRGWIFGTTLDSKTQSLLIVNNATNVVIKVCEFQFCNDPFLGVYYHKNNKSWMESEFRVYSSANNCTFEYVSQPFLMDLEGKQGNFKNLREFVFKNIDGYFKIYSKHTPINLVRDLPQGFSALEPLVDLPIGINITRFQTLLALHRSYLTPGDSSSGWTAGAAAYYVGYLQPRTFLLKYNENGTITDAVDCALDPLSETKCTLKSFTVEKGIYQTSNFRVQPTESIVRFPNITNLCPFGEVFNATRFASVYAWNRKRISNCVADYSVLYNSASFSTFKCYGVSPTKLNDLCFTNVYADSFVIRGDEVRQIAPGQTGKIADYNYKLPDDFTGCVIAWNSNNLDSKVGGNYNYLYRLFRKSNLKPFERDISTEIYQAGSTPCNGVEGFNCYFPLQSYGFQPTNGVGYQPYRVVVLSFELLHAPATVCGPKKSTNLVKNKCVNFNFNGLTGTGVLTESNKKFLPFQQFGRDIADTTDAVRDPQTLEILDITPCSFGGVSVITPGTNTSNQVAVLYQDVNCTEVPVAIHADQLTPTWRVYSTGSNVFQTRAGCLIGAEHVNNSYECDIPIGAGICASYQTQTNSPRRARSVASQSIIAYTMSLGAENSVAYSNNSIAIPTNFTISVTTEILPVSMTKTSVDCTMYICGDSTECSNLLLQYGSFCTQLNRALTGIAVEQDKNTQEVFAQVKQIYKTPPIKDFGGFNFSQILPDSSKPSKRSFIEDLLFNKVTLADAGFIKQYGDCLGDIAARDLICAQKFNGLTVLPPLLTDEMIAQYTSALLAGTITSGWTFGAGAALQIPFAMQMAYRFNGIGVTQCVLYENQKLIANQFNSAIGKIQDSLSSTASALGKLQDVVNQNAQALNTLVKQLSSNFGAISSVLNDILSRLDKVEAEVQIDRLITGRLQSLQTYVTQQLIRAAEIRASANLAATKMSECVLGQSKRVDFCGKGYHLMSFPQSAPHGVVFLHVTYVPAQEKNFTTAPAICHDGKAHFPREGVFVSNGTHWFVTQRNFYEPQIITTDNTFVCGNCDVVIGIVNNTVYDPLQPELDS

SEQ ID NO: 13496 - protein, 1147 aa, Artificial Sequence
  SARS-CoV-2/Iceland/280/2020__EPI_ISL_417608 spike protein (1-1147)(N914C_S1123C)
MFVFLVLLPLVSSQCVNLTTRTQLPPAYTNSFTRGVYYPDKVFRSSVLHSTQDLFLPFFSNVTWFHAIHVSGTNGTKRFDNPVLPFNDGVYFASTEKSNIIRGWIFGTTLDSKTQSLLIVNNATNVVIKVCEFQFCNDPFLGVYYHKNNKSWMESEFRVYSSANNCTFEYVSQPFLMDLEGKQGNFKNLREFVFKNIDGYFKIYSKHTPINLVRDLPQGFSALEPLVDLPIGINITRFQTLLALHRSYLTPGDSSSGWTAGAAAYYVGYLQPRTFLLKYNENGTITDAVDCALDPLSETKCTLKSFTVEKGIYQTSNFRVQPTESIVRFPNITNLCPFGEVFNATRFASVYAWNRKRISNCVADYSVLYNSASFSTFKCYGVSPTKLNDLCFTNVYADSFVIRGDEVRQIAPGQTGKIADYNYKLPDDFTGCVIAWNSNNLDSKVGGNYNYLYRLFRKSNLKPFERDISTEIYQAGSTPCNGVEGFNCYFPLQSYGFQPTNGVGYQPYRVVVLSFELLHAPATVCGPKKSTNLVKNKCVNFNFNGLTGTGVLTESNKKFLPFQQFGRDIADTTDAVRDPQTLEILDITPCSFGGVSVITPGTNTSNQVAVLYQGVNCTEVPVAIHADQLTPTWRVYSTGSNVFQTRAGCLIGAEHVNNSYECDIPIGAGICASYHTQTNSPRRARSVASQSIIAYTMSLGAENSVAYSNNSIAIPTNFTISVTTEILPVSMTKTSVDCTMYICGDSTECSNLLLQYGSFCTQLNRALTGIAVEQDKNTQEVFAQVKQIYKTPPIKDFGGFNFSQILPDPSKPSKRSFIEDLLFNKVTLADAGFIKQYGDCLGDIAARDLICAQKFNGLTVLPPLLTDEMIAQYTSALLAGTITSGWTFGAGAALQIPFAMQMAYRFNGIGVTQCVLYENQKLIANQFNSAIGKIQDSLSSTASALGKLQDVVNQNAQALNTLVKQLSSNFGAISSVLNDILSRLDKVEAEVQIDRLITGRLQSLQTYVTQQLIRAAEIRASANLAATKMSECVLGQSKRVDFCGKGYHLMSFPQSAPHGVVFLHVTYVPAQEKNFTTAPAICHDGKAHFPREGVFVSNGTHWFVTQRNFYEPQIITTDNTFVCGNCDVVIGIVNNTVYDPLQPELDS

SEQ ID NO: 13497 - protein, 1147 aa, Artificial Sequence; identical to SEQ ID NO: 13452
  SARS-CoV-2/Iceland/247/2020__EPI_ISL_417575 spike protein (1-1147)(N914C_S1123C)

SEQ ID NO: 13498 - protein, 1147 aa, Artificial Sequence
  SARS-CoV-2/Iceland/238/2020__EPI_ISL_417566 spike protein (1-1147)(N914C_S1123C)
MFVFLVLLPLVSSQCVNLTTRTQLPPAYTNSFTRGVYYPDKVFRSSVLHSTQDLFLPFFSNVTWFHAIHVSGTNGTKRFDNPVLPFNDGVYFASTEKSNIIRGWIFGTTLDSKTQSLLIVNNATNVVIKVCEFQFCNDPFLGVYYHKNNKSWMESEFRVYSSANNCTFEYVSQPFLMDLEGKQGNFKNLREFVFKNIDGYFKIYSKHTPINLVRDLPQGFSALEPLVDLPIGINITRFQTLLALHRSYLTPGDSSSGWTAGAAAYYVGYLQPRTFLLKYNENGTITDAVDCALDPLSETKCTLKSFTVEKGIYQTSNFRVQPTESIVRFPNITNLCPFGEVFNATRFASVYAWNRKRISNCVADYSVLYNSASFSTFKCYGVSPTKLNDLCFTNVYADSFVIRGDEVRQIAPGQTGKIADYNYKLPDDFTGCVIAWNSNNLDSKVGGNYNYLYRLFRKSNLKPFERDISTEIYQAGSTPCNGVEGFNCYFPLQSYGFQPTNGVGYQPYRVVVLSFELLHAPATVCGPKKSTNLVKNKCVNFNFNGLTGTGVLTESNKKFLPFQQFGRDIADTTDAVRDPQTLEILDITPCSFGGVSVITPGTNTSNQVAVLYQGVNCTEVPVAIHADQLTPTWRVYSTGSNVFQTRAGCLIGAEHVNNSYECDIPIGAGICASYQTQTNSPRRARSVASQSIIAYTMSLGAENSVAYSNNSIAIPTNFTISVTTEILPVSMTKTSVDCTMYICGDSTECSNLLLQYGSFCTQLNRALTGIAVEQDKNTQEVFAQVKQIYKTPPIKDFGGFNFSQILPDPSKPSKRSFIEDLLFNKVTLADVGFIKQYGDCLGDIAARDLICAQKFNGLTVLPPLLTDEMIAQYTSALLAGTITSGWTFGAGAALQIPFAMQMAYRFNGIGVTQCVLYENQKLIANQFNSAIGKIQDSLSSTASALGKLQDVVNQNAQALNTLVKQLSSNFGAISSVLNDILSRLDKVEAEVQIDRLITGRLQSLQTYVTQQLIRAAEIRASANLAATKMSECVLGQSKRVDFCGKGYHLMSFPQSAPHGVVFLHVTYVPAQEKNFTTAPAICHDGKAHFPREGVFVSNGTHWFVTQRNFYEPQIITTDNTFVCGNCDVVIGIVNNTVYDPLQPELDS

SEQ ID NO: 13499 - protein, 1147 aa, Artificial Sequence
  SARS-CoV-2/Greece/16/2020__EPI_ISL_418265 spike protein (1-1147)(N914C_S1123C)
MFVFLVLLPLVSSQCVNLTTRTQLPPAYTNSFTRGVYYPDKVFRSSVLHSTQDLFLPFFSNVTWFHAIHVSGTNGTKRFDNPVLPFNDGVYFASTEKSNIIRGWIFGTTLDSKTQSLLIVNNATNVVIKVCEFQFCNDPFLGVYYHKNNKSWMESEFRVYSSANNCTFEYVSQPFLMDLEGKQGNFKNLREFVFKNVDGYFKIYSKHTPINLVRDLPQGFSALEPLVDLPIGINITRFQTLLALHRSYLTPGDSSSGWTAGAAAYYVGYLQPRTFLLKYNENGTITDAVDCALDPLSETKCTLKSFTVEKGIYQTSNFRVQPTESIVRFPNITNLCPFGEVFNATRFASVYAWNRKRISNCVADYSVLYNSASFSTFKCYGVSPTKLNDLCFTNVYADSFVIRGDEVRQIAPGQTGKIADYNYKLPDDFTGCVIAWNSNNLDSKVGGNYNYLYRLFRKSNLKPFERDISTEIYQAGSTPCNGVEGFNCYFPLQSYGFQPTNGVGYQPYRVVVLSFELLHAPATVCGPKKSTNLVKNKCVNFNFNGLTGTGVLTESNKKFLPFQQFGRDIADTTDAVRDPQTLEILDITPCSFGGVSVITPGTNTSNQVAVLYQDVNCTEVPVAIHADQLTPTWRVYSTGSNVFQTRAGCLIGAEHVNNSYECDIPIGAGICASYQTQTNSPRRARSVASQSIIAYTMSLGAENSVAYSNNSIAIPTNFTISVTTEILPVSMTKTSVDCTMYICGDSTECSNLLLQYGSFCTQLNRALTGIAVEQDKNTQEVFAQVKQIYKTPPIKDFGGFNFSQILPDPSKPSKRSFIEDLLFNKVTLADAGFIKQYGDCLGDIAARDLICAQKFNGLTVLPPLLTDEMIAQYTSALLAGTITSGWTFGAGAALQIPFAMQMAYRFNGIGVTQCVLYENQKLIANQFNSAIGKIQDSLSSTASALGKLQDVVNQNAQALNTLVKQLSSNFGAISSVLNDILSRLDKVEAEVQIDRLITGRLQSLQTYVTQQLIRAAEIRASANLAATKMSECVLGQSKRVDFCGKGYHLMSFPQSAPHGVVFLHVTYVPAQEKNFTTAPAICHDGKAHFPREGVFVSNGTHWFVTQRNFYEPQIITTDNTFVCGNCDVVIGIVNNTVYDPLQPELDS

SEQ ID NO: 13500 - protein, 1147 aa, Artificial Sequence
  SARS-CoV-2/Iceland/319/2020__EPI_ISL_417648 spike protein (1-1147)(N914C_S1123C)
MFVFLVLLPLVSSQCVNLTTRTQLPPAYTNSFTRGVYYPDKVFRSSVLHSTQDLFLPFFSNVTWFHAIHVSGTNGTKRFDNPVLPFNDGVYFASTEKSNIIRGWIFGTTLDSKTQSLLIVNNATNVVIKVCEFQFCNDPFLGVYYHKNNKSWMESEFRVYSSANNCTFEYVSQPFLIDLEGKQGNFKNLREFVFKNIDGYFKIYSKHTPINLVRDLPQGFSALEPLVDLPIGINITRFQTLLALHRSYLTPGDSSSGWTAGAAAYYVGYLQPRTFLLKYNENGTITDAVDCALDPLSETKCTLKSFTVEKGIYQTSNFRVQPTESIVRFPNITNLCPFGEVFNATRFASVYAWNRKRISNCVADYSVLYNSASFSTFKCYGVSPTKLNDLCFTNVYADSFVIRGDEVRQIAPGQTGKIADYNYKLPDDFTGCVIAWNSNNLDSKVGGNYNYLYRLFRKSNLKPFERDISTEIYQAGSTPCNGVEGFNCYFPLQSYGFQPTNGVGYQPYRVVVLSFELLHAPATVCGPKKSTNLVKNKCVNFNFNGLTGTGVLTESNKKFLPFQQFGRDIADTTDAVRDPQTLEILDITPCSFGGVSVITPGTNTSNQVAVLYQGVNCTEVPVAIHADQLTPTWRVYSTGSNVFQTRAGCLIGAEHVNNSYECDIPIGAGICASYQTQTNSPRRARSVASQSIIAYTMSLGAENSVAYSNNSIAIPTNFTISVTTEILPVSMTKTSVDCTMYICGDSTECSNLLLQYGSFCTQLNRALTGIAVEQDKNTQEVFAQVKQIYKTPPIKDFGGFNFSQILPDPSKPSKRSFIEDLLFNKVTLADAGFIKQYGDCLGDIAARDLICAQKFNGLTVLPPLLTDEMIAQYTSALLAGTITSGWTFGAGAALQIPFAMQMAYRFNGIGVTQCVLYENQKLIANQFNSAIGKIQDSLSSTASALGKLQDVVNQNAQALNTLVKQLSSNFGAISSVLNDILSRLDKVEAEVQIDRLITGRLQSLQTYVTQQLIRAAEIRASANLAATKMSECVLGQSKRVDFCGKGYHLMSFPQSAPHGVVFLHVTYVPAQEKNFTTAPAICHDGKAHFPREGVFVSNGTHWFVTQRNFYEPQIITTDNTFVCGNCDVVIGIVNNTVYDPLQPELDS

SEQ ID NO: 13501 - protein, 1147 aa, Artificial Sequence
  SARS-CoV-2/Congo/94/2020__EPI_ISL_417947 spike protein (1-1147)(N914C_S1123C)
MFVFLVLLPLVSSQCVNLTTRTQLPPAYTNSFTRGVYYPDKVFRSSVLHSTQDLFLPFFSNVTWFHAIHVSGTNGTKRFDNPVLPFNDGVYFASTEKSNIIRGWIFGTTLDSKTQSLLIVNNATNVVIKVCEFQFCNDPFLGVYYHKNNKSWMESEFRVYSSANNCTFEYVSQPFLMDLEGKQGNFKNLREFVFKNIDGYFKIYSKHTPINLVRDLPQGFSALEPLVDLPIGINITRFQTLLALHRSYLTPGDSSSGWTAGAAAYYVGYLQPRTFLLKYNENGTITDAVDCALDPLSETKCTLKSFTVEKGIYQTSNFRVQPTESIVRFPNITNLCPFGEVFNATRFASVYAWNRKRISNCVADYSVLYNSASFSTFKCYGVSPTKLNDLCFTNVYADSFVIRGDEVRQIAPGQTGKIADYNYKLPDDFTGCVIAWNSNNLDSKVGGNYNYLYRLFRKSNLKPFERDISTEIYQAGSTPCNGVEGFNCYFPLQSYGFQPTNGVGYQPYRVVVLSFELLHAPATVCGPKKSTNLVKNKCVNFNFNGLTGTGVLTESNKKFLPFQQFGRDIADTTDAVRDPQTLEILDITPCSFGGVSVITPGTNTSNQVAVLYQGVNCTEVPVAIHADQLTPTWRVYSTGSNVFQTRAGCLIGAEHVNNSYECDIPIGAGICASYQTQTNSPRRARSVASQSIIAYTMSLGAENSVAYSNNSIAIPTNFTISVTTEILPVSMTKTSVDCTMYICGDSTECSNLLLQYGSFCTQLNRALTGIAVEQDKNTQEVFAQVKQIYKTPPIKDFGGFNFSQILPDPSKPSKRSFIEDILFNKVTLADAGFIKQYGDCLGDIAARDLICAQKFNGLTVLPPLLTDEMIAQYTSALLAGTITSGWTFGAGAALQIPFAMQMAYRFNGIGVTQCVLYENQKLIANQFNSAIGKIQDSLSSTASALGKLQDVVNQNAQALNTLVKQLSSNFGAISSVLNDILSRLDKVEAEVQIDRLITGRLQSLQTYVTQQLIRAAEIRASANLAATKMSECVLGQSKRVDFCGKGYHLMSFPQSAPHGVVFLHVTYVPAQEKNFTTAPAICHDGKAHFPREGVFVSNGTHWFVTQRNFYEPQIITTDNTFVCGNCDVVIGIVNNTVYDPLQPELDS

SEQ ID NO: 13502 - protein, 1147 aa, Artificial Sequence
  SARS-CoV-2/Congo/158/2020__EPI_ISL_417950 spike protein (1-1147)(N914C_S1123C)
MFVFLVLLPLVSSQCVNLTTRTQLPPAYTNSFTRGVYYPDKVFRSSVLHSTQDLFLPFFSNVTWFHAIHVSGTNGTKRFDNPVLPFNDGVYFASTEKSNIIRGWIFGTTLDSKTQSLLIVNNATNVVIKVCEFQFCNDPFLGVYYHKNNKSWMESEFRVYSSANNCTFEYVSQPFLMDLEGKQGNFKNLREFVFKNIDGYFKIYSKHTPINLVRDLPQGFSALEPLVDLPIGINITRFQTLLALHRSYLTPGDSSSGWTAGAAAYYVGYLQPRTFLLKYNENGTITDAVDCALDPLSETKCTLKSFTVEKGIYQTSNFRVQPTESIVRFPNITNLCPFGEVFNATRFASVYAWNRKRISNCVADYSVLYNSASFSTFKCYGVSPTKLNDLCFTNVYADSFVIRGDEVRQIAPGQTGKIADYNYKLPDDFTGCVIAWNSNNLDSKVGGNYNYLYRLFRKSNLKPFERDISTEIYQAGSTPCNGVEGFNCYFPLQSYGFQPTNGVGYQPYRVVVLSFELLHAPATVCGPKKSTNLVKNKCVNFNFNGLTGTGVLTESNKKFLPFQQFGRDIADTTDAVRDPQTLEILDITPCSFGGVSVITPGTNTSNQVAVLYQDVNCTEVPVAIHADQLTPTWRVYSTGSNVFQTRAGCLIGAEHVNNSYECDIPIGAGICASYQTQTNSPRRARSVASQSIIAYTMSLGAENSVAYSNNSIAIPTNFTISVTTEILPVSMTKTSVDCTMYICGDSTECSNLLLQYGSFCTQLNRALTGIAVEQDKNTQEVFAQVKQIYKTPPIKDFGGFNFSQILPDPSKPSKRSFIEDLLFNKVTLADAGFIKQYGDCLGDIAARDLICAQKFNGLTVLPPLLTDEMIAQYTSALLAGTITSGWTFGAGAALQIPFAMQMAYRFNGIGVTQCVLYENQKLIANQFNSAIGKIQDSLSSTASALGKLQDVVNQNAQALNTLVKQLSSNFGAISSVLNDILSRLDKVEAEVQIDRLITGRLQSLQTYVTQQLIRAAEIRASANLAATKMSECVLGQSKRVDFCGKGYHLMSFPQSAPHGVVFLHVTYVPAQEKNFTTAPAICHDGKAHFPREGVFVSNGTHWFVTQRNFYEPQIITTDNTFLCGNCDVVIGIVNNTVYDPLQPELDS

SEQ ID NO: 13503 - protein, 1147 aa, Artificial Sequence
  SARS-CoV-2/USA/UT-00034/2020__EPI_ISL_417977 spike protein (1-1147)(N914C_S1123C)
MFVFLVLLPLVSSQCVNLTTRTQLPPAYTNSFTRGVYYPDKVFRSSVLHSTQDLFLPFFSNVTWFHAIHVSGTNGTKRFDNPVLPFNDGVYFASTEKSNIIRGWIFGTTLDSKTQSLLIVNNATNVVIKVCEFQFCNDPFLGVYYYKNNKSWMESEFRVYSSANNCTFEYVSQPFLMDLEGKQGNFKNLREFVFKNIDGYFKIYSKHTPINLVRDLPQGFSALEPLVDLPIGINITRFQTLLALHRSYLTPGDSSSGWTAGAAAYYVGYLQPRTFLLKYNENGTITDAVDCALDPLSETKCTLKSFTVEKGIYQTSNFRVQPTESIVRFPNITNLCPFGEVFNATRFASVYAWNRKRISNCVADYSVLYNSASFSTFKCYGVSPTKLNDLCFTNVYADSFVIRGDEVRQIAPGQTGKIADYNYKLPDDFTGCVIAWNSNNLDSKVGGNYNYLYRLFRKSNLKPFERDISTEIYQAGSTPCNGVEGFNCYFPLQSYGFQPTNGVGYQPYRVVVLSFELLHAPATVCGPKKSTNLVKNKCVNFNFNGLTGTGVLTESNKKFLPFQQFGRDIADTTDAVRDPQTLEILDITPCSFGGVSVITPGTNTSNQVAVLYQGVNCTEVPVAIHADQLTPTWRVYSTGSNVFQTRAGCLIGAEHVNNSYECDIPIGAGICASYQTQTNSPRRARSVASQSIIAYTMSLGAENSVAYSNNSIAIPTNFTISVTTEILPVSMTKTSVDCTMYICGDSTECSNLLLQYGSFCTQLNRALTGIAVEQDKNTQEVFAQVKQIYKTPPIKDFGGFNFSQILPDPSKPSKRSFIEDLLFNKVTLADAGFIKQYGDCLGDIAARDLICAQKFNGLTVLPPLLTDEMIAQYTSALLAGTITSGWTFGAGAALQIPFAMQMAYRFNGIGVTQCVLYENQKLIANQFNSAIGKIQDSLSSTASALGKLQDVVNQNAQALNTLVKQLSSNFGAISSVLNDILSRLDKVEAEVQIDRLITGRLQSLQTYVTQQLIRAAEIRASANLAATKMSECVLGQSKRVDFCGKGYHLMSFPQSAPHGVVFLHVTYVPAQEKNFTTAPAICHDGKAHFPREGVFVSNGTHWFVTQRNFYEPQIITTDNTFVCGNCDVVIGIVNNTVYDPLQPELDS

SEQ ID NO: 13504 - protein, 1147 aa, Artificial Sequence
  SARS-CoV-2/USA/UT-00033/2020__EPI_ISL_417976 spike protein (1-1147)(N914C_S1123C)
MFVFLVLLPLVSSQCVNLTTRTQLPPAYTNSFTRGVYYPDKVFRSSVLHSTQDLFLPFFSNVTWFHAIHVSGTNGTKRFDNPVLPFNDGVYFASTEKSNIIRGWIFGTTLDSKTQSLLIVNNATNVVIKVCEFQFCNDPFLGVYYHKNNKSWMESEFRVYSSANNCTFEYVSQPFLMDLEGKQGNFKNLREFVFKNIDGYFKIYSKHTPINLVRDLPQGFSALEPLVDLPIGINITRFQTLLALHRSYLTPGDSSSGLTAGAAAYYVGYLQPRTFLLKYNENGTITDAVDCALDPLSETKCTLKSFTVEKGIYQTSNFRVQPTESIVRFPNITNLCPFGEVFNATRFASVYAWNRKRISNCVADYSVLYNSASFSTFKCYGVSPTKLNDLCFTNVYADSFVIRGDEVRQIAPGQTGKIADYNYKLPDDFTGCVIAWNSNNLDSKVGGNYNYLYRLFRKSNLKPFERDISTEIYQAGSTPCNGVEGFNCYFPLQSYGFQPTNGVGYQPYRVVVLSFELLHAPATVCGPKKSTNLVKNKCVNFNFNGLTGTGVLTESNKKFLPFQQFGRDIADTTDAVRDPQTLEILDITPCSFGGVSVITPGTNTSNQVAVLYQGVNCTEVPVAIHADQLTPTWRVYSTGSNVFQTRAGCLIGAEHVNNSYECDIPIGAGICASYQTQTNSPRRARSVASQSIIAYTMSLGAENSVAYSNNSIAIPTNFTISVTTEILPVSMTKTSVDCTMYICGDSTECSNLLLQYGSFCTQLNRALTGIAVEQDKNTQEVFAQVKQIYKTPPIKDFGGFNFSQILPDPSKPSKRSFIEDLLFNKVTLADAGFIKQYGDCLGDIAARDLICAQKFNGLTVLPPLLTDEMIAQYTSALLAGTITSGWTFGAGAALQIPFAMQMAYRFNGIGVTQCVLYENQKLIANQFNSAIGKIQDSLSSTASALGKLQDVVNQNAQALNTLVKQLSSNFGAISSVLNDILSRLDKVEAEVQIDRLITGRLQSLQTYVTQQLIRAAEIRASANLAATKMSECVLGQSKRVDFCGKGYHLMSFPQSAPHGVVFLHVTYVPAQEKNFTTAPAICHDGKAHFPREGVFVSNGTHWFVTQRNFYEPQIITTDNTFVCGNCDVVIGIVNNTVYDPLQPELDS

SEQ ID NO: 13505 - protein, 1147 aa, Artificial Sequence
  SARS-CoV-2/USA/WI-13/2020__EPI_ISL_417516 spike protein (1-1147)(N914C_S1123C)
MFVFLVLLPLVSSQCVNLTTRTQLPPAYTNSFTRGVYYPDKVFRSSVLHSTQDLFLPFFSNVTWFHAIHVSGTNGTKRFDNPVLPFNDGVYFASTEKSNIIRGWIFGTTLDSKTQSLLIVNNATNVVIKVCEFQFCNDPFLGVYYHKNNKSWMESEFRVYSSANNCTFEYVSQPFLMDLEGKQGNFKNLREFVFKNIDGYFKIYSKHTPINLVRDLPQGFSALEPLVDLPIGINITRFQTLLALHRSYLTPGDSSSGWTAGAAAYYVGYLQPRTFLLKYNENGTITDAVDCALDPLSETKCTLKSFTVEKGIYQTSNFRVLPTESIVRFPNITNLCPFGEVFNATRFASVYAWNRKRISNCVADYSVLYNSASFSTFKCYGVSPTKLNDLCFTNVYADSFVIRGDEVRQIAPGQTGKIADYNYKLPDDFTGCVIAWNSNNLDSKVGGNYNYLYRLFRKSNLKPFERDISTEIYQAGSTPCNGVEGFNCYFPLQSYGFQPTNGVGYQPYRVVVLSFELLHAPATVCGPKKSTNLVKNKCVNFNFNGLTGTGVLTESNKKFLPFQQFGRDIADTTDAVRDPQTLEILDITPCSFGGVSVITPGTNTSNQVAVLYQGVNCTEVPVAIHADQLTPTWRVYSTGSNVFQTRAGCLIGAEHVNNSYECDIPIGAGICASYQTQTNSPRRARSVASQSIIAYTMSLGAENSVAYSNNSIAIPTNFTISVTTEILPVSMTKTSVDCTMYICGDSTECSNLLLQYGSFCTQLNRALTGIAVEQDKNTQEVFAQVKQIYKTPPIKDFGGFNFSQILPDPSKPSKRSFIEDLLFNKVTLADAGFIKQYGDCLGDIAARDLICAQKFNGLTVLPPLLTDEMIAQYTSALLAGTITSGWTFGAGAALQIPFAMQMAYRFNGIGVTQCVLYENQKLIANQFNSAIGKIQDSLSSTASALGKLQDVVNQNAQALNTLVKQLSSNFGAISSVLNDILSRLDKVEAEVQIDRLITGRLQSLQTYVTQQLIRAAEIRASANLAATKMSECVLGQSKRVDFCGKGYHLMSFPQSAPHGVVFLHVTYVPAQEKNFTTAPAICHDGKAHFPREGVFVSNGTHWFVTQRNFYEPQIITTDNTFVCGNCDVVIGIVNNTVYDPLQPELDS

SEQ ID NO: 13506 - protein, 1146 aa, Artificial Sequence
  SARS-CoV-2/India/1-27/2020__EPI_ISL_413522 spike protein (1-1146)(N913C_S1122C)
MFVFLVLLPLVSSQCVNLTTRTQLPPAYTNSFTRGVYYPDKVFRSSVLHSTQDLFLPFFSNVTWFHAIHVSGTNGTKRFDNPVLPFNDGVYFASTEKSNIIRGWIFGTTLDSKTQSLLIVNNATNVVIKVCEFQFCNDPFLGVYHKNNKSWMESEFRVYSSANNCTFEYVSQPFLMDLEGKQGNFKNLREFVFKNIDGYFKIYSKHTPINLVRDLPQGFSALEPLVDLPIGINITRFQTLLALHRSYLTPGDSSSGWTAGAAAYYVGYLQPRTFLLKYNENGTITDAVDCALDPLSETKCTLKSFTVEKGIYQTSNFRVQPTESIVRFPNITNLCPFGEVFNATRFASVYAWNRKRISNCVADYSVLYNSASFSTFKCYGVSPTKLNDLCFTNVYADSFVIRGDEVIQIAPGQTGKIADYNYKLPDDFTGCVIAWNSNNLDSKVGGNYNYLYRLFRKSNLKPFERDISTEIYQAGSTPCNGVEGFNCYFPLQSYGFQPTNGVGYQPYRVVVLSFELLHAPATVCGPKKSTNLVKNKCVNFNFNGLTGTGVLTESNKKFLPFQQFGRDIADTTDAVRDPQTLEILDITPCSFGGVSVITPGTNTSNQVAVLYQDVNCTEVPVAIHADQLTPTWRVYSTGSNVFQTRAGCLIGAEHVNNSYECDIPIGAGICASYQTQTNSPRRARSVASQSIIAYTMSLGAENSVAYSNNSIAIPTNFTISVTTEILPVSMTKTSVDCTMYICGDSTECSNLLLQYGSFCTQLNRALTGIAVEQDKNTQEVFAQVKQIYKTPPIKDFGGFNFSQILPDPSKPSKRSFIEDLLFNKVTLADAGFIKQYGDCLGDIAARDLICAQKFNGLTVLPPLLTDEMIAQYTSALLAGTITSGWTFGAGAALQIPFAMQMAYRFNGIGVTQCVLYENQKLIANQFNSAIGKIQDSLSSTASALGKLQDVVNQNAQALNTLVKQLSSNFGAISSVLNDILSRLDKVEAEVQIDRLITGRLQSLQTYVTQQLIRAAEIRASANLAATKMSECVLGQSKRVDFCGKGYHLMSFPQSAPHGVVFLHVTYVPAQEKNFTTAPAICHDGKAHFPREGVFVSNGTHWFVTQRNFYEPQIITTDNTFVCGNCDVVIGIVNNTVYDPLQPELDS

SEQ ID NO: 13507 - protein, 1141 aa, Artificial Sequence
  SARS-CoV-2/pangolin/Guangxi/P4L/2017__EPI_ISL_410538 spike protein (1-1141)(N908C_S1117C)
MFVFLFVLPLVSSQCVNLTTRTGIPPGYTNSSTRGVYYPDKVFRSSILHLTQDLFLPFFSNVTWFNTINYQGGFKKFDNPVLPFNDGVYFASTEKSNIIRGWIFGTTLDARTQSLLIVNNATNVVIKVCEFQFCTDPFLGVYYHNNNKTWVENEFRVYSSANNCTFEYISQPFLMDLEGKQGNFKNLREFVFKNVDGYFKIYSKHTPIDLVRDLPRGFAALEPLVDLPIGINITRFQTLLALHRSYLTPGNLESGWTTGAAAYYVGYLQQRTFLLSYNQNGTITDAVDCSLDPLSETKCTLKSLTVEKGIYQTSNFRVQPTISIVRFPNITNLCPFGEVFNASKFASVYAWNRKRISNCVADYSVLYNSTSFSTFKCYGVSPTKLNDLCFTNVYADSFVVKGDEVRQIAPGQTGVIADYNYKLPDDFTGCVIAWNSVKQDALTGGNYGYLYRLFRKSKLKPFERDISTEIYQAGSTPCNGQVGLNCYYPLERYGFHPTTGVNYQPFRVVVLSFELLNGPATVCGPKLSTTLVKDKCVNFNFNGLTGTGVLTTSKKQFLPFQQFGRDISDTTDAVRDPQTLEILDITPCSFGGVSVITPGTNTSNQVAVLYQDVNCTEVPMAIHAEQLTPAWRVYSAGANVFQTRAGCLVGAEHVNNSYECDIPVGAGICASYHSMSSLRSVNQRSIIAYTMSLGAENSVAYSNNSIAIPTNFTISVTTEILPVSMTKTSVDCTMYICGDSIECSNLLLQYGSFCTQLNRALTGIAVEQDKNTQEVFAQVKQIYKTPPIKDFGGFNFSQILPDPSKPSKRSFIEDLLFNKVTLADAGFIKQYGDCLGDIAARDLICAQKFNGLTVLPPLLTDEMIAQYTSALLAGTITSGWTFGAGAALQIPFAMQMAYRFNGIGVTQCVLYENQKLIANQFNSAIGKIQDSLSSTASALGKLQDVVNQNAQALNTLVKQLSSNFGAISSVLNDILSRLDKVEAEVQIDRLITGRLQSLQTYVTQQLIRAAEIRASANLAATKMSECVLGQSKRVDFCGKGYHLMSFPQSAPHGVVFLHVTYVPAQEKNFTTAPAICHEGKAHFPREGVFVSNGTHWFITQRNFYEPQIITTDNTFVCGSCDVVIGIVNNTVYDPLQPELDS

SEQ ID NO: 13508 - protein, 1141 aa, Artificial Sequence
  SARS-CoV-2/pangolin/Guangxi/P5L/2017__EPI_ISL_410540 spike protein (1-1141)(N908C_S1117C)
MFVFLFVLPLVSSQCVNLTTRTGIPPGYTNSSTRGVYYPDKVFRSSILHLTQDLFLPFFSNVTWFNTINYQGGFKKFDNPVLPFNDGVYFASTEKSNIIRGWIFGTTLDARTQSLLIVNNATNVVIKVCEFQFCTDPFLGVYYHNNNKTWVENEFRVYSSANNCTFEYISQPFLMDLEGKQGNFKNLREFVFKNVDGYFKIYSKHTPIDLVRDLPRGFAALEPLVDLPIGINITRFQTLLALHRSYLTPGKLESGWTTGAAAYYVGYLQQRTFLLSYNQNGTITDAVDCSLDPLSETKCTLKSLTVEKGIYQTSNFRVQPTISIVRFPNITNLCPFGEVFNASKFASVYAWNRKRISNCVADYSVLYNSTSFSTFKCYGVSPTKLNDLCFTNVYADSFVVKGDEVRQIAPGQTGVIADYNYKLPDDFTGCVIAWNSVKQDALTGGNYGYLYRLFRKSKLKPFERDISTEIYQAGSTPCNGQVGLNCYYPLERYGFHPTTGVNYQPFRVVVLSFELLNGPATVCGPKLSTTLVKDKCVNFNFNGLTGTGVLTTSKKQFLPFQQFGRDISDTTDAVRDPQTLEILDITPCSFGGVSVITPGTNTSNQVAVLYQDVNCTEVPMAIHAEQLTPAWRVYSAGANVFQTRAGCLVGAEHVNNSYECDIPVGAGICASYHSMSSFRSVNQRSIIAYTMSLGAENSVAYSNNSIAIPTNFTISVTTEILPVSMTKTSVDCTMYICGDSIECSNLLLQYGSFCTQLNRALTGIAVEQDKNTQEVFAQVKQIYKTPPIKDFGGFNFSQILPDPSKPSKRSFIEDLLFNKVTLADAGFIKQYGDCLGDIAARDLICAQKFNGLTVLPPLLTDEMIAQYTSALLAGTITSGWTFGAGAALQIPFAMQMAYRFNGIGVTQCVLYENQKLIANQFNSAIGKIQDSLSSTASALGKLQDVVNQNAQALNTLVKQLSSNFGAISSVLNDILSRLDKVEAEVQIDRLITGRLQSLQTYVTQQLIRAAEIRASANLAATKMSECVLGQSKRVDFCGKGYHLMSFPQSAPHGVVFLHVTYVPAQEKNFTTAPAICHEGKAHFPREGVFVSNGTHWFITQRNFYEPQIITTDNTFVCGSCDVVIGIVNNTVYDPLQPELDS

SEQ ID NO: 13509 - protein, 1141 aa, Artificial Sequence
  SARS-CoV-2/pangolin/Guangxi/P5E/2017__EPI_ISL_410541 spike protein (1-1141)(N908C_S1117C)
MFVFLFVLPLVSSQCVNLTTRTGIPPGYTNSSTRGVYYPDKVFRSSILHLTQDLFLPFFSNVTWFNTITYQGGSKKFDNPVLPFNDGVYFASTEKSNIIRGWIFGTTLDARTQSLLIVNNATNVVIKVCEFQFCTDPFLGVYYHNNNKTWVENEFRVYSSANNCTFEYISQPFLMDLEGKQGNFKNLREFVFKNVDGYFKIYSKHTPIDLVRDLPRGFAALEPLVDLPIGINITRFQTLLALHRSYLTPGKLESGWTTGAAAYYVGYLQQRTFLLSYNQNGTITDAVDCSLDPLSETKCTLKSLTVEKGIYQTSNFRVQPTISIVRFPNITNLCPFGEVFNASKFASVYAWNRKRISNCVADYSVLYNSTSFSTFKCYGVSPTKLNDLCFTNVYADSFVVKGDEVRQIAPGQTGVIADYNYKLPDDFTGCVIAWNSVKQDALTGDNYGYLYRLFRKSKLKPFERDISTEIYQAGSTPCNGQVGLNCYYPLERYGFHPTTGVNYQPFRVVVLSFELLNGPATVCGPKLSTTLVKDKCVNFNFNGLTGTGVLTTSKKQFLPFQQFGRDISDTTDAVRDPQTLEILDITPCSFGGVSVITPGTNTSNQVAVLYQDVNCTEVPMAIHAEQLTPAWRVYSAGANVFQTRAGCLVGAEHVNNSYECDIPVGAGICASYHSMSSFRSVNQRSIIAYTMSLGAENSVAYSNNSIAIPTNFTISVTTEILPVSMTKTSVDCTMYICGDSIECSNLLLQYGSFCTQLNRALTGIAVEQDKNTQEVFAQVKQIYKTPPIKDFGGFNFSQILPDPSKPSKRSFIEDLLFNKVTLADAGFIKQYGDCLGDIAARDLICAQKFNGLTVLPPLLTDEMIAQYTSALLAGTITSGWTFGAGAALQIPFAMQMAYRFNGIGVTQCVLYENQKLIANQFNSAIGKIQDSLSSTASALGKLQDVVNQNAQALNTLVKQLSSNFGAISSVLNDILSRLDKVEAEVQIDRLITGRLQSLQTYVTQQLIRAAEIRASANLAATKMSECVLGQSKRVDFCGKGYHLMSFPQSAPHGVVFLHVTYVPAQEKNFTTAPAICHEGKAHFPREGVFVSNGTHWFITQRNFYEPQIITTDNTFVCGSCDVVIGIVNNTVYDPLQPELDS

SEQ ID NO: 13510 - protein, 1139 aa, Artificial Sequence
  SARS-CoV-2/pangolin/Guangxi/P1E/2017__EPI_ISL_410539 spike protein (1-1139)(N906C_S1115C)
MFVFLFVLPLVSSQCVNLTTRTGIQPGYTNSSTRGVYYPDKVFRSSILHLTQDLFLPFFSNVTWFNTINYQGGFKKFDNPVLPFNDGVYFASTEKSNIIRGWIFGTTLDARTQSLLIVNNATNVVIKVCEFQFCTDPFLGVYYHNNNKTWVENEFRVYSSANNCTFEYISQPFLMDLEGKQGNFKNLREFVFKNVDGYFKIYSKHTPIDLVRDLPRGFAALEPLVDLPIGINITRFQTLLALHRSYLTPGKLESGWTTGAAAYYVGYLQQRTFLLSYNQNGTITDAVDCSLDPLSETKCTLKSLTVEKGIYQTSNFRVQPTISIVRFPNITNLCPFGEVFNASKFASVYAWNRKRISNCVADYSVLYNSTSFSTFKCYGVSPTKLNDLCFTNVYADSFVVKGDEVRQIAPGQTGVIADYNYKLPDDFTGCVIAWNSVKQDALTGGNYLYRLFRKSKLKPFERDISTEIYQAGSTPCNGQVGLNCYYPLERYGFHPTTGVNYQPFRVVVLSFELLNGPATVCGPKLSTTLVKDKCVNFNFNGLTGTGVLTTSKKQFLPFQQFGRDISDTTDAVRDPQTLEILDITPCSFGGVSVITPGTNTSNQVAVLYQDVNCTEVPMAIHAEQLTPAWRVYSAGANVFQTRAGCLVGAEHVNNSYECDIPVGAGICASYHSMSSLRSVNQRSIIAYTMSLGAENSVAYSNNSIAIPTNFTISVTTEILPVSMTKTSVDCTMYICGDSIECSNLLLQYGSFCTQLNRALTGIAVEQDKNTQEVFAQVKQIYKTPPIKDFGGFNFSQILPDPSKPSKRSFIEDLLFNKVTLADAGFIKQYGDCLGDIAARDLICAQKFNGLTVLPPLLTDEMIAQYTSALLAGTITSGWTFGAGAALQIPFAMQMAYRFNGIGVTQCVLYENQKLIANQFNSAIGKIQDSLSSTASALGKLQDVVNQNAQALNTLVKQLSSNFGAISSVLNDILSRLDKVEAEVQIDRLITGRLQSLQTYVTQQLIRAAEIRASANLAATKMSECVLGQSKRVDFCGKGYHLMSFPQSAPHGVVFLHVTYVPAQEKNFTTAPAICHEGKAHFPREGVFVSNGTHWFITQRNFYEPQIITTDNTFVCGSCDVVIGIVNNTVYDPLQPELDS

SEQ ID NO: 13511 - RNA, 381 nt, Artificial Sequence
  SARS-CoV-2/Wuhan/WIV05/2019__EPI_ISL_402128 spike protein CDS gc (1148-1273)
uucaaggaggagcucgacaaguacuucaagaaccacaccagccccgacgucgaccugggggacaucuccggcaucaacgccagcguggugaacauccagaaggagaucgaccgccugaacgaggucgccaagaaccucaacgagucccugaucgaccugcaggagcucgggaaguacgagcaguacaucaaguggccgugguacaucuggcugggcuucaucgccggccugaucgcgaucgugauggugaccaucaugcucugcugcaugaccagcugcugcuccugccugaaggggugcugcagcugcggcuccugcugcaaguucgacgaggacgacagcgagcccguccugaagggggugaagcuccacuacacguga

SEQ ID NO: 13512 - RNA, 669 nt, Artificial Sequence
  SARS-CoV-2/Wuhan/WIV05/2019__EPI_ISL_402128 spike protein CDS gc (319-541)
cgggugcagcccaccgaguccaucguccgcuucccgaacaucaccaaccugugccccuucggcgagguguucaacgccacccgguucgccagcgucuacgccuggaaccgcaagcggaucuccaacugcguggcggacuacagcgugcuguacaacuccgccagcuucuccacguucaagugcuacggcgucagccccaccaagcucaacgaccugugcuucaccaacguguacgccgacuccuucgugauccgcggggacgagguccggcagaucgcccccggccagaccgggaagaucgccgacuacaacuacaagcugccggacgacuucacgggcugcgugaucgcguggaacagcaacaaccucgacuccaaggucgggggcaacuacaacuaccuguaccgccuguuccgcaagagcaaccucaagcccuucgagcgggacaucuccaccgagaucuaccaggccggcagcacccccugcaacgggguggagggcuucaacugcuacuucccccugcaguccuacggguuccagccgaccaacggcgugggguaccagcccuaccggguggucgugcugagcuucgagcuccugcacgcccccgccacggugugcggccccaagaaguccaccaaccuggucaagaacaagugcgugaacuuc

SEQ ID NO: 13513 - RNA, 603 nt, Artificial Sequence
  SARS-CoV-2/Wuhan/WIV05/2019__EPI_ISL_402128 spike protein CDS gc (329-529)
uucccgaacaucaccaaccugugccccuucggcgagguguucaacgccacccgguucgccagcgucuacgccuggaaccgcaagcggaucuccaacugcguggcggacuacagcgugcuguacaacuccgccagcuucuccacguucaagugcuacggcgucagccccaccaagcucaacgaccugugcuucaccaacguguacgccgacuccuucgugauccgcggggacgagguccggcagaucgcccccggccagaccgggaagaucgccgacuacaacuacaagcugccggacgacuucacgggcugcgugaucgcguggaacagcaacaaccucgacuccaaggucgggggcaacuacaacuaccuguaccgccuguuccgcaagagcaaccucaagcccuucgagcgggacaucuccaccgagaucuaccaggccggcagcacccccugcaacgggguggagggcuucaacugcuacuucccccugcaguccuacggguuccagccgaccaacggcgugggguaccagcccuaccggguggucgugcugagcuucgagcuccugcacgcccccgccacggugugcggccccaagaag

SEQ ID NO: 13514 - RNA, 3633 nt, Artificial Sequence
  SARS-CoV-2/Wuhan/WIV05/2019__EPI_ISL_402128 spike protein CDS gc (1-1211)(N914C_S1123C)
auguucguguuccugguccuccugccccuggugagcucccagugcgugaaccucaccacccgcacgcagcugccgcccgccuacaccaacagcuucacccggggcgucuacuaccccgacaagguguuccgcuccagcgugcugcacuccacccaggaccucuuccugcccuucuucagcaacgucacgugguuccacgccauccacguguccgggaccaacggcaccaagcgguucgacaacccggugcugcccuucaacgacggggucuacuucgcgagcaccgagaaguccaacaucauccgcggcuggaucuucgggacgacccucgacagcaagacccagucccugcugaucgugaacaacgccaccaacguggucaucaaggugugcgaguuccaguucugcaacgaccccuuccucggcguguacuaccacaagaacaacaagagcuggauggaguccgaguuccgggucuacagcuccgccaacaacugcacguucgaguacgugagccagcccuuccugauggaccuggagggcaagcaggggaacuucaagaaccuccgcgaguucguguucaagaacaucgacggcuacuucaagaucuacuccaagcacaccccgaucaaccugguccgggaccugccccagggguucagcgcccucgagccccugguggaccugcccaucggcaucaacaucacccgcuuccagacccuccuggcccugcaccgguccuaccucacgccgggggacagcagcuccggcuggaccgcgggcgccgccgccuacuacgugggguaccugcagccccgcaccuuccugcucaaguacaacgagaacggcaccaucacggacgcggucgacugcgcccuggacccccugagcgagaccaagugcacccucaaguccuucaccguggagaaggggaucuaccagacgagcaacuuccgggugcagcccaccgaguccaucguccgcuucccgaacaucaccaaccugugccccuucggcgagguguucaacgccacccgguucgccagcgucuacgccuggaaccgcaagcggaucuccaacugcguggcggacuacagcgugcuguacaacuccgccagcuucuccacguucaagugcuacggcgucagccccaccaagcucaacgaccugugcuucaccaacguguacgccgacuccuucgugauccgcggggacgagguccggcagaucgcccccggccagaccgggaagaucgccgacuacaacuacaagcugccggacgacuucacgggcugcgugaucgcguggaacagcaacaaccucgacuccaaggucgggggcaacuacaacuaccuguaccgccuguuccgcaagagcaaccucaagcccuucgagcgggacaucuccaccgagaucuaccaggccggcagcacccccugcaacgggguggagggcuucaacugcuacuucccccugcaguccuacggguuccagccgaccaacggcgugggguaccagcccuaccggguggucgugcugagcuucgagcuccugcacgcccccgccacggugugcggccccaagaaguccaccaaccuggucaagaacaagugcgugaacuucaacuucaacggccucaccgggaccggcgugcugaccgagagcaacaagaaguuccugccguuccagcaguucgggcgcgacaucgccgacacgaccgacgcgguccgcgacccccagacccuggagauccucgacaucacccccugcagcuucggcgggguguccgugaucacgccgggcaccaacaccagcaaccaggucgccgugcuguaccaggacgugaacugcaccgagguccccguggccauccacgccgaccagcugacgcccaccuggcggguguacuccaccggcagcaacgucuuccagacccgcgccgggugccucaucggcgcggagcacgugaacaacuccuacgagugcgacauccccaucggggccggcaucugcgccagcuaccagacgcagaccaacuccccgcggcgcgcccggagcguggcgucccagagcaucaucgccuacaccaugucccugggcgccgagaacagcgucgccuacuccaacaacagcaucgccauccccaccaacuucacgaucuccgugaccaccgagauccugcccgugagcaugaccaagacgagcgucgacugcaccauguacaucugcggggacuccaccgagugcagcaaccuccugcugcaguacggcuccuucugcacccagcucaaccgcgcgcugacggggaucgccguggagcaggacaagaacacccaggagguguucgcccaggucaagcagaucuacaagacgcccccgaucaaggacuucggcggguucaacuucagccagauccugcccgaccccuccaagcccagcaagcgguccuucaucgaggaccuccuguucaacaaggugacccuggccgacgccggcuucaucaagcaguacggcgacugccucggggacaucgcggcccgcgaccugaucugcgcccagaaguucaacggccugaccgugcucccgccccugcugaccgacgagaugaucgcccaguacaccagcgcccuccuggcggggaccaucacguccggcuggaccuucggggccggcgccgcccugcagauccccuucgcgaugcagauggccuaccgguucaacggcaucggggucacccagugcgugcucuacgagaaccagaagcugaucgccaaccaguucaacagcgccaucggcaagauccaggacucccugagcuccaccgccagcgcgcucgggaagcugcaggacguggucaaccagaacgcccaggcccugaacacgcucgugaagcagcuguccagcaacuucggcgccaucuccagcgugcugaacgacauccucucccgccuggacaaggucgaggccgaggugcagaucgaccggcugaucaccgggcgccuccagagccugcagaccuacgugacccagcagcugauccgggcggccgagauccgcgccagcgccaaccucgccgcgaccaagauguccgagugcguccugggccagagcaagcggguggacuucugcggcaagggguaccaccugauguccuucccccagagcgccccgcacggcguggucuuccuccacgugacguacguccccgcccaggagaagaacuucaccaccgcccccgcgaucugccacgacgggaaggcccacuucccccgcgagggcguguucguguccaacgggacccacugguucgucacgcagcggaacuucuacgagccgcagaucaucaccaccgacaacaccuucgugugcggcaacugcgacguggucaucggcaucgugaacaacacgguguacgacccccugcagcccgagcuggacuccuucaaggaggagcucgacaaguacuucaagaaccacaccagccccgacgucgaccugggggacaucuccggcaucaacgccagcguggugaacauccagaaggagaucgaccgccugaacgaggucgccaagaaccucaacgagucccugaucgaccugcaggagcucgggaaguacgagcaguacaucaag

SEQ ID NO: 13515 - RNA, 3441 nt, Artificial Sequence
  SARS-CoV-2/Wuhan/WIV05/2019__EPI_ISL_402128 spike protein CDS gc (1-1147)(N914C_S1123C)
auguucguguuccugguccuccugccccuggugagcucccagugcgugaaccucaccacccgcacgcagcugccgcccgccuacaccaacagcuucacccggggcgucuacuaccccgacaagguguuccgcuccagcgugcugcacuccacccaggaccucuuccugcccuucuucagcaacgucacgugguuccacgccauccacguguccgggaccaacggcaccaagcgguucgacaacccggugcugcccuucaacgacggggucuacuucgcgagcaccgagaaguccaacaucauccgcggcuggaucuucgggacgacccucgacagcaagacccagucccugcugaucgugaacaacgccaccaacguggucaucaaggugugcgaguuccaguucugcaacgaccccuuccucggcguguacuaccacaagaacaacaagagcuggauggaguccgaguuccgggucuacagcuccgccaacaacugcacguucgaguacgugagccagcccuuccugauggaccuggagggcaagcaggggaacuucaagaaccuccgcgaguucguguucaagaacaucgacggcuacuucaagaucuacuccaagcacaccccgaucaaccugguccgggaccugccccagggguucagcgcccucgagccccugguggaccugcccaucggcaucaacaucacccgcuuccagacccuccuggcccugcaccgguccuaccucacgccgggggacagcagcuccggcuggaccgcgggcgccgccgccuacuacgugggguaccugcagccccgcaccuuccugcucaaguacaacgagaacggcaccaucacggacgcggucgacugcgcccuggacccccugagcgagaccaagugcacccucaaguccuucaccguggagaaggggaucuaccagacgagcaacuuccgggugcagcccaccgaguccaucguccgcuucccgaacaucaccaaccugugccccuucggcgagguguucaacgccacccgguucgccagcgucuacgccuggaaccgcaagcggaucuccaacugcguggcggacuacagcgugcuguacaacuccgccagcuucuccacguucaagugcuacggcgucagccccaccaagcucaacgaccugugcuucaccaacguguacgccgacuccuucgugauccgcggggacgagguccggcagaucgcccccggccagaccgggaagaucgccgacuacaacuacaagcugccggacgacuucacgggcugcgugaucgcguggaacagcaacaaccucgacuccaaggucgggggcaacuacaacuaccuguaccgccuguuccgcaagagcaaccucaagcccuucgagcgggacaucuccaccgagaucuaccaggccggcagcacccccugcaacgggguggagggcuucaacugcuacuucccccugcaguccuacggguuccagccgaccaacggcgugggguaccagcccuaccggguggucgugcugagcuucgagcuccugcacgcccccgccacggugugcggccccaagaaguccaccaaccuggucaagaacaagugcgugaacuucaacuucaacggccucaccgggaccggcgugcugaccgagagcaacaagaaguuccugccguuccagcaguucgggcgcgacaucgccgacacgaccgacgcgguccgcgacccccagacccuggagauccucgacaucacccccugcagcuucggcgggguguccgugaucacgccgggcaccaacaccagcaaccaggucgccgugcuguaccaggacgugaacugcaccgagguccccguggccauccacgccgaccagcugacgcccaccuggcggguguacuccaccggcagcaacgucuuccagacccgcgccgggugccucaucggcgcggagcacgugaacaacuccuacgagugcgacauccccaucggggccggcaucugcgccagcuaccagacgcagaccaacuccccgcggcgcgcccggagcguggcgucccagagcaucaucgccuacaccaugucccugggcgccgagaacagcgucgccuacuccaacaacagcaucgccauccccaccaacuucacgaucuccgugaccaccgagauccugcccgugagcaugaccaagacgagcgucgacugcaccauguacaucugcggggacuccaccgagugcagcaaccuccugcugcaguacggcuccuucugcacccagcucaaccgcgcgcugacggggaucgccguggagcaggacaagaacacccaggagguguucgcccaggucaagcagaucuacaagacgcccccgaucaaggacuucggcggguucaacuucagccagauccugcccgaccccuccaagcccagcaagcgguccuucaucgaggaccuccuguucaacaaggugacccuggccgacgccggcuucaucaagcaguacggcgacugccucggggacaucgcggcccgcgaccugaucugcgcccagaaguucaacggccugaccgugcucccgccccugcugaccgacgagaugaucgcccaguacaccagcgcccuccuggcggggaccaucacguccggcuggaccuucggggccggcgccgcccugcagauccccuucgcgaugcagauggccuaccgguucaacggcaucggggucacccagugcgugcucuacgagaaccagaagcugaucgccaaccaguucaacagcgccaucggcaagauccaggacucccugagcuccaccgccagcgcgcucgggaagcugcaggacguggucaaccagaacgcccaggcccugaacacgcucgugaagcagcuguccagcaacuucggcgccaucuccagcgugcugaacgacauccucucccgccuggacaaggucgaggccgaggugcagaucgaccggcugaucaccgggcgccuccagagccugcagaccuacgugacccagcagcugauccgggcggccgagauccgcgccagcgccaaccucgccgcgaccaagauguccgagugcguccugggccagagcaagcggguggacuucugcggcaagggguaccaccugauguccuucccccagagcgccccgcacggcguggucuuccuccacgugacguacguccccgcccaggagaagaacuucaccaccgcccccgcgaucugccacgacgggaaggcccacuucccccgcgagggcguguucguguccaacgggacccacugguucgucacgcagcggaacuucuacgagccgcagaucaucaccaccgacaacaccuucgugugcggcaacugcgacguggucaucggcaucgugaacaacacgguguacgacccccugcagcccgagcuggacucc

SEQ ID NO: 13516 - RNA, 381 nt, Artificial Sequence
  SARS-CoV-2/Wuhan/WIV05/2019__EPI_ISL_402128 spike protein CDS gc mod (1148-1273)
uucaaagaggaacuggacaaguacuuuaagaaccacacaagccccgacguggaccugggcgauaucagcggaaucaaugccagcgucgugaacauccagaaagagaucgaccggcugaacgagguggccaagaaucugaacgagagccugaucgaccugcaagaacuggggaaguacgagcaguacaucaaguggcccugguacaucuggcugggcuuuaucgccggacugauugccaucgugauggucacaaucaugcuguguugcaugaccagcugcuguagcugccugaagggcuguuguagcuguggcagcugcugcaaguucgacgaggacgauucugagcccgugcugaagggcgugaaacugcacuacaccuga

SEQ ID NO: 13517 - RNA, 669 nt, Artificial Sequence
  SARS-CoV-2/Wuhan/WIV05/2019__EPI_ISL_402128 spike protein CDS gc mod (319-541)
cgggugcagcccaccgaauccaucgugcgguuccccaauaucaccaaucugugccccuucggcgagguguucaaugccaccagauucgccucuguguacgccuggaaccggaagcggaucagcaauugcguggccgacuacuccgugcuguacaacuccgccagcuucagcaccuucaagugcuacggcguguccccuaccaagcugaacgaccugugcuucacaaacguguacgccgacagcuucgugauccggggagaugaagugcggcagauugccccuggacagacaggcaagaucgccgacuacaacuacaagcugcccgacgacuucaccggcugugugauugccuggaacagcaacaaccuggacuccaaagucggcggcaacuacaauuaccuguaccggcuguuccggaaguccaaucugaagcccuucgagcgggacaucagcaccgaaaucuaucaggccggcagcaccccuugcaacggcguggaaggcuucaacugcuacuucccacugcaguccuacggcuuucagcccacaaauggcgugggcuaucagcccuacagagugguggugcugagcuucgaacugcugcaugcuccugccacagugugcggcccuaagaaaagcaccaaucucgugaagaacaaaugcgugaacuuc

SEQ ID NO: 13518 - RNA, 603 nt, Artificial Sequence
  SARS-CoV-2/Wuhan/WIV05/2019__EPI_ISL_402128 spike protein CDS gc mod (329-529)
uuccccaauaucaccaaucugugccccuucggcgagguguucaaugccaccagauucgccucuguguacgccuggaaccggaagcggaucagcaauugcguggccgacuacuccgugcuguacaacuccgccagcuucagcaccuucaagugcuacggcguguccccuaccaagcugaacgaccugugcuucacaaacguguacgccgacagcuucgugauccggggagaugaagugcggcagauugccccuggacagacaggcaagaucgccgacuacaacuacaagcugcccgacgacuucaccggcugugugauugccuggaacagcaacaaccuggacuccaaagucggcggcaacuacaauuaccuguaccggcuguuccggaaguccaaucugaagcccuucgagcgggacaucagcaccgaaaucuaucaggccggcagcaccccuugcaacggcguggaaggcuucaacugcuacuucccacugcaguccuacggcuuucagcccacaaauggcgugggcuaucagcccuacagagugguggugcugagcuucgaacugcugcaugcuccugccacagugugcggcccuaagaaa

SEQ ID NO: 13519 - RNA, 3633 nt, Artificial Sequence
  SARS-CoV-2/Wuhan/WIV05/2019__EPI_ISL_402128 spike protein CDS gc mod (1-1211)(N914C_S1123C)
auguucguguuucuggugcugcugccccugguguccagccagugugugaaccugaccaccagaacacagcugccuccagccuacaccaacagcuucaccagaggcguguacuaccccgacaagguguucagauccagcgugcugcacucuacccaggaccuguuccugccuuucuucagcaacgugaccugguuccacgccauccacguguccggcaccaauggcaccaagagauucgacaaccccgugcugcccuucaacgacgggguguacuuugccagcaccgagaaguccaacaucaucagaggcuggaucuucggcaccacacuggacagcaagacccagagccugcugaucgugaacaacgccaccaacguggucaucaaagugugcgaguuccaguucugcaacgaccccuuccugggcgucuacuaccacaagaacaacaagagcuggauggaaagcgaguuccggguguacagcagcgccaacaacugcaccuucgaguacgugucccagccuuuccugauggaccuggaaggcaagcagggcaacuucaagaaccugcgcgaguucguguucaagaacaucgacggcuacuucaaaaucuacagcaagcacaccccuaucaaccucgugcgggaucugccucagggcuucucugcucuggaaccccugguggaucugcccaucggcaucaacaucacccgguuucagacacugcuggcccugcacagaagcuaccugacaccuggcgauagcagcagcggauggacagcuggugccgccgcuuacuaugugggcuaccugcagccuagaaccuuccugcugaaguacaacgagaacggcaccaucaccgacgccguggauugugcucuggauccucugagcgagacaaagugcacccugaaguccuucaccguggaaaagggcaucuaccagaccagcaacuuccgggugcagcccaccgaauccaucgugcgguuccccaauaucaccaaucugugccccuucggcgagguguucaaugccaccagauucgccucuguguacgccuggaaccggaagcggaucagcaauugcguggccgacuacuccgugcuguacaacuccgccagcuucagcaccuucaagugcuacggcguguccccuaccaagcugaacgaccugugcuucacaaacguguacgccgacagcuucgugauccggggagaugaagugcggcagauugccccuggacagacaggcaagaucgccgacuacaacuacaagcugcccgacgacuucaccggcugugugauugccuggaacagcaacaaccuggacuccaaagucggcggcaacuacaauuaccuguaccggcuguuccggaaguccaaucugaagcccuucgagcgggacaucagcaccgaaaucuaucaggccggcagcaccccuugcaacggcguggaaggcuucaacugcuacuucccacugcaguccuacggcuuucagcccacaaauggcgugggcuaucagcccuacagagugguggugcugagcuucgaacugcugcaugcuccugccacagugugcggcccuaagaaaagcaccaaucucgugaagaacaaaugcgugaacuucaacuucaacggccugaccggcaccggcgugcugacagagagcaacaagaaguuccugccauuccagcaguuuggccgggauaucgccgauaccacagacgccguuagagauccccagacacuggaaauccuggacaucaccccaugcagcuucggcggagugucugugaucaccccuggcaccaacaccagcaaucagguggcagugcuguaccaggacgugaacuguaccgaagugcccguggccauucacgccgaucagcugacaccuacauggcggguguacuccaccggcagcaauguguuucagaccagagccggcugucugaucggagccgagcacgugaacaauagcuacgagugcgacauccccaucggcgcuggcaucugugccagcuaccagacacagacaaacagccccagacgggcuagaagcguggccagccagagcaucauugccuacacaaugucucugggcgccgagaacagcguggccuacuccaacaacucuaucgcuauccccaccaacuucaccaucagcgugaccaccgagauccugccuguguccaugaccaagaccagcguggacugcaccauguacaucugcggcgauuccaccgagugcuccaaccugcugcugcaguacggcagcuucugcacccagcugaauagagcccugacagggaucgccguggaacaggacaagaacacccaagagguguucgcccaagugaagcaaaucuacaagaccccuccuaucaaggacuucggcggcuucaauuucagccagauucugcccgauccuagcaagcccagcaagcggagcuucaucgaggaccugcuguucaacaaagugacacuggccgacgccggcuucaucaagcaguauggcgauugucugggcgacauugccgccagggaucugauuugcgcccagaaguuuaacggacugacagugcugccuccucugcugaccgaugagaugaucgcccaguacacaucugcccugcuggccggcacaaucacaagcggcuggacauuuggagcuggcgccgcucugcagauccccuuugcuaugcagauggccuaccgguucaacggcaucggagugacccagugcgugcuguacgagaaccagaagcugaucgccaaccaguucaacagcgccaucggcaagauccaggacagccugagcagcacagcaagcgcccugggaaagcugcaggacguggucaaccagaaugcccaggcacugaacacccuggucaagcagcuguccuccaacuucggcgccaucagcucugugcugaacgauauccugagcagacuggacaaggucgaggccgaggugcagaucgacagacugaucacaggcagacugcagagccuccagacauacgugacccagcagcugaucagagccgccgagauuagagccucugccaaucuggccgccaccaagaugucugagugugugcugggccagagcaagagaguggacuuuugcggcaagggcuaccaccugaugagcuucccucagucugccccucacggcgugguguuucugcacgugacauaugugcccgcucaagagaagaauuucaccaccgcuccagccaucugccacgacggcaaagcccacuuuccuagagaaggcguguucguguccaacggcacccauugguucgugacacagcggaacuucuacgagccccagaucaucaccaccgacaacaccuucguguguggcaacugcgacguugugaucggcauugugaacaauaccguguacgacccucugcagcccgagcuggacagcuucaaagaggaacuggacaaguacuuuaagaaccacacaagccccgacguggaccugggcgauaucagcggaaucaaugccagcgucgugaacauccagaaagagaucgaccggcugaacgagguggccaagaaucugaacgagagccugaucgaccugcaagaacuggggaaguacgagcaguacaucaag

SEQ ID NO: 13520 - RNA, 3441 nt, Artificial Sequence
  SARS-CoV-2/Wuhan/WIV05/2019__EPI_ISL_402128 spike protein CDS gc mod (1-1147)(N914C_S1123C)
auguucguguuucuggugcugcugccccugguguccagccagugugugaaccugaccaccagaacacagcugccuccagccuacaccaacagcuucaccagaggcguguacuaccccgacaagguguucagauccagcgugcugcacucuacccaggaccuguuccugccuuucuucagcaacgugaccugguuccacgccauccacguguccggcaccaauggcaccaagagauucgacaaccccgugcugcccuucaacgacgggguguacuuugccagcaccgagaaguccaacaucaucagaggcuggaucuucggcaccacacuggacagcaagacccagagccugcugaucgugaacaacgccaccaacguggucaucaaagugugcgaguuccaguucugcaacgaccccuuccugggcgucuacuaccacaagaacaacaagagcuggauggaaagcgaguuccggguguacagcagcgccaacaacugcaccuucgaguacgugucccagccuuuccugauggaccuggaaggcaagcagggcaacuucaagaaccugcgcgaguucguguucaagaacaucgacggcuacuucaaaaucuacagcaagcacaccccuaucaaccucgugcgggaucugccucagggcuucucugcucuggaaccccugguggaucugcccaucggcaucaacaucacccgguuucagacacugcuggcccugcacagaagcuaccugacaccuggcgauagcagcagcggauggacagcuggugccgccgcuuacuaugugggcuaccugcagccuagaaccuuccugcugaaguacaacgagaacggcaccaucaccgacgccguggauugugcucuggauccucugagcgagacaaagugcacccugaaguccuucaccguggaaaagggcaucuaccagaccagcaacuuccgggugcagcccaccgaauccaucgugcgguuccccaauaucaccaaucugugccccuucggcgagguguucaaugccaccagauucgccucuguguacgccuggaaccggaagcggaucagcaauugcguggccgacuacuccgugcuguacaacuccgccagcuucagcaccuucaagugcuacggcguguccccuaccaagcugaacgaccugugcuucacaaacguguacgccgacagcuucgugauccggggagaugaagugcggcagauugccccuggacagacaggcaagaucgccgacuacaacuacaagcugcccgacgacuucaccggcugugugauugccuggaacagcaacaaccuggacuccaaagucggcggcaacuacaauuaccuguaccggcuguuccggaaguccaaucugaagcccuucgagcgggacaucagcaccgaaaucuaucaggccggcagcaccccuugcaacggcguggaaggcuucaacugcuacuucccacugcaguccuacggcuuucagcccacaaauggcgugggcuaucagcccuacagagugguggugcugagcuucgaacugcugcaugcuccugccacagugugcggcccuaagaaaagcaccaaucucgugaagaacaaaugcgugaacuucaacuucaacggccugaccggcaccggcgugcugacagagagcaacaagaaguuccugccauuccagcaguuuggccgggauaucgccgauaccacagacgccguuagagauccccagacacuggaaauccuggacaucaccccaugcagcuucggcggagugucugugaucaccccuggcaccaacaccagcaaucagguggcagugcuguaccaggacgugaacuguaccgaagugcccguggccauucacgccgaucagcugacaccuacauggcggguguacuccaccggcagcaauguguuucagaccagagccggcugucugaucggagccgagcacgugaacaauagcuacgagugcgacauccccaucggcgcuggcaucugugccagcuaccagacacagacaaacagccccagacgggcuagaagcguggccagccagagcaucauugccuacacaaugucucugggcgccgagaacagcguggccuacuccaacaacucuaucgcuauccccaccaacuucaccaucagcgugaccaccgagauccugccuguguccaugaccaagaccagcguggacugcaccauguacaucugcggcgauuccaccgagugcuccaaccugcugcugcaguacggcagcuucugcacccagcugaauagagcccugacagggaucgccguggaacaggacaagaacacccaagagguguucgcccaagugaagcaaaucuacaagaccccuccuaucaaggacuucggcggcuucaauuucagccagauucugcccgauccuagcaagcccagcaagcggagcuucaucgaggaccugcuguucaacaaagugacacuggccgacgccggcuucaucaagcaguauggcgauugucugggcgacauugccgccagggaucugauuugcgcccagaaguuuaacggacugacagugcugccuccucugcugaccgaugagaugaucgcccaguacacaucugcccugcuggccggcacaaucacaagcggcuggacauuuggagcuggcgccgcucugcagauccccuuugcuaugcagauggccuaccgguucaacggcaucggagugacccagugcgugcuguacgagaaccagaagcugaucgccaaccaguucaacagcgccaucggcaagauccaggacagccugagcagcacagcaagcgcccugggaaagcugcaggacguggucaaccagaaugcccaggcacugaacacccuggucaagcagcuguccuccaacuucggcgccaucagcucugugcugaacgauauccugagcagacuggacaaggucgaggccgaggugcagaucgacagacugaucacaggcagacugcagagccuccagacauacgugacccagcagcugaucagagccgccgagauuagagccucugccaaucuggccgccaccaagaugucugagugugugcugggccagagcaagagaguggacuuuugcggcaagggcuaccaccugaugagcuucccucagucugccccucacggcgugguguuucugcacgugacauaugugcccgcucaagagaagaauuucaccaccgcuccagccaucugccacgacggcaaagcccacuuuccuagagaaggcguguucguguccaacggcacccauugguucgugacacagcggaacuucuacgagccccagaucaucaccaccgacaacaccuucguguguggcaacugcgacguugugaucggcauugugaacaauaccguguacgacccucugcagcccgagcuggacagc

SEQ ID NO: 13521 - protein, 1273 aa, Artificial Sequence
  SARS-CoV-2/Wuhan/WIV05/2019__EPI_ISL_402128 spike protein (1-1273)(N914C_S1123C)
MFVFLVLLPLVSSQCVNLTTRTQLPPAYTNSFTRGVYYPDKVFRSSVLHSTQDLFLPFFSNVTWFHAIHVSGTNGTKRFDNPVLPFNDGVYFASTEKSNIIRGWIFGTTLDSKTQSLLIVNNATNVVIKVCEFQFCNDPFLGVYYHKNNKSWMESEFRVYSSANNCTFEYVSQPFLMDLEGKQGNFKNLREFVFKNIDGYFKIYSKHTPINLVRDLPQGFSALEPLVDLPIGINITRFQTLLALHRSYLTPGDSSSGWTAGAAAYYVGYLQPRTFLLKYNENGTITDAVDCALDPLSETKCTLKSFTVEKGIYQTSNFRVQPTESIVRFPNITNLCPFGEVFNATRFASVYAWNRKRISNCVADYSVLYNSASFSTFKCYGVSPTKLNDLCFTNVYADSFVIRGDEVRQIAPGQTGKIADYNYKLPDDFTGCVIAWNSNNLDSKVGGNYNYLYRLFRKSNLKPFERDISTEIYQAGSTPCNGVEGFNCYFPLQSYGFQPTNGVGYQPYRVVVLSFELLHAPATVCGPKKSTNLVKNKCVNFNFNGLTGTGVLTESNKKFLPFQQFGRDIADTTDAVRDPQTLEILDITPCSFGGVSVITPGTNTSNQVAVLYQDVNCTEVPVAIHADQLTPTWRVYSTGSNVFQTRAGCLIGAEHVNNSYECDIPIGAGICASYQTQTNSPRRARSVASQSIIAYTMSLGAENSVAYSNNSIAIPTNFTISVTTEILPVSMTKTSVDCTMYICGDSTECSNLLLQYGSFCTQLNRALTGIAVEQDKNTQEVFAQVKQIYKTPPIKDFGGFNFSQILPDPSKPSKRSFIEDLLFNKVTLADAGFIKQYGDCLGDIAARDLICAQKFNGLTVLPPLLTDEMIAQYTSALLAGTITSGWTFGAGAALQIPFAMQMAYRFNGIGVTQCVLYENQKLIANQFNSAIGKIQDSLSSTASALGKLQDVVNQNAQALNTLVKQLSSNFGAISSVLNDILSRLDKVEAEVQIDRLITGRLQSLQTYVTQQLIRAAEIRASANLAATKMSECVLGQSKRVDFCGKGYHLMSFPQSAPHGVVFLHVTYVPAQEKNFTTAPAICHDGKAHFPREGVFVSNGTHWFVTQRNFYEPQIITTDNTFVCGNCDVVIGIVNNTVYDPLQPELDSFKEELDKYFKNHTSPDVDLGDISGINASVVNIQKEIDRLNEVAKNLNESLIDLQELGKYEQYIKWPWYIWLGFIAGLIAIVMVTIMLCCMTSCCSCLKGCCSCGSCCKFDEDDSEPVLKGVKLHYT

SEQ ID NO: 13522 - protein, 1269 aa, Artificial Sequence
  SARS-CoV-2/bat/Yunnan/RaTG13/2013__EPI_ISL_402131 spike protein (1-1273)(N910C_S1119C)
MFVFLVLLPLVSSQCVNLTTRTQLPPAYTNSSTRGVYYPDKVFRSSVLHLTQDLFLPFFSNVTWFHAIHVSGTNGIKRFDNPVLPFNDGVYFASTEKSNIIRGWIFGTTLDSKTQSLLIVNNATNVVIKVCEFQFCNDPFLGVYYHKNNKSWMESEFRVYSSANNCTFEYVSQPFLMDLEGKQGNFKNLREFVFKNIDGYFKIYSKHTPINLVRDLPPGFSALEPLVDLPIGINITRFQTLLALHRSYLTPGDSSSGWTAGAAAYYVGYLQPRTFLLKYNENGTITDAVDCALDPLSETKCTLKSFTVEKGIYQTSNFRVQPTDSIVRFPNITNLCPFGEVFNATTFASVYAWNRKRISNCVADYSVLYNSTSFSTFKCYGVSPTKLNDLCFTNVYADSFVITGDEVRQIAPGQTGKIADYNYKLPDDFTGCVIAWNSKHIDAKEGGNFNYLYRLFRKANLKPFERDISTEIYQAGSKPCNGQTGLNCYYPLYRYGFYPTDGVGHQPYRVVVLSFELLNAPATVCGPKKSTNLVKNKCVNFNFNGLTGTGVLTESNKKFLPFQQFGRDIADTTDAVRDPQTLEILDITPCSFGGVSVITPGTNASNQVAVLYQDVNCTEVPVAIHADQLTPTWRVYSTGSNVFQTRAGCLIGAEHVNNSYECDIPIGAGICASYQTQTNSRSVASQSIIAYTMSLGAENSVAYSNNSIAIPTNFTISVTTEILPVSMTKTSVDCTMYICGDSTECSNLLLQYGSFCTQLNRALTGIAVEQDKNTQEVFAQVKQIYKTPPIKDFGGFNFSQILPDPSKPSKRSFIEDLLFNKVTLADAGFIKQYGDCLGDIAARDLICAQKFNGLTVLPPLLTDEMIAQYTSALLAGTITSGWTFGAGAALQIPFAMQMAYRFNGIGVTQCVLYENQKLIANQFNSAIGKIQDSLSSTASALGKLQDVVNQNAQALNTLVKQLSSNFGAISSVLNDILSRLDKVEAEVQIDRLITGRLQSLQTYVTQQLIRAAEIRASANLAATKMSECVLGQSKRVDFCGKGYHLMSFPQSAPHGVVFLHVTYVPAQEKNFTTAPAICHDGKAHFPREGVFVSNGTHWFVTQRNFYEPQIITTDNTFVCGSCDVVIGIVNNTVYDPLQPELDSFKEELDKYFKNHTSPDVDLGDISGINASVVNIQKEIDRLNEVAKNLNESLIDLQELGKYEQYIKWPWYIWLGFIAGLIAIIMVTIMLCCMTSCCSCLKGCCSCGSCCKFDEDDSEPVLKGVKLHYT

SEQ ID NO: 13523 - protein, 1273 aa, Artificial Sequence
  SARS-CoV-2/Wuhan/HBCDC-HB-01/2019__EPI_ISL_402132 spike protein (1-1273)(N914C_S1123C)
MFVFLVLLPLVSSQCVNLTTRTQLPPAYTNSITRGVYYPDKVFRSSVLHSTQDLFLPFFSNVTWFHAIHVSGTNGTKRFDNPVLPFNDGVYFASTEKSNIIRGWIFGTTLDSKTQSLLIVNNATNVVIKVCEFQFCNDPFLGVYYHKNNKSWMESEFRVYSSANNCTFEYVSQPFLMDLEGKQGNFKNLREFVFKNIDGYFKIYSKHTPINLVRDLPQGFSALEPLVDLPIGINITRFQTLLALHRSYLTPGDSSSGWTAGAAAYYVGYLQPRTFLLKYNENGTITDAVDCALDPLSETKCTLKSFTVEKGIYQTSNFRVQPTESIVRFPNITNLCPFGEVFNATRFASVYAWNRKRISNCVADYSVLYNSASFSTFKCYGVSPTKLNDLCFTNVYADSFVIRGDEVRQIAPGQTGKIADYNYKLPDDFTGCVIAWNSNNLDSKVGGNYNYLYRLFRKSNLKPFERDISTEIYQAGSTPCNGVEGFNCYFPLQSYGFQPTNGVGYQPYRVVVLSFELLHAPATVCGPKKSTNLVKNKCVNFNFNGLTGTGVLTESNKKFLPFQQFGRDIADTTDAVRDPQTLEILDITPCSFGGVSVITPGTNTSNQVAVLYQDVNCTEVPVAIHADQLTPTWRVYSTGSNVFQTRAGCLIGAEHVNNSYECDIPIGAGICASYQTQTNSPRRARSVASQSIIAYTMSLGAENSVAYSNNSIAIPTNFTISVTTEILPVSMTKTSVDCTMYICGDSTECSNLLLQYGSFCTQLNRALTGIAVEQDKNTQEVFAQVKQIYKTPPIKDFGGFNFSQILPDPSKPSKRSFIEDLLFNKVTLADAGFIKQYGDCLGDIAARDLICAQKFNGLTVLPPLLTDEMIAQYTSALLAGTITSGWTFGAGAALQIPFAMQMAYRFNGIGVTQCVLYENQKLIANQFNSAIGKIQDSLSSTASALGKLQDVVNQNAQALNTLVKQLSSNFGAISSVLNDILSRLDKVEAEVQIDRLITGRLQSLQTYVTQQLIRAAEIRASANLAATKMSECVLGQSKRVDFCGKGYHLMSFPQSAPHGVVFLHVTYVPAQEKNFTTAPAICHDGKAHFPREGVFVSNGTHWFVTQRNFYEPQIITTDNTFVCGNCDVVIGIVNNTVYDPLQPELDSFKEELDKYFKNHTSPDVDLGDISGINASVVNIQKEIDRLNEVAKNLNESLIDLQELGKYEQYIKWPWYIWLGFIAGLIAIVMVTIMLCCMTSCCSCLKGCCSCGSCCKFDEDDSEPVLKGVKLHYT

SEQ ID NO: 13524 - protein, 1273 aa, Artificial Sequence
  SARS-CoV-2/Guangdong/20SF028/2020__EPI_ISL_403936 spike protein (1-1273)(N914C_S1123C)
MFVFLVLLPLVSSQCVNLTTRTQLPPAYTNSFTRGVYYPDKVFRSSVLYSTQDLFLPFFSNVTWFHAIHVSGTNGTKRFDNPVLPFNDGVYFASTEKSNIIRGWIFGTTLDSKTQSLLIVNNATNVVIKVCEFQFCNDPFLGVYYHKNNKSWMESEFRVYSSANNCTFEYVSQPFLMDLEGKQGNFKNLREFVFKNIDGYFKIYSKHTPINLVRDLPQGFSALEPLVDLPIGINITRFQTLLALHRSYLTPGDSSSGWTAGAAAYYVGYLQPRTFLLKYNENGTITDAVDCALDPLSETKCTLKSFTVEKGIYQTSNFRVQPTESIVRFPNITNLCPFGEVFNATRFASVYAWNRKRISNCVADYSVLYNSASFSTFKCYGVSPTKLNDLCFTNVYADSFVIRGDEVRQIAPGQTGKIADYNYKLPDDFTGCVIAWNSNNLDSKVGGNYNYLYRLFRKSNLKPFERDISTEIYQAGSTPCNGVEGFNCYFPLQSYGFQPTNGVGYQPYRVVVLSFELLHAPATVCGPKKSTNLVKNKCVNFNFNGLTGTGVLTESNKKFLPFQQFGRDIADTTDAVRDPQTLEILDITPCSFGGVSVITPGTNTSNQVAVLYQDVNCTEVPVAIHADQLTPTWRVYSTGSNVFQTRAGCLIGAEHVNNSYECDIPIGAGICASYQTQTNSPRRARSVASQSIIAYTMSLGAENSVAYSNNSIAIPTNFTISVTTEILPVSMTKTSVDCTMYICGDSTECSNLLLQYGSFCTQLNRALTGIAVEQDKNTQEVFAQVKQIYKTPPIKDFGGFNFSQILPDPSKPSKRSFIEDLLFNKVTLADAGFIKQYGDCLGDIAARDLICAQKFNGLTVLPPLLTDEMIAQYTSALLAGTITSGWTFGAGAALQIPFAMQMAYRFNGIGVTQCVLYENQKLIANQFNSAIGKIQDSLSSTASALGKLQDVVNQNAQALNTLVKQLSSNFGAISSVLNDILSRLDKVEAEVQIDRLITGRLQSLQTYVTQQLIRAAEIRASANLAATKMSECVLGQSKRVDFCGKGYHLMSFPQSAPHGVVFLHVTYVPAQEKNFTTAPAICHDGKAHFPREGVFVSNGTHWFVTQRNFYEPQIITTDNTFVCGNCDVVIGIVNNTVYDPLQPELDSFKEELDKYFKNHTSPDVDLGDISGINASVVNIQKEIDRLNEVAKNLNESLIDLQELGKYEQYIKWPWYIWLGFIAGLIAIVMVTIMLCCMTSCCSCLKGCCSCGSCCKFDEDDSEPVLKGVKLHYT

SEQ ID NO: 13525 - protein, 1273 aa, Artificial Sequence
  SARS-CoV-2/Shenzhen/SZTH-001/2020__EPI_ISL_406592 spike protein (1-1273)(N914C_S1123C)
MFVFLVLLPLVSSQCVNLTTRTQLPPAYTNSFTRGVYYPDKVFRSSVLHSTQDLFLPFFSNVTWFHAIHVSGTNGTKRFDNPVLPFNDGVYFASTEKSNIIRGWIFGTTLDSKTQSLLIVNNATNVVIKVCEFQFCNDPFLGVYYHKNNKSWMESEFRVYSSANNCTFEYVSQPFLMDLEGKQGNFKNLREFVFKNIDGYFKIYSKHTPINLVRDLPQGFSALEPLVDLPIGINITRFQTLLALHRSYLTPGDSSSGWTAGAAAYYVGYLQPRTFLLKYNENGTITDAVDCALDPLSETKCTLKSFTVEKGIYQTSNFRVQPTESIVRFPNITNLCPFGEVFNATRFASVYAWNRKRISNCVADYSVLYNSASFSTFKCYGVSPTKLNDLCFTNVYADSFVIRGDEVRQIAPGQTGKIADYNYKLPDDFTGCVIAWNSNNLDSKVGGNYNYLYRLFRKSNLKPFERDISTEIYQAGSTPCNGVEGFNCYFPLQSYGFQPTNGVGYQPYRVVVLSFELLHAPATVCGPKKSTNLVKNKCVNFNFNGLTGTGVLTESNKKFLPFQQFGRDIADTTDAVRDPQTLEILDITPCSFGGVSVITPGTNTSNQVAVLYQDVNCTEVPVAIHADQLTPTWRVYSTGSNVFQTRAGCLIGAEHVNNSYECDIPIGAGICASYQTQTNSPRRARSVASQSIIAYTMSLGAENSVAYSNNSIAIPTNFTISVTTEILPVSMTKTSVDCTMYICGDSTECSNLLLQYGSFCTQLNRALTGIAVEQDKNTQEVFAQVKQIYKTPPIKDFGGFNFSQILPDPSKPSKRSFIEDLLFNKVTLADAGFIKQYGDCLGDIAARDLICAQKFNGLTVLPPLLTDEMIAQYTSALLAGTITSGWTFGAGAALQIPFAMQMAYRFNGIGVTQCVLYENQKLIANQFNSAIGKIQDSLSSTASALGKLQDVVNQNAQALNTLVKQLSSNFGAISSVLNDILSRLDKVEAEVQIDRLITGRLQSLQTYVTQQLIRAAEIRASANLAATKMSECVLGQSKRVDFCGKGYHLMSFPQSAPHGVVFLHVTYVPAQEKNFTTAPAICHDGKAHFPREGVFVSNGTHWFVTQRNFYEPQIITTDNTFVCGNCDVLIGIVNNTVYDPLQPELDSFKEELDKYFKNHTSPDVDLGDISGINASVVNIQKEIDRLNEVAKNLNESLIDLQELGKYEQYIKWPWYIWLGFIAGLIAIVMVTIMLCCMTSCCSCLKGCCSCGSCCKFDEDDSGPVLKGVKLHYT

SEQ ID NO: 13526 - protein, 1273 aa, Artificial Sequence
  SARS-CoV-2/Shenzhen/SZTH-004/2020__EPI_ISL_406595 spike protein (1-1273)(N914C_S1123C)
MFVFLVLLPLVSSQCVNLTTRTQLPPAYTNSFTRGVYYPDKVFRSSVLHSTQDLFLPFFSNVTWFHAIHVSGTNGTKRFDNPVLPFNDGVYFASTEKSNIIRGWIFGTTLDSKTQSLLIVNNATNVVIKVCEFQFCNDPFLGVYYHKNNKSWMESEFRVYSSANNCTFEYVSQPFLMDLEGKQGNFKNLREFVFKNIDGYFKIYSKHTPINLVRDLPQGFSALEPLVDLPIGINITRFQTLLALHRSYLTPGDSSSGWTAGAAAYYVGYLQPRTFLLKYNENGTITDAVDCALDPLSETKCTLKSFTVEKGIYQTSNFRVQPTESIVRFPNITNLCPFGEVFNATRFASVYAWDRKRISNCVAYYSVLYNSASFSTFKCYGVSPTKLNDLCFTNVYADSFVIRGDEVRQIAPGQTGKIADYNYKLPDDFTGCVIAWNSNNLDSKVGGNYNYLYRLFRKSNLKPFERDISTEIYQAGSTPCNGVEGFNCYFPLQSYGFQPTNGVGYQPYRVVVLSFELLHAPATVCGPKKSTNLVKNKCVNFNFNGLTGTGVLTESNKKFLPFQQFGRDIADTTDAVRDPQTLEILDITPCSFGGVSVITPGTNTSNQVAVLYQDVNCTEVPVAIHADQLTPTWRVYSTGSNVFQTRAGCLIGAEHVNNSYECDIPIGAGICASYQTQTNSPRRARSVASQSIIAYTMSLGAENSVAYSNNSIAIPTNFTISVTTEILPVSMTKTSVDCTMYICGDSTECSNLLLQYGSFCTQLNRALTGIAVEQDKNTQEVFAQVKQIYKTPPIKDFGGFNFSQILPDPSKPSKRSFIEDLLFNKVTLADAGFIKQYGDCLGDIAARDLICAQKFNGLTVLPPLLTDEMIAQYTSALLAGTITSGWTFGAGAALQIPFAMQMAYRFNGIGVTQCVLYENQKLIANQFNSAIGKIQDSLSSTASALGKLQDVVNQNAQALNTLVKQLSSNFGAISSVLNDILSRLDKVEAEVQIDRLITGRLQSLQTYVTQQLIRAAEIRASANLAATKMSECVLGQSKRVDFCGKGYHLMSFPQSAPHGVVFLHVTYVPAQEKNFTTAPAICHDGKAHFPREGVFVSNGTHWFVTQRNFYEPQIITTDNTFVCGNCDVVIGIVNNTVYDPLQPELDSFKEELDKYFKNHTSPDVDLGDISGINASVVNIQKEIDRLNEVAKNLNESLIDLQELGKYEQYIKWPWYIWLGFIAGLIAIVMVTIMLCCMTSCCSCLKGCCSCGSCCKFDEDDSEPVLKGVKLHYT

SEQ ID NO: 13527 - protein, 1273 aa, Artificial Sequence
  SARS-CoV-2/France/IDF0372/2020__EPI_ISL_406596 spike protein (1-1273)(N914C_S1123C)
MFVFLVLLPLVSSQCVNLTTRTQLPPAYTNSFTRGVYYPDKVFRSSVLHSTQDLFLPFFSNVTWFHAIHVSGTNGTKRFDNPVLPFNDGVYFASTEKSNIIRGWIFGTTLDSKTQSLLIVNNATNVVIKVCEFQFCNDPFLGVYYHKNNKSWMESEFRVYSSANNCTFEYVSQPFLMDLEGKQGNFKNLREFVFKNIDGYFKIYSKHTPINLVRDLPQGFSALEPLVDLPIGINITRFQTLLALHRSYLTPGDSSSGWTAGAAAYYVGYLQPRTFLLKYNENGTITDAVDCALDPLSETKCTLKSFTVEKGIYQTSNFRVQPTESIVRFPNITNLCPFGEVFNATRFASVYAWNRKRISNCVADYSFLYNSASFSTFKCYGVSPTKLNDLCFTNVYADSFVIRGDEVRQIAPGQTGKIADYNYKLPDDFTGCVIAWNSNNLDSKVGGNYNYLYRLFRKSNLKPFERDISTEIYQAGSTPCNGVEGFNCYFPLQSYGFQPTNGVGYQPYRVVVLSFELLHAPATVCGPKKSTNLVKNKCVNFNFNGLTGTGVLTESNKKFLPFQQFGRDIADTTDAVRDPQTLEILDITPCSFGGVSVITPGTNTSNQVAVLYQDVNCTEVPVAIHADQLTPTWRVYSTGSNVFQTRAGCLIGAEHVNNSYECDIPIGAGICASYQTQTNSPRRARSVASQSIIAYTMSLGAENSVAYSNNSIAIPTNFTISVTTEILPVSMTKTSVDCTMYICGDSTECSNLLLQYGSFCTQLNRALTGIAVEQDKNTQEVFAQVKQIYKTPPIKDFGGFNFSQILPDPSKPSKRSFIEDLLFNKVTLADAGFIKQYGDCLGDIAARDLICAQKFNGLTVLPPLLTDEMIAQYTSALLAGTITSGWTFGAGAALQIPFAMQMAYRFNGIGVTQCVLYENQKLIANQFNSAIGKIQDSLSSTASALGKLQDVVNQNAQALNTLVKQLSSNFGAISSVLNDILSRLDKVEAEVQIDRLITGRLQSLQTYVTQQLIRAAEIRASANLAATKMSECVLGQSKRVDFCGKGYHLMSFPQSAPHGVVFLHVTYVPAQEKNFTTAPAICHDGKAHFPREGVFVSNGTHWFVTQRNFYEPQIITTDNTFVCGNCDVVIGIVNNTVYDPLQPELDSFKEELDKYFKNHTSPDVDLGDISGINASVVNIQKEIDRLNEVAKNLNESLIDLQELGKYEQYIKWPWYIWLGFIAGLIAIVMVTIMLCCMTSCCSCLKGCCSCGSCCKFDEDDSEPVLKGVKLHYT

SEQ ID NO: 13528 - protein, 1273 aa, Artificial Sequence
  SARS-CoV-2/Australia/VIC01/2020__EPI_ISL_406844 spike protein (1-1273)(N914C_S1123C)
MFVFLVLLPLVSSQCVNLTTRTQLPPAYTNSFTRGVYYPDKVFRSSVLHSTQDLFLPFFSNVTWFHAIHVSGTNGTKRFDNPVLPFNDGVYFASTEKSNIIRGWIFGTTLDSKTQSLLIVNNATNVVIKVCEFQFCNDPFLGVYYHKNNKSWMESEFRVYSSANNCTFEYVSQPFLMDLEGKQGNFKNLREFVFKNIDGYFKIYSKHTPINLVRDLPQGFSALEPLVDLPIGINITRFQTLLALHRRYLTPGDSSSGWTAGAAAYYVGYLQPRTFLLKYNENGTITDAVDCALDPLSETKCTLKSFTVEKGIYQTSNFRVQPTESIVRFPNITNLCPFGEVFNATRFASVYAWNRKRISNCVADYSVLYNSASFSTFKCYGVSPTKLNDLCFTNVYADSFVIRGDEVRQIAPGQTGKIADYNYKLPDDFTGCVIAWNSNNLDSKVGGNYNYLYRLFRKSNLKPFERDISTEIYQAGSTPCNGVEGFNCYFPLQSYGFQPTNGVGYQPYRVVVLSFELLHAPATVCGPKKSTNLVKNKCVNFNFNGLTGTGVLTESNKKFLPFQQFGRDIADTTDAVRDPQTLEILDITPCSFGGVSVITPGTNTSNQVAVLYQDVNCTEVPVAIHADQLTPTWRVYSTGSNVFQTRAGCLIGAEHVNNSYECDIPIGAGICASYQTQTNSPRRARSVASQSIIAYTMSLGAENSVAYSNNSIAIPTNFTISVTTEILPVSMTKTSVDCTMYICGDSTECSNLLLQYGSFCTQLNRALTGIAVEQDKNTQEVFAQVKQIYKTPPIKDFGGFNFSQILPDPSKPSKRSFIEDLLFNKVTLADAGFIKQYGDCLGDIAARDLICAQKFNGLTVLPPLLTDEMIAQYTSALLAGTITSGWTFGAGAALQIPFAMQMAYRFNGIGVTQCVLYENQKLIANQFNSAIGKIQDSLSSTASALGKLQDVVNQNAQALNTLVKQLSSNFGAISSVLNDILSRLDKVEAEVQIDRLITGRLQSLQTYVTQQLIRAAEIRASANLAATKMSECVLGQSKRVDFCGKGYHLMSFPQSAPHGVVFLHVTYVPAQEKNFTTAPAICHDGKAHFPREGVFVSNGTHWFVTQRNFYEPQIITTDNTFVCGNCDVVIGIVNNTVYDPLQPELDSFKEELDKYFKNHTSPDVDLGDISGINASVVNIQKEIDRLNEVAKNLNESLIDLQELGKYEQYIKWPWYIWLGFIAGLIAIVMVTIMLCCMTSCCSCLKGCCSCGSCCKFDEDDSEPVLKGVKLHYT

SEQ ID NO: 13529 - protein, 1273 aa, Artificial Sequence
  SARS-CoV-2/Germany/BavPat1/2020__EPI_ISL_406862 spike protein (1-1273)(N914C_S1123C)
MFVFLVLLPLVSSQCVNLTTRTQLPPAYTNSFTRGVYYPDKVFRSSVLHSTQDLFLPFFSNVTWFHAIHVSGTNGTKRFDNPVLPFNDGVYFASTEKSNIIRGWIFGTTLDSKTQSLLIVNNATNVVIKVCEFQFCNDPFLGVYYHKNNKSWMESEFRVYSSANNCTFEYVSQPFLMDLEGKQGNFKNLREFVFKNIDGYFKIYSKHTPINLVRDLPQGFSALEPLVDLPIGINITRFQTLLALHRSYLTPGDSSSGWTAGAAAYYVGYLQPRTFLLKYNENGTITDAVDCALDPLSETKCTLKSFTVEKGIYQTSNFRVQPTESIVRFPNITNLCPFGEVFNATRFASVYAWNRKRISNCVADYSVLYNSASFSTFKCYGVSPTKLNDLCFTNVYADSFVIRGDEVRQIAPGQTGKIADYNYKLPDDFTGCVIAWNSNNLDSKVGGNYNYLYRLFRKSNLKPFERDISTEIYQAGSTPCNGVEGFNCYFPLQSYGFQPTNGVGYQPYRVVVLSFELLHAPATVCGPKKSTNLVKNKCVNFNFNGLTGTGVLTESNKKFLPFQQFGRDIADTTDAVRDPQTLEILDITPCSFGGVSVITPGTNTSNQVAVLYQGVNCTEVPVAIHADQLTPTWRVYSTGSNVFQTRAGCLIGAEHVNNSYECDIPIGAGICASYQTQTNSPRRARSVASQSIIAYTMSLGAENSVAYSNNSIAIPTNFTISVTTEILPVSMTKTSVDCTMYICGDSTECSNLLLQYGSFCTQLNRALTGIAVEQDKNTQEVFAQVKQIYKTPPIKDFGGFNFSQILPDPSKPSKRSFIEDLLFNKVTLADAGFIKQYGDCLGDIAARDLICAQKFNGLTVLPPLLTDEMIAQYTSALLAGTITSGWTFGAGAALQIPFAMQMAYRFNGIGVTQCVLYENQKLIANQFNSAIGKIQDSLSSTASALGKLQDVVNQNAQALNTLVKQLSSNFGAISSVLNDILSRLDKVEAEVQIDRLITGRLQSLQTYVTQQLIRAAEIRASANLAATKMSECVLGQSKRVDFCGKGYHLMSFPQSAPHGVVFLHVTYVPAQEKNFTTAPAICHDGKAHFPREGVFVSNGTHWFVTQRNFYEPQIITTDNTFVCGNCDVVIGIVNNTVYDPLQPELDSFKEELDKYFKNHTSPDVDLGDISGINASVVNIQKEIDRLNEVAKNLNESLIDLQELGKYEQYIKWPWYIWLGFIAGLIAIVMVTIMLCCMTSCCSCLKGCCSCGSCCKFDEDDSEPVLKGVKLHYT

SEQ ID NO: 13530 - protein, 1273 aa, Artificial Sequence
  SARS-CoV-2/Wuhan/HBCDC-HB-02/2020__EPI_ISL_412978 spike protein (1-1273)(N914C_S1123C)
MFVFLVLLPLVSSQCVNLTTRTQLPPAYTNSFTRGVYYPDKVFRSSVLHSTQDLFLPFFSNVTWFHAIHVSGTNGTKRFDNPVLPFNDGVYFASTEKSNIIRGWIFGTTLDSKTQSLLIVNNATNVVIKVCEFQFCNDPFLGVYYHKNNKSWMESEFRVYSSANNCTFEYVSQPFLMDLEGKQGNFKNLREFVFKNIDGYFKIYSKHTPINLVRDLPQGFSALEPLVDLPIGINITRFQTLLALHRSYLTPGDSSSGWTAGAAAYYVGYLQPRTFLLKYNENGTITDAVDCALDPLSETKCTLKSFTVEKGIYQTSNFRVQPTESIVRFPNITNLCPFGEVFNATRFASVYAWNRKRISNCVADYSVLYNSASFSTFKCYGVSPTKLNDLCFTNVYADSFVIRGDEVRQIAPGQTGKIADYNYKLPDDFTGCVIAWNSNNLDSKVGGNYNYLYRLFRKSNLKPFERDISTEIYQAGSTPCNGVEGFNCYFPLQSYGFQPTNGVGYQPYRVVVLSFELLHAPATVCGPKKSTNLVKNKCVNFNFNGLTGTGVLTESNKKFLPFQQFGRDIADTTDAVRDPQTLEILDITPCSFGGVSVITPGTNTSNQVAVLYQDVNCTEVPVAIHADQLTPTWRVYSTGSNVFQTRAGCLIGAEHVNNSYECDIPIGAGICASYQTQTNSPRRARSVASQSIIAYTMSLGAENSVAYSNNSIAIPTNFTISVTTEILPVSMTKTSVDCTMYICGDSTECSNFLLQYGSFCTQLNRALTGIAVEQDKNTQEVFAQVKQIYKTPPIKDFGGFNFSQILPDPSKPSKRSFIEDLLFNKVTLADAGFIKQYGDCLGDIAARDLICAQKFNGLTVLPPLLTDEMIAQYTSALLAGTITSGWTFGAGAALQIPFAMQMAYRFNGIGVTQCVLYENQKLIANQFNSAIGKIQDSLSSTASALGKLQDVVNQNAQALNTLVKQLSSNFGAISSVLNDILSRLDKVEAEVQIDRLITGRLQSLQTYVTQQLIRAAEIRASANLAATKMSECVLGQSKRVDFCGKGYHLMSFPQSAPHGVVFLHVTYVPAQEKNFTTAPAICHDGKAHFPREGVFVSNGTHWFVTQRNFYEPQIITTDNTFVCGNCDVVIGIVNNTVYDPLQPELDSFKEELDKYFKNHTSPDVDLGDISGINASVVNIQKEIDRLNEVAKNLNESLIDLQELGKYEQYIKWPWYIWLGFIAGLIAIVMVTIMLCCMTSCCSCLKGCCSCGSCCKFDEDDSEPVLKGVKLHYT

SEQ ID NO: 13531 - protein, 1273 aa, Artificial Sequence
  SARS-CoV-2/Australia/QLD02/2020__EPI_ISL_407896 spike protein (1-1273)(N914C_S1123C)
MFVFLVLLPLVSSQCVNLTTRTQLPPAYTNSFTRGVYYPDKVFRSSVLHSTQDLFLPFFSNVTWFHAIHVSGTNGTKRFDNPVLPFNDGVYFASTEKSNIIRGWIFGTTLDSKTQSLLIVNNATNVVIKVCEFQFCNDPFLGVYYHKNNKSWMESEFRVYSSANNCTFEYVSQPFLMDLEGKQGNFKNLREFVFKNIDGYFKIYSKHTPINLVRDLPQGFSALEPLVDLPIGINITRFQTLLALHRSYLTPGDSSSGWTAGAAAYYVGYLQPRTFLLKYNENGTITDAVDCALDPLSETKCTLKSFTVEKGIYQTSNFRVQPTESIVRFPNITNLCPFGEVFNATRFASVYAWNRKRISNCVADYSVLYNSASFSTFKCYGVSPTKLNDLCFTNVYADSFVIRGDEVRQIAPGQTGKIADYNYKLPDDFTGCVIAWNSNNLDSKVGGNYNYLYRLFRKSNLKPFERDISTEIYQAGSTPCNGVEGFNCYFPLQSYGFQPTNGVGYQPYRVVVLSFELLHAPATVCGPKKSTNLVKNKCVNFNFNGLTGTGVLTESNKKFLPFQQFGRDIADTTDAVRDPQTLEILDITPCSFGGVSVITPGTNTSNQVAVLYQDVNCTEVPVAIHADQLTPTWRVYSTGSNVFQTRAGCLIGAEHVNNSYECDIPIGAGICASYQTQTNSPRRARSVASQSIIAYTMSLGAENSVAYSNNSIAIPTNFTISVTTEILPVSMTKTSVDCTMYICGDSTECSNLLLQYGSFCTQLNRALTGIAVEQDKNTQEVFAQVKQIYKTPPIKDFGGFNFSQILPDPSKPSKRSFIEDLLFNKVTLADAGFIKQYGDCLGDIAARDLICAQKFNGLTVLPPLLTDEMIAQYTSALLAGTITSGWTFGAGAALQIPFAMQMAYRFNGIGVTQCVLYENQKLIANQFNSAIGKIQDSLSSTASALGKLQDVVNQNAQALNTLVKQLSSNFGAISSVLNDILSRLDKVEAEVQIDRLITGRLQSLQTYVTQQLIRAAEIRASANLAATKMSECVLGQSKRVDFCGKGYHLMSFPQSAPHGVVFLHVTYVPAQEKNFTTAPAICHDGKAHFPREGVFVSNGTHWFVTQRNFYEPQIITTDNTFVCGNCDVVIGIVNNTVYDPLQLELDSFKEELDKYFKNHTSPDVDLGDISGINASVVNIQKEIDRLNEVAKNLNESLIDLQELGKYEQYIKWPWYIWLGFIAGLIAIVMVTIMLCCMTSCCSCLKGCCSCGSCCKFDEDDSEPVLKGVKLHYT

SEQ ID NO: 13532 - protein, 1273 aa, Artificial Sequence
  SARS-CoV-2/India/1-31/2020__EPI_ISL_413523 spike protein (1-1273)(N914C_S1123C)
MFVFLVLLPLVSSQCVNLTTRTQLPPAYTNSFTRGVYYPDKVFRSSVLHSTQDLFLPFFSNVTWFHAIHVSGTNGTKRFDNPVLPFNDGVYFASTEKSNIIRGWIFGTTLDSKTQSLLIVNNATNVVIKVCEFQFCNDPFLGVYYHKNNKSWMESEFRVYSSANNCTFEYVSQPFLMDLEGKQGNFKNLREFVFKNIDGYFKIYSKHTPINLVRDLPQGFSALEPLVDLPIGINITRFQTLLALHRSYLTPGDSSSGWTAGAAAYYVGYLQPRTFLLKYNENGTITDAVDCALDPLSETKCTLKSFTVEKGIYQTSNFRVQPTESIVRFPNITNLCPFGEVFNATRFASVYAWNRKRISNCVADYSVLYNSASFSTFKCYGVSPTKLNDLCFTNVYADSFVIRGDEVRQIAPGQTGKIADYNYKLPDDFTGCVIAWNSNNLDSKVGGNYNYLYRLFRKSNLKPFERDISTEIYQAGSTPCNGVEGFNCYFPLQSYGFQPTNGVGYQPYRVVVLSFELLHAPATVCGPKKSTNLVKNKCVNFNFNGLTGTGVLTESNKKFLPFQQFGRDIADTTDAVRDPQTLEILDITPCSFGGVSVITPGTNTSNQVAVLYQDVNCTEVPVAIHADQLTPTWRVYSTGSNVFQTRAGCLIGAEHVNNSYECDIPIGAGICASYQTQTNSPRRARSVASQSIIAYTMSLGAENSVAYSNNSIAIPTNFTISVTTEILPVSMTKTSVDCTMYICGDSTECSNLLLQYGSFCTQLNRALTGIAVEQDKNTQEVFAQVKQIYKTPPIKDFGGFNFSQILPDPSKPSKRSFIEDLLFNKVTLADAGFIKQYGDCLGDIAARDLICAQKFNGLTVLPPLLTDEMIAQYTSALLAGTITSGWTFGAGAALQIPFAMQMAYRFNGIGVTQCVLYENQKLIANQFNSVIGKIQDSLSSTASALGKLQDVVNQNAQALNTLVKQLSSNFGAISSVLNDILSRLDKVEAEVQIDRLITGRLQSLQTYVTQQLIRAAEIRASANLAATKMSECVLGQSKRVDFCGKGYHLMSFPQSAPHGVVFLHVTYVPAQEKNFTTAPAICHDGKAHFPREGVFVSNGTHWFVTQRNFYEPQIITTDNTFVCGNCDVVIGIVNNTVYDPLQPELDSFKEELDKYFKNHTSPDVDLGDISGINASVVNIQKEIDRLNEVAKNLNESLIDLQELGKYEQYIKWPWYIWLGFIAGLIAIVMVTIMLCCMTSCCSCLKGCCSCGSCCKFDEDDSEPVLKGVKLHYT

SEQ ID NO: 13533 - protein, 1273 aa, Artificial Sequence
  SARS-CoV-2/Guangdong/GD2020087-P0008/2020__EPI_ISL_413863 spike protein (1-1273)(N914C_S1123C)
MFVFLVLLPLVSSQCVNLTTRTQLPPAYTNSFTRGVYYPDKVFRSSVLHSTQDLFLPFFSNVTWFHAIHVSGTNGTKRFDNPVLPFNDGVYFASTEKSNIIRGWIFGTTLDSKTQSLLIVNNATNVVIKVCEFQFCNDPFLGVYYHKNNKSWMESEFRVYSSANNCTFEYVSQPFLMDLEGKQGNFKNLREFVFKNIDGYFKIYSKHTPINLVRDLPQGFSALEPLVDLPIGINITRFQTLLALHRSYLTPGDSSSGWTAGAAAYYVGYLQPRTFLLKYNENGTITDAVDCALDPLSETKCTLKSFTVEKGIYQTSNFRVQPTESIVRFPNITNLCPFGEVFNATRFASVYAWNRKRISNCVADYSVLYNSASFSTFKCYGVSPTKLNDLCFTNVYADSFVIRGDEVREIAPGQTGKIADYNYKLPDDFTGCVIAWNSNNLDSKVGGNYNYLYRLFRKSNLKPFERDISTEIYQAGSTPCNGVEGFNCYFPLQSYGFQPTNGVGYQPYRVVVLSFELLHAPATVCGPKKSTNLVKNKCVNFNFNGLTGTGVLTESNKKFLPFQQFGRDIADTTDAVRDPQTLEILDITPCSFGGVSVITPGTNTSNQVAVLYQDVNCTEVPVAIHADQLTPTWRVYSTGSNVFQTRAGCLIGAEHVNNSYECDIPIGAGICASYQTQTNSPRRARSVASQSIIAYTMSLGAENSVAYSNNSIAIPTNFTISVTTEILPVSMTKTSVDCTMYICGDSTECSNLLLQYGSFCTQLNRALTGIAVEQDKNTQEVFAQVKQIYKTPPIKDFGGFNFSQILPDPSKPSKRSFIEDLLFNKVTLADAGFIKQYGDCLGDIAARDLICAQKFNGLTVLPPLLTDEMIAQYTSALLAGTITSGWTFGAGAALQIPFAMQMAYRFNGIGVTQCVLYENQKLIANQFNSAIGKIQDSLSSTASALGKLQDVVNQNAQALNTLVKQLSSNFGAISSVLNDILSRLDKVEAEVQIDRLITGRLQSLQTYVTQQLIRAAEIRASANLAATKMSECVLGQSKRVDFCGKGYHLMSFPQSAPHGVVFLHVTYVPAQEKNFTTAPAICHDGKAHFPREGVFVSNGTHWFVTQRNFYEPQIITTDNTFVCGNCDVVIGIVNNTVYDPLQPELDSFKEELDKYFKNHTSPDVDLGDISGINASVVNIQKEIDRLNEVAKNLNESLIDLQELGKYEQYIKWPWYIWLGFIAGLIAIVMVTIMLCCMTSCCSCLKGCCSCGSCCKFDEDDSEPVLKGVKLHYT

SEQ ID NO: 13534 - protein, 1273 aa, Artificial Sequence
  SARS-CoV-2/Sweden/01/2020__EPI_ISL_411951 spike protein (1-1273)(N914C_S1123C)
MFVFLVLLPLVSSQCVNLTTRTQLPPAYTNSFTRGVYYPDKVFRSSVLHSTQDLFLPFFSNVTWFHAIHVSGTNGTKRFDNPVLPFNDGVYFASTEKSNIIRGWIFGTTLDSKTQSLLIVNNATNVVIKVCEFQFCNDPFLGVYYHKNNKSWMESEFRVYSSANNCTFEYVSQPFLMDLEGKQGNFKNLREFVFKNIDGYFKIYSKHTPINLVRDLPQGFSALEPLVDLPIGINITRFQTLLALHRSYLTPGDSSSGWTAGAAAYYVGYLQPRTFLLKYNENGTITDAVDCALDPLSETKCTLKSFTVEKGIYQTSNFRVQPTESIVRFPNITNLCPFGEVFNATRFASVYAWNRKRISNCVADYSVLYNSASFSTFKCYGVSPTKLNDLCFTNVYADSFVIRGDEVRQIAPGQTGKIADYNYKLPDDFTGCVIAWNSNNLDSKVGGNYNYLYRLFRKSNLKPFERDISTEIYQAGSTPCNGVEGFNCYFPLQSYGFQPTNGVGYQPYRVVVLSFELLHAPATVCGPKKSTNLVKNKCVNFNFNGLTGTGVLTESNKKFLPFQQFGRDIADTTDAVRDPQTLEILDITPCSFGGVSVITPGTNTSNQVAVLYQDVNCTEVPVAIHADQLTPTWRVYSTGSNVFQTRAGCLIGAEHVNNSYECDIPIGAGICASYQTQTNSPRRARSVASQSIIAYTMSLGAENSVAYSNNSIAIPTNFTISVTTEILPVSMTKTSVDCTMYICGDSTECSNLLLQYGSFCTQLNRALTGIAVEQDKNTQEVFAQVKQIYKTPPIKDCGGFNFSQILPDPSKPSKRSFIEDLLFNKVTLADAGFIKQYGDCLGDIAARDLICAQKFNGLTVLPPLLTDEMIAQYTSALLAGTITSGWTFGAGAALQIPFAMQMAYRFNGIGVTQCVLYENQKLIANQFNSAIGKIQDSLSSTASALGKLQDVVNQNAQALNTLVKQLSSNFGAISSVLNDILSRLDKVEAEVQIDRLITGRLQSLQTYVTQQLIRAAEIRASANLAATKMSECVLGQSKRVDFCGKGYHLMSFPQSAPHGVVFLHVTYVPAQEKNFTTAPAICHDGKAHFPREGVFVSNGTHWFVTQRNFYEPQIITTDNTFVCGNCDVVIGIVNNTVYDPLQPELDSFKEELDKYFKNHTSPDVDLGDISGINASVVNIQKEIDRLNEVAKNLNESLIDLQELGKYEQYIKWPWYIWLGFIAGLIAIVMVTIMLCCMTSCCSCLKGCCSCGSCCKFDEDDSEPVLKGVKLHYT

SEQ ID NO: 13535 - protein, 1273 aa, Artificial Sequence
  SARS-CoV-2/Tianmen/HBCDC-HB-07/2020__EPI_ISL_412983 spike protein (1-1273)(N914C_S1123C)
MFVFLVLLPLVSSQCVNLTTRTQLPPAYTNSFTRGVYYPDKVFRSSVLHSTQDLFLPFFSNVTWFHAIHVSGTNGTKRFDNPVLPFNDGVYFASTEKSNIIRGWIFGTTLDSKTQSLLIVNNATNVVIKVCEFQFCNDPFLGVYYHKNNKSWMESEFRVYSSANNCTFEYVSQPFLMDLEGKQGNFKNLREFVFKNIDGYFKIYSKHTPINLVRDLPQGFSALEPLVDLPIGINITRFQTLLALHRSYLTPGDSSSGWTAGAAAYYVGYLQPRTFLLKYNENGTITDAVDCALDPLSETKCTLKSFTVEKGIYQTSNFRVQPTESIVRFPNITNLCPFGEVFNATRFASVYAWNRKRISNCVADYSVLYNSASFSTFKCYGVSPTKLNDLCFTNVYADSFVIRGDEVRQIAPGQTGKIADYNYKLPDDFTGCVIAWNSNNLDSKVGGNYNYLYRLFRKSNLKPFERDISTEIYQAGSTPCNGVEGFNCYFPLQSYGFQPTNGVGYQPYRVVVLSFELLHAPATVCGPKKSTNLVKNKCVNFNFNGLTGTGVLTESNKKFLPFQQFGRDIADTTDAVRDPQTLEILDITPCSFGGVSVITPGTNTSNQVAVLYQDLNCTEVPVAIHADQLTPTWRVYSTGSNVFQTRAGCLIGAEHVNNSYECDIPIGAGICASYQTQTNSPRRARSVASQSIIAYTMSLGAENSVAYSNNSIAIPTNFTISVTTEILPVSMTKTSVDCTMYICGDSTECSNLLLQYGSFCTQLNRALTGIAVEQDKNTQEVFAQVKQIYKTPPIKDFGGFNFSQILPDPSKPSKRSFIEDLLFNKVTLADAGFIKQYGDCLGDIAARDLICAQKFNGLTVLPPLLTDEMIAQYTSALLAGTITSGWTFGAGAALQIPFAMQMAYRFNGIGVTQCVLYENQKLIANQFNSAIGKIQDSLSSTASALGKLQDVVNQNAQALNTLVKQLSSNFGAISSVLNDILSRLDKVEAEVQIDRLITGRLQSLQTYVTQQLIRAAEIRASANLAATKMSECVLGQSKRVDFCGKGYHLMSFPQSAPHGVVFLHVTYVPAQEKNFTTAPAICHDGKAHFPREGVFVSNGTHWFVTQRNFYEPQIITTDNTFVCGNCDVVIGIVNNTVYDPLQPELDSFKEELDKYFKNHTSPDVDLGDISGINASVVNIQKEIDRLNEVAKNLNESLIDLQELGKYEQYIKWPWYIWLGFIAGLIAIVMVTIMLCCMTSCCSCLKGCCSCGSCCKFDEDDSEPVLKGVKLHYT

SEQ ID NO: 13536 - protein, 1273 aa, Artificial Sequence
  SARS-CoV-2/Hong Kong/case42_VM20002493/2020__EPI_ISL_414527 spike protein (1-1273)(N914C_S1123C)
MFVFLVLLPLVSSQCVNLTTRTQLPPAYTNSFTRGVYYPDKVFRSSVLHSTQDLFLPFFSNVTWFHAIHVSGTNGTKRFDNPVLPFNDGVYFASTEKSNIIRGWIFGTTLDSKTQSLLIVNNATNVVIKVCEFQFCNDPFLGVYYHKNNKSWMESEFRVYSSANNCTFEYVSQPFLMDLEGKQGNFKNLREFVFKNIDGYFKIYSKHTPINLVRDLPQGFSALEPLVDLPIGINITRFQTLLALHRSYLTPGDSSSGWTAGAAAYYVGYLQPRTFLLKYNENGTITDAVDCALDPLSETKCTLKSFTVEKGIYQTSNFRVQPTESIVRFPNITNLCPFGEVFNATRFASVYAWNRKRISNCVADYSVLYNSASFSTFKCYGVSPTKLNDLCFTNVYADSFVIRGDEVRQIAPGQTGKIADYNYKLPDDFTGCVIAWNSNNLDSKVGGNYNYLYRLFRKSNLKPFERDISTEIYQAGSTPCNGVEGFNCYFPLQSYGFQPTNGVGYQPYRVVVLSFELLHAPATVCGPKKSTNLVKNKCVNFNFNGLTGTGVLTESNKKFLPFQQFGRDIADTTDAVRDPQTLEILDITPCSFGGVSVITPGTNTSNQVAVLYQDVNCTEVPVAIHADQLTPTWRVYSTGSNVFQTRAGCLIGAEHVNNSYECDIPIGAGICASYQTQTNSPRRARSVASQSIIAYTMSLGAENSVAYSNNSIAIPTNFAISVTTEILPVSMTKTSVDCTMYICGDSTECSNLLLQYGSFCTQLNRALTGIAVEQDKNTQEVFAQVKQIYKTPPIKDFGGFNFSQILPDPSKPSKRSFIEDLLFNKVTLADAGFIKQYGDCLGDIAARDLICAQKFNGLTVLPPLLTDEMIAQYTSALLAGTITSGWTFGAGAALQIPFAMQMAYRFNGIGVTQCVLYENQKLIANQFNSAIGKIQDSLSSTASALGKLQDVVNQNAQALNTLVKQLSSNFGAISSVLNDILSRLDKVEAEVQIDRLITGRLQSLQTYVTQQLIRAAEIRASANLAATKMSECVLGQSKRVDFCGKGYHLMSFPQSAPHGVVFLHVTYVPAQEKNFTTAPAICHDGKAHFPREGVFVSNGTHWFVTQRNFYEPQIITTDNTFVCGNCDVVIGIVNNTVYDPLQPELDSFKEELDKYFKNHTSPDVDLGDISGINASVVNIQKEIDRLNEVAKNLNESLIDLQELGKYEQYIKWPWYIWLGFIAGLIAIVMVTIMLCCMTSCCSCLKGCCSCGSCCKFDEDDSEPVLKGVKLHYT

SEQ ID NO: 13537 - protein, 1273 aa, Artificial Sequence
  SARS-CoV-2/USA/CruiseA-23/2020__EPI_ISL_414482 spike protein (1-1273)(N914C_S1123C)
MFVFLVLLPLVSSQCVNLTTRTQLPPAYTNSFTRGVYYPDKVFRSSVLHSTQDLFLPFFSNVTWFHAIHVSGTNGTKRFDNPVLPFNDGVYFASTEKSNIIRGWIFGTTLDSKTQSLLIVNNATNVVIKVCEFQFCNDPFLGVYYHKNNKSWMESEFRVYSSANNCTFEYVSQPFLMDLEVKQGNFKNLREFVFKNIDGYFKIYSKHTPINLVRDLPQGFSALEPLVDLPIGINITRFQTLLALHRSYLTPGDSSSGWTAGAAAYYVGYLQPRTFLLKYNENGTITDAVDCALDPLSETKCTLKSFTVEKGIYQTSNFRVQPTESIVRFPNITNLCPFGEVFNATRFASVYAWNRKRISNCVADYSVLYNSASFSTFKCYGVSPTKLNDLCFTNVYADSFVIRGDEVRQIAPGQTGKIADYNYKLPDDFTGCVIAWNSNNLDSKVGGNYNYLYRLFRKSNLKPFERDISTEIYQAGSTPCNGVEGFNCYFPLQSYGFQPTNGVGYQPYRVVVLSFELLHAPATVCGPKKSTNLVKNKCVNFNFNGLTGTGVLTESNKKFLPFQQFGRDIADTTDAVRDPQTLEILDITPCSFGGVSVITPGTNTSNQVAVLYQDVNCTEVPVAIHADQLTPTWRVYSTGSNVFQTRAGCLIGAEHVNNSYECDIPIGAGICASYQTQTNSPRRARSVASQSIIAYTMSLGAENSVAYSNNSIAIPTNFTISVTTEILPVSMTKTSVDCTMYICGDSTECSNLLLQYGSFCTQLNRALTGIAVEQDKNTQEVFAQVKQIYKTPPIKDFGGFNFSQILPDPSKPSKRSFIEDLLFNKVTLADAGFIKQYGDCLGDIAARDLICAQKFNGLTVLPPLLTDEMIAQYTSALLAGTITSGWTFGAGAALQIPFAMQMAYRFNGIGVTQCVLYENQKLIANQFNSAIGKIQDSLSSTASALGKLQDVVNQNAQALNTLVKQLSSNFGAISSVLNDILSRLDKVEAEVQIDRLITGRLQSLQTYVTQQLIRAAEIRASANLAATKMSECVLGQSKRVDFCGKGYHLMSFPQSAPHGVVFLHVTYVPAQEKNFTTAPAICHDGKAHFPREGVFVSNGTHWFVTQRNFYEPQIITTDNTFVCGNCDVVIGIVNNTVYDPLQPELDSFKEELDKYFKNHTSPDVDLGDISGINASVVNIQKEIDRLNEVAKNLNESLIDLQELGKYEQYIKWPWYIWLGFIAGLIAIVMVTIMLCCMTSCCSCLKGCCSCGSCCKFDEDDSEPVLKGVKLHYT

SEQ ID NO: 13538 - protein, 1273 aa, Artificial Sequence
  SARS-CoV-2/Hong Kong/case85_VM20002868/2020__EPI_ISL_414519 spike protein (1-1273)(N914C_S1123C)
MFVFLVLVPLVSSQCVNLTTRTQLPPAYTNSFTRGVYYPDKVFRSSVLHSTQDLFLPFFSNVTWFHAIHVSGTNGTKRFDNPVLPFNDGVYFASTEKSNIIRGWIFGTTLDSKTQSLLIVNNATNVVIKVCEFQFCNDPFLGVYYHKNNKSWMESEFRVYSSANNCTFEYVSQPFLMDLEGKQGNFKNLREFVFKNIDGYFKIYSKHTPINLVRDLPQGFSALEPLVDLPIGINITRFQTLLALHRSYLTPGDSSSGWTAGAAAYYVGYLQPRTFLLKYNENGTITDAVDCALDPLSETKCTLKSFTVEKGIYQTSNFRVQPTESIVRFPNITNLCPFGEVFNATRFASVYAWNRKRISNCVADYSVLYNSASFSTFKCYGVSPTKLNDLCFTNVYADSFVIRGDEVRQIAPGQTGKIADYNYKLPDDFTGCVIAWNSNNLDSKVGGNYNYLYRLFRKSNLKPFERDISTEIYQAGSTPCNGVEGFNCYFPLQSYGFQPTNGVGYQPYRVVVLSFELLHAPATVCGPKKSTNLVKNKCVNFNFNGLTGTGVLTESNKKFLPFQQFGRDIADTTDAVRDPQTLEILDITPCSFGGVSVITPGTNTSNQVAVLYQDVNCTEVPVAIHADQLTPTWRVYSTGSNVFQTRAGCLIGAEHVNNSYECDIPIGAGICASYQTQTNSPRRARSVASQSIIAYTMSLGAENSVAYSNNSIAIPTNFTISVTTEILPVSMTKTSVDCTMYICGDSTECSNLLLQYGSFCTQLNRALTGIAVEQDKNTQEVFAQVKQIYKTPPIKDFGGFNFSQILPDPSKPSKRSFIEDLLFNKVTLADAGFIKQYGDCLGDIAARDLICAQKFNGLTVLPPLLTDEMIAQYTSALLAGTITSGWTFGAGAALQIPFAMQMAYRFNGIGVTQCVLYENQKLIANQFNSAIGKIQDSLSSTASALGKLQDVVNQNAQALNTLVKQLSSNFGAISSVLNDILSRLDKVEAEVQIDRLITGRLQSLQTYVTQQLIRAAEIRASANLAATKMSECVLGQSKRVDFCGKGYHLMSFPQSAPHGVVFLHVTYVPAQEKNFTTAPAICHDGKAHFPREGVFVSNGTHWFVTQRNFYEPQIITTDNTFVCGNCDVVIGIVNNTVYDPLQPELDSFKEELDKYFKNHTSPDVDLGDISGINASVVNIQKEIDRLNEVAKNLNESLIDLQELGKYEQYIKWPWYIWLGFIAGLIAIVMVTIMLCCMTSCCSCLKGCCSCGSCCKFDEDDSEPVLKGVKLHYT

SEQ ID NO: 13539 - protein, 1273 aa, Artificial Sequence
  SARS-CoV-2/England/200990660/2020__EPI_ISL_414523 spike protein (1-1273)(N914C_S1123C)
MFVFLVLLPLVSSQCVNLTTRTQLPPAYTNSFTRGVYYPDKVFRSSVLHSTQDLFLPFFSNVTWFHAIHVSGTNGTKRFDNPVLPFNDGVYFASTEKSNIIRGWIFGTTLDSKTQSLLIVNNATNVVIKVCEFQFCNDPFLGVYYHKNNKSWMESEFRVYSSANNCTFEYVSQPFLMDLEGKQGNFKNLREFVFKNIDGYFKIYSKHTPINLVRDLPQGFSALEPLVDLPIGINITRFQTLLALHRSYLTPGDSSSGWTAGAAAYYVGYLQPRTFLLKYNENGTITDAVDCALDPLSETKCTLKSFTVEKGIYQTSNFRVQPTESIVRFPNITNLCPFGEVFNATRFASVYAWNRKRISNCVADYSVLYNSASFSTFKCYGVSPTKLNDLCFTNVYADSFVIRGDEVRQIAPGQTGKIADYNYKLPDDFTGCVIAWNSNNLDSKVGGNYNYLYRLFRKSNLKPFERDISTEIYQAGSTPCNGVEGFNCYFPLQSYGFQPTNGVGYQPYRVVVLSFELLHAPATVCGPKKSTNLVKNKCVNFNFNGLTGTGVLTESNKKFLPFQQFGRDIADTTDAVRDPQTLEILDITPCSFGGVSVITPGTNTSNQVAVLYQGVNCTEVPVAIHADQLTPTWRVYSTGSNVFQTRAGCLIGAEHVNNSYECDIPIGAGICASYQTQTNSPRRARSVASQSIIAYTMSLGAENSVAYSNNSIAIPTNFTISVTTEILPVSMTKTSVDCTMYICGDSTECSNLLLQYGSFCTQLNRALTGIAVEQDKNTQEVFAQVKQIYKTPPIKDFGGFNFSQILPDPSKPSKRSFIEDLLFNKVTLADAGFIKQYGDCLGDIAARDLICAQKFNGLTVLPPLLTDEMIAQYTSALLAGTITSGWTFGAGAALQIPFAMQMAYRFNGIGVTQCVLYENQKLIANQFNSAIGKIQDSLSSTASALGKLQDVVNQNAQALNTLVKQLSSNFGAISSVLNDILSRLDKVEAEVQIDRLITGRLQSLQTYVTQQLIRAAEIRASANLAATKMSECVLGQSKRVDFCGKGYHLMSFPQSAPHGVVFLHVTYVPAQEKNFTTAPAICHDGKAHFPREGVFVSNGTHWFVTQRNFYEPQIITTDNTFVCGNCDVVIGIVNNTVYDPLQPELDSFKEELDKYFKNHTSPDVDLGDISGINASVVNIQKEIDRLNEVAKNLNESLIDLQELGKYEQYIKWPWYIWLGFIAGLIAIVMVTIMLCCMTSCCSCLKGCCSCGSCCKFDEDDSELVLKGVKLHYT

SEQ ID NO: 13540 - protein, 1273 aa, Artificial Sequence
  SARS-CoV-2/Australia/NSW09/2020__EPI_ISL_413595 spike protein (1-1273)(N914C_S1123C)
MFVFLVLLPLVSSQCVNLTTRTQLPPAYTNSFTRGVYYPDKVFRSSVLHSTQDLFLPFFSNVTWFHAIHVSGTNGTKRFDNPVLPFNDGVYFASTEKSNIIRGWIFGTTLDSKTQSLLIVNNATNVVIKVCEFQFCNDPFLGVYYHKNNKSWMESEFRVYSSANNCTFEYVSQPFLMDLEGKQGNFKNLREFVFKNIDGYFKIYSKHTPINLVRDLPQGFSALEPLVDLPIGINITRFQTLLALHRSYLTPGDSSSGWTAGAAAYYVGYLQPRTFLLKYNENGTITDAVDCALDPLSETKCTLKSFTVEKGIYQTSNFRVQPTESIVRFPNITNLCPFGEVFNATRFASVYAWNRKRISNCVADYSVLYNSASFSTFKCYGVSPTKLNDLCFTNVYADSFVIRGDEVRQIAPGQTGKIADYNYKLPDDFTGCVIAWNSNNLDSKVGGNYNYLYRLFRKSNLKPFERDISTEIYQAGSTPCNGVEGFNCYFPLQSYGFQPTNGVGYQPYRVVVLSFELLHAPATVCGPKKSTNLVKNKCVNFNFNGLTGTGVLTESNKKFLPFQQFGRDIADTTDAVRDPQTLEILDITPCSFGGVSVITPGTNTSNQVAVLYQDVNCTEVPVAIHADQLTPTWRVYSTGSNVFQTRAGCLIGAEHVNNSYECDIPIGAGICASYQTQTNSPRRARSVASQSIIAYTMSLGAENSVAYSNNSIAIPTNFTISVTTEILPVSMTKTSVDCTMYICGDSTECSNLLLQYGSFCTQLNRALTGIAVEQDKNTQEVFAQVKQIYKTPPIKDFGGFNFSQILPDPSKPSKRSFIEDLLFNKVTLADAGFIKQYGDCLGDIAARDLICAQKFNGLTVLPPLLTDEMIAQYTSALLAGTITSGWTFGAGAALQIPFAMQMAYRFNGIGVTQCVLYENQKLIANQFNSAIGKIQDSLSFTASALGKLQDVVNQNAQALNTLVKQLSSNFGAISSVLNDILSRLDKVEAEVQIDRLITGRLQSLQTYVTQQLIRAAEIRASANLAATKMSECVLGQSKRVDFCGKGYHLMSFPQSAPHGVVFLHVTYVPAQEKNFTTAPAICHDGKAHFPREGVFVSNGTHWFVTQRNFYEPQIITTDNTFVCGNCDVVIGIVNNTVYDPLQPELDSFKEELDKYFKNHTSPDVDLGDISGINASVVNIQKEIDRLNEVAKNLNESLIDLQELGKYEQYIKWPWYIWLGFIAGLIAIVMVTIMLCCMTSCCSCLKGCCSCGSCCKFDEDDSEPVLKGVKLHYT

SEQ ID NO: 13541 - protein, 1273 aa, Artificial Sequence
  SARS-CoV-2/Australia/NSW10/2020__EPI_ISL_413596 spike protein (1-1273)(N914C_S1123C)
MFVFLVLLPLVSSQCVNLTTRTQLPPAYTNSFTRGVYYPDKVFRSSVLHSTQDLFLPFFSNVTWFHAIHVSGTNGTKRFDNPVLPFNDGVYFASTEKSNIIRGWIFGTTLDSKTQSLLIVNNATNVVIKVCEFQFCNDPFLGVYYHKNNKSWMESEFRVYSSANNCTFEYVSQPFLMDLEGKQGNFKNLREFVFKNIDGYFKIYSKHTPINLVRDLPQGFSALEPLVDLPIGINITRFQTLLALHRSYLTPGDSSSGWTAGAAAYYVGYLQPRTFLLKYNENGTITDAVDCALDPLSETKCTLKSFTVEKGIYQTSNFRVQPTESIVRFPNITNLCPFGEVFNATRFASVYAWNRKRISNCVADYSVLYNSASFSTFKCYGVSPTKLNDLCFTNVYADSFVIRGDEVRQIAPGQTGKIADYNYKLPDDFTGCVIAWNSNNLDSKVGGNYNYLYRLFRKSNLKPFERDISTEIYQAGSTPCNGVEGFNCYFPLQSYGFQPTNGVGYQPYRVVVLSFELLHAPATVCGPKKSTNLVKNKCVNFNFNGLTGTGVLTESNKKFLPFQQFGRDIADTTDAVRDPQTLEILDITPCSFGGVSVITPGTNTSNQVAVLYQDVNCTEVPVAIHADQLTPTWRVYSTGSNVFQTRAGCLIGAEHVNNSYECDIPIGAGICASYQTQTNSPRRARSVASQSIIAYTMSLGAENSVAYSNNSIAIPTNFTISVTTEILPVSMTKTSVDCTMYICGDSTECSNLLLQYGSFCTQLNRALTGIAVEQDKNTQEVFAQVKQIYKTPPIKDFGGFNFSQILPDPSKPSKRSFIEDLLFNKVTLADAGFIKQYGDCLGDIAARDLICAQKFNGLTVLPPLLTDEMIAQYTSALLAGTITSGWTFGAGAALQIPFAMQMAYRFNGIGVTQCVLYENQKLIANQFNSAIGKIQDSLSSTASALGKLQDVVNQNAQALNTLVKQLSSNFGAISSVLNDILSRLDKVEAEVQIDRLITGRLQSLQTYVTQQLIRAAEIRASANLAATKMSECVLGQSKRVDFCGKGYHLMSFPQSAPHGVVFLHVTYVPAQEKNFTTAPAICHDGKAHFPREGVFVSNGTHWFVTQRNFYEPQIITTDNTFVCGNCDVVIGIVNNTVYDPLQPELDSFKEELDKYFKNHTSPDVDLGDISGINASVVNIQKEIDRLNEVAKNLNESLIDLQELGKYEQYIKWPWYIWLGFIAGLIAIVMVTIMLCCMTSCCSCLKGCCSCGSCFKFDEDDSEPVLKGVKLHYT

SEQ ID NO: 13542 - protein, 1273 aa, Artificial Sequence
  SARS-CoV-2/Switzerland/1000477797/2020__EPI_ISL_413023 spike protein (1-1273)(N914C_S1123C)
MFVFLVLLPLVSSQCVNLTTRTQLPPAYTNSFTRGVYYPDKVFRSSVLHSTQDLFLPFFSNVTWFHAIHVSGTNGTKRFDNPVLPFNDGVYFASTEKSNIIRGWIFGTTLDSKTQSLLIVNNATNVVIKVCEFQFCNDPFLGVYYHKNNKSWMESEFRVYSSANNCTFEYVSQPFLMDLEGKQGNFKNLREFVFKNIDGYFNIYSKHTPINLVRDLPQGFSALEPLVDLPIGINITRFQTLLALHRSYLTPGDSSSGWTAGAAAYYVGYLQPRTFLLKYNENGTITDAVDCALDPLSETKCTLKSFTVEKGIYQTSNFRVQPTESIVRFPNITNLCPFGEVFNATRFASVYAWNRKRISNCVADYSVLYNSASFSTFKCYGVSPTKLNDLCFTNVYADSFVIRGDEVRQIAPGQTGKIADYNYKLPDDFTGCVIAWNSNNLDSKVGGNYNYLYRLFRKSNLKPFERDISTEIYQAGSTPCNGVEGFNCYFPLQSYGFQPTNGVGYQPYRVVVLSFELLHAPATVCGPKKSTNLVKNKCVNFNFNGLTGTGVLTESNKKFLPFQQFGRDIADTTDAVRDPQTLEILDITPCSFGGVSVITPGTNTSNQVAVLYQGVNCTEVPVAIHADQLTPTWRVYSTGSNVFQTRAGCLIGAEHVNNSYECDIPIGAGICASYQTQTNSPRRARSVASQSIIAYTMSLGAENSVAYSNNSIAIPTNFTISVTTEILPVSMTKTSVDCTMYICGDSTECSNLLLQYGSFCTQLNRALTGIAVEQDKNTQEVFAQVKQIYKTPPIKDFGGFNFSQILPDPSKPSKRSFIEDLLFNKVTLADAGFIKQYGDCLGDIAARDLICAQKFNGLTVLPPLLTDEMIAQYTSALLAGTITSGWTFGAGAALQIPFAMQMAYRFNGIGVTQCVLYENQKLIANQFNSAIGKIQDSLSSTASALGKLQDVVNQNAQALNTLVKQLSSNFGAISSVLNDILSRLDKVEAEVQIDRLITGRLQSLQTYVTQQLIRAAEIRASANLAATKMSECVLGQSKRVDFCGKGYHLMSFPQSAPHGVVFLHVTYVPAQEKNFTTAPAICHDGKAHFPREGVFVSNGTHWFVTQRNFYEPQIITTDNTFVCGNCDVVIGIVNNTVYDPLQPELDSFKEELDKYFKNHTSPDVDLGDISGINASVVNIQKEIDRLNEVAKNLNESLIDLQELGKYEQYIKWPWYIWLGFIAGLIAIVMVTIMLCCMTSCCSCLKGCCSCGSCCKFDEDDSEPVLKGVKLHYT

SEQ ID NO: 13543 - protein, 1273 aa, Artificial Sequence
  SARS-CoV-2/Belgium/BA-02291/2020__EPI_ISL_415159 spike protein (1-1273)(N914C_S1123C)
MFVFLVLLPLVSSQCVNLTTRTQLPPAYTNSFTRGVYYPDKVFRSSVLHSTQDLFLPFFSNVTWFHAIHVSGTNGTKRFDNPVLPFNDGVYFASTEKSNIIRGWIFGTTLDSKTQSLLIVNNATNVVIKVCEFQFCNDPFLGVYYHKNNKSWMESEFRVYSSANNCTFEYVSQPFLMDLEGKQGNFKNLREFVFKNIDGYFKIYSKHTPINLVRDLPQGFSALEPLVDLPIGINITRFQTLLALHRSYLTPGDSSSGWTAGAAAYYVGYLQPRTFLLKYNENGTITDAVDCALDPLSETKCTLKSFTVEKGIYQTSNFRVQPTESIVRFPNITNLCPFGEVFNATRFASVYAWNRKRISNCVADYSVLYNSASFSTFKCYGVSPTKLNDLCFTNVYADSFVIRGDEVRQIAPGQTGKIADYNYKLPDDFTGCVIAWNSNNLDSKVGGNYNYLYRLFRRSNLKPFERDISTEIYQAGSTPCNGVEGFNCYFPLQSYGFQPTNGVGYQPYRVVVLSFELLPAPATVCGPKKSTNLVKNKCVNFNFNGLTGTGVLTESNKKFLPFQQFGRDIADTTDAVRDPQTLEILDITPCSFGGVSVITPGTNTSNQVAVLYQGVNCTEVPVAIHADQLTPTWRVYSTGSNVFQTRAGCLIGAEHVNNSYECDIPIGAGICASYQTQTNSPRRARSVASQSIIAYTMSLGAENSVAYSNNSIAIPTNFTISVTTEILPVSMTKTSVDCTMYICGDSTECSNLLLQYGSFCTQLNRALTGIAVEQDKNTQEVFAQVKQIYKTPPIKDFGGFNFSQILPDPSKPSKRSFIEDLLFNKVTLADAGFIKQYGDCLGDIAARDLICAQKFNGLTVLPPLLTDEMIAQYTSALLAGTITSGWTFGAGAALQIPFAMQMAYRFNGIGVTQCVLYENQKLIANQFNSAIGKIQDSLSSAAPALGKLQDVVNQNAQALNTLVKQLSSNFGAISSVLNDILSRLDKVEAEVQIDRLITGRLQSLQTYVTQQLIRAAEIRASANLAATKMSECVLGQSKRVDFCGKGYHLMSFPQSAPHGVVFLHVTYVPAQEKNFTTAPAICHDGKAHFPREGVFVSNGTHWFVTQRNFYEPQIITTDNTFVCGNCDVVIGIVNNTVYDPLQPELDSFKEELDKYFKNHTSPDVDLGDISGINASVVNIQKEIDRLNEVAKNLNESLIDLQELGKYEQYIKWPWYIWLGFIAGLIAIVMVTIMLCCMTSCCSCLKGCCSCGSCCKFDEDDSEPVLKGVKLHYT

SEQ ID NO: 13544 - protein, 1273 aa, Artificial Sequence
  SARS-CoV-2/USA/WA8-UW5/2020__EPI_ISL_413486 spike protein (1-1273)(N914C_S1123C)
MFVFLVLLPLVSSQCVNLTTRTQLPPAYTNSFTRGVYYPDKVFRSSVLHSTQDLFLPFFSNVTWFHAIHVSGTNGTKRFDNPVLPFNDGVYFASTEKSNIIRGWIFGTTLDSKTQSLLIVNNATNVVIKVCEFQFCNDPFLGVYYHKNNKSWMESEFRVYSSANNCTFEYVSQPFLMDLEGKQGNFKNLREFVFKNIDGYFKIYSKHTPINLVRDLPQGFSALEPLVDLPIGINITRFQTLLALHRSYLTPGDSSSGWTAGAAAYYVGYLQPRTFLLKYNENGTITDAVDCALDPLSETKCTLKSFTVEKGIYQTSNFRVQPTESIVRFPNITNLCPFGEVFNATRFASVYAWNRKRISNCVADYSVLYNSASFSTFKCYGVSPTKLNDLCFTNVYADSFVIRGDEVRQIAPGQTGKIADYNYKLPDDFTGCVIAWNSNNLDSKVGGNYNYLYRLFRKSNLKPFERDISTEIYQAGSTPCNGVEGFNCYFPLQSYGFQPTNGVGYQPYRVVVLSFELLHAPATVCGPKKSTNLVKNKCVNFNFNGLTGTGVLTESNKKFLPFQQFGRDIADTTDAVRDPQTLEILDITPCSFGGVSVITPGTNTSNQVAVLYQDVNCTEVPVAIHADQLTPTWRVYSTGSNVFQTRAGCLIGAEYVNNSYECDIPIGAGICASYQTQTNSPRRARSVASQSIIAYTMSLGAENSVAYSNNSIAIPTNFTISVTTEILPVSMTKTSVDCTMYICGDSTECSNLLLQYGSFCTQLNRALTGIAVEQDKNTQEVFAQVKQIYKTPPIKDFGGFNFSQILPDPSKPSKRSFIEDLLFNKVTLADAGFIKQYGDCLGDIAARDLICAQKFNGLTVLPPLLTDEMIAQYTSALLAGTITSGWTFGAGAALQIPFAMQMAYRFNGIGVTQCVLYENQKLIANQFNSAIGKIQDSLSSTASALGKLQDVVNQNAQALNTLVKQLSSNFGAISSVLNDILSRLDKVEAEVQIDRLITGRLQSLQTYVTQQLIRAAEIRASANLAATKMSECVLGQSKRVDFCGKGYHLMSFPQSAPHGVVFLHVTYVPAQEKNFTTAPAICHDGKAHFPREGVFVSNGTHWFVTQRNFYEPQIITTDNTFVCGNCDVVIGIVNNTVYDPLQPELDSFKEELDKYFKNHTSPDVDLGDISGINASVVNIQKEIDRLNEVAKNLNESLIDLQELGKYEQYIKWPWYIWLGFIAGLIAIVMVTIMLCCMTSCCSCLKGCCSCGSCCKFDEDDSEPVLKGVKLHYT

SEQ ID NO: 13545 - protein, 1273 aa, Artificial Sequence
  SARS-CoV-2/England/20102000506/2020__EPI_ISL_415147 spike protein (1-1273)(N914C_S1123C)
MFVFLVLLPLVSSQCVNLTTRTQLPPAYTNSFTRGVYYPDKVFRSSVLHSTQDLFLPFFSNVTWFHAIHVSGTNGTKRFDNPVLPFNDGVYFASTEKSNIIRGWIFGTTLDSKTQSLLIVNNATNVVIKVCEFQFCNDPFLGVYYHKNNKSWMESEFRVYSSANNCTFEYVSQPFLMDLEGKQGNFKNLREFVFKNIDGYFKIYSKHTPINLVRDLPQGFSALEPLVDLPIGINITRFQTLLALHRSYLTPGDSSSGWTAGAAAYYVGYLQPRTFLLKYNENGTITDAVDCALDPLSETKCTLKSFTVEKGIYQTSNFRVQPTESIVRFPNITNLCPFGEVFNATRFASVYAWNRKRISNCVADYSVLYNSASFSTFKCYGVSPTKLNDLCFTNVYADSFVIRGDEVRQIAPGQTGKIADYNYKLPDDFTGCVIAWNSNNLDSKVGGNYNYLYRLFRKSNLKPFERDISTEIYQAGSTPCNGVEGFNCYFPLQSYGFQPTNGVGYQPYRVVVLSFELLHAPATVCGPKKSTNLVKNKCVNFNFNGLTGTGVLTESNKKFLPFQQFGRDIADTTDAVRDPQTLEILDITPCSFGGVSVITPGTNTSNQVAVLYQGVNCTEVPVAIHADQLTPTWRVYSTGSNVFQTRAGCLIGAEHVNNSYECDIPIGAGICASYQTQTNSPRRARSVASQSIIAYTMSLGAENSVAYSNNSIAIPTNFTISVTTEILPVSMTKTSVDCTMYICGDSTECSNLLLQYGSFCTQLNRALTGIAVEQDKNTQEVFAQVKQIYKTPPIKDFGGFNFSQILPDPSKPSKRSFIEDLLFNKVTLADAGFIKQYGYCLGDIAARDLICAQKFNGLTVLPPLLTDEMIAQYTSALLAGTITSGWTFGAGAALQIPFAMQMAYRFNGIGVTQCVLYENQKLIANQFNSAIGKIQDSLSSTASALGKLQDVVNQNAQALNTLVKQLSSNFGAISSVLNDILSRLDKVEAEVQIDRLITGRLQSLQTYVTQQLIRAAEIRASANLAATKMSECVLGQSKRVDFCGKGYHLMSFPQSAPHGVVFLHVTYVPAQEKNFTTAPAICHDGKAHFPREGVFVSNGTHWFVTQRNFYEPQIITTDNTFVCGNCDVVIGIVNNTVYDPLQPELDSFKEELDKYFKNHTSPDVDLGDISGINASVVNIQKEIDRLNEVAKNLNESLIDLQELGKYEQYIKWPWYIWLGFIAGLIAIVMVTIMLCCMTSCCSCLKGCCSCGSCCKFDEDDSEPVLKGVKLHYT

SEQ ID NO: 13546 - protein, 1273 aa, Artificial Sequence
  SARS-CoV-2/Belgium/VAG-03013/2020__EPI_ISL_415155 spike protein (1-1273)(N914C_S1123C)
MFVFLVLLPLVSSQCVNLTTRTQLPPAYTNSFTRGVYYPDKVFRSSVLHSTQDLFLPFFSNVTWFHAIHVSGTNGTKRFDNPVLPFNDGVYFASTEKSNIIRGWIFGTTLDSKTQSLLIVNNATNVVIKVCEFQFCNDPFLGVYYHKNNKSWMESEFRVYSSANNCTFEYVSQPFLMDLEGKQGNFKNLREFVFKNIDGYFKIYSKHTPINLVRDLPQGFSALEPLVDLPIGINITRFQTLLALHRSYLTPGDSSSGWTAGAAAYYVGYLQPRTFLLKYNENGTITDAVDCALDPLSETKCTLKSFTVEKGIYQTSNFRVQPTESIVRFPNITNLCPFGEVFNATRFASVYAWNRKRISNCVADYSVLYNSASFSTFKCYGVSPTKLNDLCFTNVYADSFVIRGDEVRQIAPGQTGKIADYNYKLPDDFTGCVIAWNSNNLDSKVGGNYNYLYRLFRKSNLKPFERDISTEIYQAGSTPCNGVEGFNCYFPLQSYGFQPTNGVGYQPYRVVVLSFELLHAPATVCGPKKSTNLVKNKCVNFNFNGLTGTGVLTESNKKFLPFQQFGRDIADTTDAVRDPQTLEILDITPCSFGGVSVITPGTNTSNQVAVLYQGVNCTEVPVAIHADQLTPTWRVYSTGSNVFQTRAGCLIGAEHVNNSYECDIPIGAGICASYQTQTNSPRRARSVASQSIIAYTMSLGAENSVAYSNNSIAIPTNFTISVTTEILPVSMTKTSVDCTMYICGDSTECSNLLLQYGSFCTQLNRALTGIAVEQDKNTQEVFAQVKQIYKTPPIKDFGGFNFSQILPDPSKPSKRSFIEDLLFNKVTLADAGFIKQYGDCLGDIAARDLICAQKFNGLTVLPPLLTDEMIAQYTSALLAGTITSGWTFGAGAALQIPFAMQMAYRFNGIGVTQCVLYENQKLIANQFNSAIGKIQDSLSSTATALGKLQDVVNQNAQALNTLVKQLSSNFGAISSVLNDILSRLDKVEAEVQIDRLITGRLQSLQTYVTQQLIRAAEIRASANLAATKMSECVLGQSKRVDFCGKGYHLMSFPQSAPHGVVFLHVTYVPAQEKNFTTAPAICHDGKAHFPREGVFVSNGTHWFVTQRNFYEPQIITTDNTFVCGNCDVVIGIVNNTVYDPLQPELDSFKEELDKYFKNHTSPDVDLGDISGINASVVNIQKEIDRLNEVAKNLNESLIDLQELGKYEQYIKWPWYIWLGFIAGLIAIVMVTIMLCCMTSCCSCLKGCCSCGSCCKFDEDDSEPVLKGVKLHYT

SEQ ID NO: 13547 - protein, 1273 aa, Artificial Sequence
  SARS-CoV-2/Belgium/BC-03016/2020__EPI_ISL_415157 spike protein (1-1273)(N914C_S1123C)
MFVFLVLLPLVSSQCVNLTTRTQLPPAYTNSFTRGVYYPDKVFRSSVLHSTQDLFLPFFSNVTWFHAIHVSGTNGTKRFDNPVLPFNDGVYFASTEKSNIIRGWIFGTTLDSKTQSLLIVNNATNVVIKVCEFQFCNDPFLGVYYHKNNKSWMESEFRVYSSANNCTFEYVSQPFLMDLEGKQGNFKNLREFVFKNIDGYFKIYSKHTPINLVRDLPQGFSALEPLVDLPIGINITRFQTLLALHRSYLTPGDSSSGWTAGAAAYYVGYLQPRTFLLKYNENGTITDAVDCALDPLSETKCTLKSFTVEKGIYQTSNFRVQPTESIVRFPNITNLCPFGEVFNATRFASVYAWNRKRISNCVADYSVLYNSASFSTFKCYGVSPTKLNDLCFTNVYADSFVIRGDEVRQIAPGQTGKIADYNYKLPDDFTGCVIAWNSNNLDSKVGGNYNYLYRLFRKSNLKPFERDISTEIYQAGSTPCNGVEGFNCYFPLQSYGFQPTNGVGYQPYRVVVLSFELLHAPATVCGPKKSTNLVKNKCVNFNFNGLTGTGVLTESNKKFLPFQQFGRDIADTTDAVRDPQTLEILDITPCSFGGVSVITPGTNTSNQVAVLYQGVNCTEVPVAIHADQLTPTWRVYSTGSNVFQTRAGCLIGAEHVNNSYECDIPIGAGICASYQTQTNSPRRARSVASQSIIAYTMSLGAENSVAYSNNSIAIPTNFTISVTTEILPVSMTKTSVDCTMYICGDSTECSNLLLQYGSFCTQLNRALTGIAVEQDKNTQEVFAQVKQIYKTPPIKDFGGFNFSQILPDPSKPSKRSFIEDLLFNKVTLADAGFIKQYGDCLGDIAARDLICAQKFNGLTVLPPLLTDEMIAQYTSALLAGTITSGWTFGAGAALQIPFAMQMAYRFNGIGVTQCVLYENQKLIANQFNSAIGKIQDSLSSTAPALGKLQDVVNQNAQALNTLVKQLSSNFGAISSVLNDILSRLDKVEAEVQIDRLITGRLQSLQTYVTQQLIRAAEIRASANLAATKMSECVLGQSKRVDFCGKGYHLMSFPQSAPHGVVFLHVTYVPAQEKNFTTAPAICHDGKAHFPREGVFVSNGTHWFVTQRNFYEPQIITTDNTFVCGNCDVVIGIVNNTVYDPLQPELDSFKEELDKYFKNHTSPDVDLGDISGINASVVNIQKEIDRLNEVAKNLNESLIDLQELGKYEQYIKWPWYIWLGFIAGLIAIVMVTIMLCCMTSCCSCLKGCCSCGSCCKFDEDDSEPVLKGVKLHYT

SEQ ID NO: 13548 - protein, 1273 aa, Artificial Sequence
  SARS-CoV-2/Germany/BavPat3/2020__EPI_ISL_414521 spike protein (1-1273)(N914C_S1123C)
MFVFLVLLPLVSSQCVNLTTRTQLPPAYTNSFTRGVYYPDKVFRSSVLHSTQDLFLPFFSNVTWFHAIHVSGTNGTKRFDNPVLPFNDGVYFASTEKSNIIRGWIFGTTLDSKTQSLLIVNNATNVVIKVCEFQFCNDPFLGVYYHKNNKSWMESEFRVYSSANNCTFEYVSQPFLMDLEGKQGNFKNLREFVFKNIDGYFKIYSKHTPINLVRDLPQGFSALEPLVDLPIGINITRFQTLLALHRSYLTPGDSSSGWTAGAAAYYVGYLQPRTFLLKYNENGTITDAVDCALDPLSETKCTLKSFTVEKGIYQTSNFRVQPTESIVRFPNITNLCPFGEVFNATRFASVYAWNRKRISNCVADYSVLYNSASFSTFKCYGVSPTKLNDLCFTNVYADSFVIRGDEVRQIAPGQTGKIADYNYKLPDDFTGCVIAWNSNNLDSKVGGNYNYLYRLFRKSNLKPFERDISTEIYQAGSTPCNGVEGFNCYFPLQSYGFQPTNGVGYQPYRVVVLSFELLHAPATVCGPKKSTNLVKNKCVNFNFNGLTGTGVLTESNKKFLPFQQFGRDIADTTDAVRDPQTLEILDITPCSFGGVSVITPGTNTSNQVAVLYQDVNCTEVPVAIHADQLTPTWRVYSTGSNVFQTRAGCLIGAEHVNNSYECDIPIGAGICASYQTQTNSPRRARSVASQSIIAYTMSLGAENSVAYSNNSIAIPTNFTISVTTEILPVSMTKTSVDCTMYICGDSTECSNLLLQYGSFCTQLNRALTGIAVEQDKNTQQVFAQVKQIYKTPPIKDFGGFNFSQILPDPSKPSKRSFIEDLLFNKVTLADAGFIKQYGDCLGDIAARDLICAQKFNGLTVLPPLLTDEMIAQYTSALLAGTITSGWTFGAGAALQIPFAMQMAYRFNGIGVTQCVLYENQKLIANQFNSAIGKIQDSLSSTASALGKLQDVVNQNAQALNTLVKQLSSNFGAISSVLNDILSRLDKVEAEVQIDRLITGRLQSLQTYVTQQLIRAAEIRASANLAATKMSECVLGQSKRVDFCGKGYHLMSFPQSAPHGVVFLHVTYVPAQEKNFTTAPAICHDGKAHFPREGVFVSNGTHWFVTQRNFYEPQIITTDNTFVCGNCDVVIGIVNNTVYDPLQPELDSFKEELDKYFKNHTSPDVDLGDISGINASVVNIQKEIDRLNEVAKNLNESLIDLQELGKYEQYIKWPWYIWLGFIAGLIAIVMVTIMLCCMTSCCSCLKGCCSCGSCCKFDEDDSEPVLKGVKLHYT

SEQ ID NO: 13549 - protein, 1273 aa, Artificial Sequence
  SARS-CoV-2/France/HF1805/2020__EPI_ISL_414628 spike protein (1-1273)(N914C_S1123C)
MFVFLVLLPLVSSQCVNLTTRTQLPPAYTNSFTRGVYYPDKVFRSSVLHSTQDLFLPFFSNVTWFHAIHVSGTNGTKRFDNPVLPFNDGVYFASTEKSNIIRGWIFGTTLDSKTQSLLIVNNATNVVIKVCEFQFCNDPFLGVYYHKNNKSWMESEFRVYSSANNCTFEYVSQPFLMDLEGKQGNFKNLREFVFKNIDGYFKIYSKHTPINLVRDLPQGFSALEPLVDLPIGINITRFQTLLALHRSYLTPGDSSSGWTAGAAAYYVGYLQPRTFLLKYNENGTITDAVDCALDPLSETKCTLKSFTVEKGIYQTSNFRVQPTESIVRFPNITNLCPFGEVFNATRFASVYAWNRKRISNCVADYSVLYNSASFSTFKCYGVSPTKLNDLCFTNVYADSFVIRGDEVRQIAPGQTGKIADYNYKLPDDFTGCVIAWNSNNLDSKVGGNYNYLYRLFRKSNLKPFERDISTEIYQAGSTPCNGVEGFNCYFPLQSYGFQPTNGVGYQPYRVVVLSFELLHAPATVCGPKKSTNLVKNKCVNFNFNGLTGTGVLTESNKKFLPFQQFGRDIADTTDAVRDPQTLEILDITPCSFGGVSVITPGTNTSNQVAVLYQGVNCTEVPVAIHADQLTPTWRVYSTGSNVFQTRAGCLIGAEHVNNSYECDIPIGAGICASYQTQTNSPRRARSVASQSIIAYTMSLGAENSVAYSNNSIAIPTNFTISVTTEILPVSMTKTSVDCTMYICGDSTECSNLLLQYGSFCTQLNRALTGIAVEQDKNTQEVFAQVKQIYKTPPIKDFGGFNFSQILPDPSKPSKRSFIEDLLFNKVTLADAGFIKQYGDCLGDIAARDLICAQKFNGLTVLPPLLTDEMIAQYTSALLAGTITSGWTFGAGAALQIPFAMQMAYRFNGIGVTQCVLYENQKLIANQFNSAIGKIQDSLSSTASALGKLQDVVNQNAQALNTLVKQLSSNFGAISSVLNDILSRLDKVEAEVQIDRLITGRLQSLQTYVTQQLIRAAEIRASANLAATKMSECVLGQSKRVDFCGKGYHLMSFPQSAPHGVVFLHVTYVPAQEKNFTTAPAICHDGKAHFPREGVFVSNGTHWFVTQRNFYEPQIITTDNTFVCGNCDVVIGVVNNTVYDPLQPELDSFKEELDKYFKNHTSPDVDLGDISGINASVVNIQKEIDRLNEVAKNLNESLIDLQELGKYEQYIKWPWYIWLGFIAGLIAIVMVTIMLCCMTSCCSCLKGCCSCGSCCKFDEDDSEPVLKGVKLHYT

SEQ ID NO: 13550 - protein, 1273 aa, Artificial Sequence
  SARS-CoV-2/Netherlands/ZuidHolland_9/2020__EPI_ISL_414445 spike protein (1-1273)(N914C_S1123C)
MFVFLVLLPLVSSQCVNLTTRTQLPPAYTNSFTRGVYYPDKVFRSSVLHSTQDLFLPFFSNVTWFHAIHVSGTNGTKRFDNPVLPFNDGVYFASTEKSNIIRGWIFGTTLDSKTQSLLIVNNATNVVIKVCEFQFCNDPFLGVYYHKNNKSWMESEFRVYSSANNCTFEYVSQPFLMDLEGKQGNFKNLREFVFKNIDGYFKIYSKHTPINLVRDLPQGFSALEPLVDLPIGINITRFQTLLALHRSYLTPGDSSSGWTAGAAAYYVGYLQPRTFLLKYNENGTITDAVDCALDPLSETKCTLKSFTVEKGIYQTSNFRVQPTESIVRFPNITNLCPFGEVFNATRFASVYAWNRKRISNCVADYSVLYNSASFSTFKCYGVSPTKLNDLCFTNVYADSFVIRGDEVRQIAPGQTGKIADYNYKLPDDFTGCVIAWNSNNLDSKVGGNYNYLYRLFRKSNLKPFERDISTEIYQAGSTPCNGVEGFNCYFPLQSYGFQPTNGVGYQPYRVVVLSFELLHAPATVCGPKKSTNLVKNKCVNFNFNGLTGTGVLTESNKKFLPFQQFGRDIADTTDAVRDPQTLEILDITPCSFGGVSVITPGTNTSNQVAVLYQGVNCTEVPVAIHADQLTPTWRVYSTGSNVFQTRAGCLIGAEHVNNSYECDIPIGAGICASYQTQTNSPRRARSVASQSIIAYTMSLGAENSVAYSNNSIAIPTNFTISVTTEILPVSMTKTSVDCTMYICGDSTECSNLLLQYGSFCTQLNRALTGIAVEQDKNTQEVFAQVKQIYKTPPIKDFGGFNFSQILPDPSKPSKRSFIEDLLFNKVTLADAGFIKQYGDCLGDIAARDLICVQKFNGLTVLPPLLTDEMIAQYTSALLAGTITSGWTFGAGAALQIPFAMQMAYRFNGIGVTQCVLYENQKLIANQFNSAIGKIQDSLSSTASALGKLQDVVNQNAQALNTLVKQLSSNFGAISSVLNDILSRLDKVEAEVQIDRLITGRLQSLQTYVTQQLIRAAEIRASANLAATKMSECVLGQSKRVDFCGKGYHLMSFPQSAPHGVVFLHVTYVPAQEKNFTTAPAICHDGKAHFPREGVFVSNGTHWFVTQRNFYEPQIITTDNTFVCGNCDVVIGIVNNTVYDPLQPELDSFKEELDKYFKNHTSPDVDLGDISGINASVVNIQKEIDRLNEVAKNLNESLIDLQELGKYEQYIKWPWYIWLGFIAGLIAIVMVTIMLCCMTSCCSCLKGCCSCGSCCKFDEDDSEPVLKGVKLHYT

SEQ ID NO: 13551 - protein, 1273 aa, Artificial Sequence
  SARS-CoV-2/Finland/FIN03032020A/2020__EPI_ISL_413602 spike protein (1-1273)(N914C_S1123C)
MFVFLVLLPLVSSQCVNLTTRTQLPPAYTNSFTRGVYYPDKVFRSSVLHSTQDLFLPFFSNVTWFHAIHVSGTNGTKRFDNPVLPFNDGVYFASTEKSNIIRGWIFGTTLDSKTQSLLIVNNATNVVIKVCEFQFCNDPFLGVYYHKNNKSWMESEFRVYSSANNCTFEYVSQPFLMDLEGKQGNFKNLREFVFKNIDGYFKIYSKHTPINLVRDLPQGFSALEPLVDLPIGINITRFQTLLALHRSYLTPGDSSSGWTAGAAAYYVGYLQPRTFLLKYNENGTITDAVDCALDPLSETKCTLKSFTVEKGIYQTSNFRVQPTESIVRFPNITNLCPFGEVFNATRFASVYAWNRKRISNCVADYSVLYNSASFSTFKCYGVSPTKLNDLCFTNVYADSFVIRGDEVRQIAPGQTGKIADYNYKLPDDFTGCVISWNSNNLDSKVGGNYNYLYRLFRKSNLKPFERDISTEIYQAGSTPCNGVEGFNCYFPLQSYGFQPTNGVGYQPYRVVVLSFELLHAPATVCGPKKSTNLVKNKCVNFNFNGLTGTGVLTESNKKFLPFQQFGRDIADTTDAVRDPQTLEILDITPCSFGGVSVITPGTNTSNQVAVLYQGVNCTEVPVAIHADQLTPTWRVYSTGSNVFQTRAGCLIGAEHVNNSYECDIPIGAGICASYQTQTNSPRRARSVASQSIIAYTMSLGAENSVAYSNNSIAIPTNFTISVTTEILPVSMTKTSVDCTMYICGDSTECSNLLLQYGSFCTQLNRALTGIAVEQDKNTQEVFAQVKQIYKTPPIKDFGGFNFSQILPDPSKPSKRSFIEDLLFNKVTLADAGFIKQYGDCLGDIAARDLICAQKFNGLTVLPPLLTDEMIAQYTSALLAGTITSGWTFGAGAALQIPFAMQMAYRFNGIGVTQCVLYENQKLIANQFNSAIGKIQDSLSSTASALGKLQDVVNQNAQALNTLVKQLSSNFGAISSVLNDILSRLDKVEAEVQIDRLITGRLQSLQTYVTQQLIRAAEIRASANLAATKMSECVLGQSKRVDFCGKGYHLMSFPQSAPHGVVFLHVTYVPAQEKNFTTAPAICHDGKAHFPREGVFVSNGTHWFVTQRNFYEPQIITTDNTFVCGNCDVVIGIVNNTVYDPLQPELDSFKEELDKYFKNHTSPDVDLGDISGINASVVNIQKEIDRLNEVAKNLNESLIDLQELGKYEQYIKWPWYIWLGFIAGLIAIVMVTIMLCCMTSCCSCLKGCCSCGSCCKFDEDDSEPVLKGVKLHYT

SEQ ID NO: 13552 - protein, 1273 aa, Artificial Sequence
  SARS-CoV-2/France/GE1977/2020__EPI_ISL_414632 spike protein (1-1273)(N914C_S1123C)
MFVFLVLLPLVSSQCVNLTTRTQLPPAYTNSFTRGVYYPDKVFRSSVLHSTQDLFLPFFSNVTWFHAIHVSGTNGTKRFDNPVLPFNDGVYFASTEKSNIIRGWIFGTTLDSKTQSLLIVNNATNVVIKVCEFQFCNDPFLGVYYHKNNKSWMESEFRVYSSANNCTFEYVSQPFLMDLEGKQGNFKNLREFVFKNIDGYFKIYSKHTPINLVRDLPQGFSALEPLVDLPIGINITRFQTLLALHRSYLTPGDSSSGWTAGAAAYYVGYLQPRTFLLKYNENGTITDAVDCALDPLSETKCTLKSFTVEKGIYQTSNFRVQPTESIVRFPNITNLCPFGEVFNATRFASVYAWNRKRISNCVADYSVLYNSASFSTFKCYGVSPTKLNDLCFTNVYADSFVIRGDEVRQIAPGQTGKIADYNYKLPDDFTGCVIAWNSNNLDSKVGGNYNYLYRLFRKSNLKPFERDISTEIYQAGSTPCNGVEGFNCYFPLQSYGFQPTNGVGYQPYRVVVLSFELLHAPATVCGPKKSTNLVKNKCVNFNFNGLTGTGVLTESNKKFLPFQQFGRDIADTTDAVRDPQTLEILDITPCSFGGVSVITPGTNTSNQVAVLYQGVNCTEVPVAIHADQLTPTWRVYSTGSNVFQTRAGCLIGAEHVNNSYECDIPIGAGICASYQTQTNSPRRARSVASQSIIAYTMSLGAENSVAYSNNSIAIPTNFTISVTTEILPVSMTKTSVDCTMYICGDSTECSNLLLQYGSFCTQLNRALTGIAVEQDKNTQEVFAQVKQIYKTPPIKDFGGFNFSQILPDPSKPSKRSFIEDLLFNKVTLADAGFIKQYGDCLGDIAARDLICAQKFNGLTVLPPLLTDEMIAQYTSALLAGTITSGWTFGAGAALQIPFAMQMAYRFNGIGVTQCVLYENQKLIANQFNSAIGKIQDSLFSTASALGKLQDVVNQNAQALNTLVKQLSSNFGAISSVLNDILSRLDKVEAEVQIDRLITGRLQSLQTYVTQQLIRAAEIRASANLAATKMSECVLGQSKRVDFCGKGYHLMSFPQSAPHGVVFLHVTYVPAQEKNFTTAPAICHDGKAHFPREGVFVSNGTHWFVTQRNFYEPQIITTDNTFVCGNCDVVIGIVNNTVYDPLQPELDSFKEELDKYFKNHTSPDVDLGDISGINASVVNIQKEIDRLNEVAKNLNESLIDLQELGKYEQYIKWPWYIWLGFIAGLIAIVMVTIMLCCMTSCCSCLKGCCSCGSCCKFDEDDSEPVLKGVKLHYT

SEQ ID NO: 13553 - protein, 1273 aa, Artificial Sequence
  SARS-CoV-2/Finland/FIN-313/2020__EPI_ISL_414641 spike protein (1-1273)(N914C_S1123C)
MFVFLVLLPLVSSQCVNLTTRTQLPPAYTNSFTRGVYYPDKVFRSSVLHSTQDLFLPFFSNVTWFHAIHVSGTNGTKRFDNPVLPFNDGVYFASTEKSNIIRGWIFGTTLDSKTQSLLIVNNATNVVIKVCEFQFCNDPFLGVYYHKNNKSWMESEFRVYSSANNCTFEYVSQPFLMDLEGKQGNFKNLREFVFKNIDGYFKIYSKHTPINLVRDLPQGFSALEPLVDLPIGINITRFKTLLALHRSYLTPGDSSSGWTAGAAAYYVGYLQPRTFLLKYNENGTITDAVDCALDPLSETKCTLKSFTVEKGIYQTSNFRVQPTESIVRFPNITNLCPFGEVFNATRFASVYAWNRKRISNCVADYSVLYNSASFSTFKCYGVSPTKLNDLCFTNVYADSFVIRGDEVRQIAPGQTGKIADYNYKLPDDFTGCVIAWNSNNLDSKVGGNYNYLYRLFRKSNLKPFERDISTEIYQAGSTPCNGVEGFNCYFPLQSYGFQPTNGVGYQPYRVVVLSFELLHAPATVCGPKKSTNLVKNKCVNFNFNGLTGTGVLTESNKKFLPFQQFGRDIADTTDAVRDPQTLEILDITPCSFGGVSVITPGTNTSNQVAVLYQGVNCTEVPVAIHADQLTPTWRVYSTGSNVFQTRAGCLIGAEHVNNSYECDIPIGAGICASYQTQTNSPRRARSVASQSIIAYTMSLGAENSVAYSNNSIAIPTNFTISVTTEILPVSMTKTSVDCTMYICGDSTECSNLLLQYGSFCTQLNRALTGIAVEQDKNTQEVFAQVKQIYKTPPIKDFGGFNFSQILPDPSKPSKRSFIEDLLFNKVTLADAGFIKQYGDCLGDIAARDLICAQKFNGLTVLPPLLTDEMIAQYTSALLAGTITSGWTFGAGAALQIPFAMQMAYRFNGIGVTQCVLYENQKLIANQFNSAIGKIQDSLSSTASALGKLQDVVNQNAQALNTLVKQLSSNFGAISSVLNDILSRLDKVEAEVQIDRLITGRLQSLQTYVTQQLIRAAEIRASANLAATKMSECVLGQSKRVDFCGKGYHLMSFPQSAPHGVVFLHVTYVPAQEKNFTTAPAICHDGKAHFPREGVFVSNGTHWFVTQRNFYEPQIITTDNTFVCGNCDVVIGIVNNTVYDPLQPELDSFKEELDKYFKNHTSPDVDLGDISGINASVVNIQKEIDRLNEVAKNLNESLIDLQELGKYEQYIKWPWYIWLGFIAGLIAIVMVTIMLCCMTSCCSCLKGCCSCGSCCKFDEDDSEPVLKGVKLHYT

SEQ ID NO: 13554 - protein, 1273 aa, Artificial Sequence
  SARS-CoV-2/Netherlands/ZuidHolland_2/2020__EPI_ISL_414556 spike protein (1-1273)(N914C_S1123C)
MFVFLVLLPLVSSQCVNLTTRTQLPPAYTNSFTRGVYYPDKVFRSSVLHSTQDLFLPFFSNVTWFHAIHVSGTNGTKRFDNPVLPFNDGVYFASTEKSNIIRGWIFGTTLDSKTQSLLIVNNATNVVIKVCEFQFCNDPFLGVYYHKNNKSWMESEFRVYSSANNCTFEYVSQPFLMDLEGKQGNFKNLREFVFKNIDGYFKIYSKHTPINLVRDLPQGFSALEPLVDLPIGINITRFQTLLALHRSYLTPGDSSSGWTAGAAAYYVGYLQPRTFLLKYNENGTITDAVDCALDPLSETKCTLKSFTVEKGIYQTSNFRVQPTESIVRFPNITNLCPFGEVFNATRFASVYAWNRKRISNCVADYSVLYNSASFSTFKCYGVSPTKLNDLCFTNVYADSFVIRGDEVRQIAPGQTGKIADYNYKLPDDFTGCVIAWNSNNLDSKVGGNYNYLYRLFRKSNLKPFERDISTEIYQAGSTPCNGVEGFNCYFPLQSYGFQPTNGVGYQPYRVVVLSFELLHAPATVCGPKKSTNLVKNKCVNFNFNGLTGTGVLTESNKKFLPFQQFGRDIADTTDAVRDPQTLEILDITPCSFGGVSVITPGTNTSNQVAVLYQGVNCTEVPVAIHADQLTPTWRVYSTGSNVFQTRAGCLIGAEHVNNSYECDIPIGAGICASYQTQTNSPRRARSVASQSIIAYTMSLGAENSVAYSNNSIAIPTNFTISVTTEILPVSMTKTSVDCTMYICGDSTECSNLLLQYGSFCTQLNRALTGIALEQDKNTQEVFAQVKQIYKTPPIKDFGGFNFSQILPDPSKPSKRSFIEDLLFNKVTLADAGFIKQYGDCLGDIAARDLICAQKFNGLTVLPPLLTDEMIAQYTSALLAGTITSGWTFGAGAALQIPFAMQMAYRFNGIGVTQCVLYENQKLIANQFNSAIGKIQDSLSSTASALGKLQDVVNQNAQALNTLVKQLSSNFGAISSVLNDILSRLDKVEAEVQIDRLITGRLQSLQTYVTQQLIRAAEIRASANLAATKMSECVLGQSKRVDFCGKGYHLMSFPQSAPHGVVFLHVTYVPAQEKNFTTAPAICHDGKAHFPREGVFVSNGTHWFVTQRNFYEPQIITTDNTFVCGNCDVVIGIVNNTVYDPLQPELDSFKEELDKYFKNHTSPDVDLGDISGINASVVNIQKEIDRLNEVAKNLNESLIDLQELGKYEQYIKWPWYIWLGFIAGLIAIVMVTIMLCCMTSCCSCLKGCCSCGSCCKFDEDDSEPVLKGVKLHYT

SEQ ID NO: 13555 - protein, 1273 aa, Artificial Sequence
  SARS-CoV-2/USA/WA-UW31/2020__EPI_ISL_414618 spike protein (1-1273)(N914C_S1123C)
MFVFLVLLPLVSSQCVNLTTRTQLPPAYTNSFTRGVYYPDKVFRSSVLHSTQDLFLPFFSNVTWFHAIHVSGTNGTKRFDNPVLPFNDGVYFASTEKSNIIRGWIFGTTLDSKTQSLLIVNNATNVVIKVCEFQFCNDPFLGVYYHKNNKSWMESEFRVYSSANNCTFEYVSQPFLMDLEGKQGNFKNLREFVFKNIDGYFKIYSKHTPINLVRDLPQGFSALEPLVDLPIGINITRFQTLLALHRSYLTPGDSSSGWTAGAAAYYVGYLQPRTFLLKYNENGTITDAVDCALDPLSETKCTLKSFTVEKGIYQTSNFRVQPTESIVRFPNITNLCPFGEVFNATRFASVYAWNRKRISNCVADYSVLYNSASFSTFKCYGVSPTKLNDLCFTNVYADSFVIRGDEVRQIAPGQTGKIADYNYKLPDDFTGCVIAWNSNNLDSKVGGNYNYLYRLFRKSNLKPFERDISTEIYQAGSTPCNGAEGFNCYFPLQSYGFQPTNGVGYQPYRVVVLSFELLHAPATVCGPKKSTNLVKNKCVNFNFNGLTGTGVLTESNKKFLPFQQFGRDIADTTDAVRDPQTLEILDITPCSFGGVSVITPGTNTSNQVAVLYQDVNCTEVPVAIHADQLTPTWRVYSTGSNVFQTRAGCLIGAEHVNNSYECDIPIGAGICASYQTQTNSPRRARSVASQSIIAYTMSLGAENSVAYSNNSIAIPTNFTISVTTEILPVSMTKTSVDCTMYICGDSTECSNLLLQYGSFCTQLNRALTGIAVEQDKNTQEVFAQVKQIYKTPPIKDFGGFNFSQILPDPSKPSKRSFIEDLLFNKVTLADAGFIKQYGDCLGDIAARDLICAQKFNGLTVLPPLLTDEMIAQYTSALLAGTITSGWTFGAGAALQIPFAMQMAYRFNGIGVTQCVLYENQKLIANQFNSAIGKIQDSLSSTASALGKLQDVVNQNAQALNTLVKQLSSNFGAISSVLNDILSRLDKVEAEVQIDRLITGRLQSLQTYVTQQLIRAAEIRASANLAATKMSECVLGQSKRVDFCGKGYHLMSFPQSAPHGVVFLHVTYVPAQEKNFTTAPAICHDGKAHFPREGVFVSNGTHWFVTQRNFYEPQIITTDNTFVCGNCDVVIGIVNNTVYDPLQPELDSFKEELDKYFKNHTSPDVDLGDISGINASVVNIQKEIDRLNEVAKNLNESLIDLQELGKYEQYIKWPWYIWLGFIAGLIAIVMVTIMLCCMTSCCSCLKGCCSCGSCCKFDEDDSEPVLKGVKLHYT

SEQ ID NO: 13556 - protein, 1273 aa, Artificial Sequence
  SARS-CoV-2/South Korea/SNU01/2020__EPI_ISL_411929 spike protein (1-1273)(N914C_S1123C)
MFVFLVLLPLVSSQCVNLTTRTQLPPAYTNSFTRGVYYPDKVFRSSVLHSTQDLFLPFFSNVTWFHAIHVSGTNGTKRFDNPVLPFNDGVYFASTEKSNIIRGWIFGTTLDSKTQSLLIVNNATNVVIKVCEFQFCNDPFLGVYYHKNNKSWMESEFRVYSSANNCTFEYVSQPFLMDLEGKQGNFKNLREFVFKNIDGYFKIYSKHTPINLVRDLPQGFWALEPLVDLPIGINITRFQTLLALHRSYLTPGDSSSGWTAGAAAYYVGYLQPRTFLLKYNENGTITDAVDCALDPLSETKCTLKSFTVEKGIYQTSNFRVQPTESIVRFPNITNLCPFGEVFNATRFASVYAWNRKRISNCVADYSVLYNSASFSTFKCYGVSPTKLNDLCFTNVYADSFVIRGDEVRQIAPGQTGKIADYNYKLPDDFTGCVIAWNSNNLDSKVGGNYNYLYRLFRKSNLKPFERDISTEIYQAGSTPCNGVEGFNCYFPLQSYGFQPTNGVGYQPYRVVVLSFELLHAPATVCGPKKSTNLVKNKCVNFNFNGLTGTGVLTESNKKFLPFQQFGRDIADTTDAVRDPQTLEILDITPCSFGGVSVITPGTNTSNQVAVLYQDVNCTEVPVAIHADQLTPTWRVYSTGSNVFQTRAGCLIGAEHVNNSYECDIPIGAGICASYQTQTNSPRRARSVASQSIIAYTMSLGAENSVAYSNNSIAIPTNFTISVTTEILPVSMTKTSVDCTMYICGDSTECSNLLLQYGSFCTQLNRALTGIAVEQDKNTQEVFAQVKQIYKTPPIKDFGGFNFSQILPDPSKPSKRSFIEDLLFNKVTLADAGFIKQYGDCLGDIAARDLICAQKFNGLTVLPPLLTDEMIAQYTSALLAGTITSGWTFGAGAALQIPFAMQMAYRFNGIGVTQCVLYENQKLIANQFNSAIGKIQDSLSSTASALGKLQDVVNQNAQALNTLVKQLSSNFGAISSVLNDILSRLDKVEAEVQIDRLITGRLQSLQTYVTQQLIRAAEIRASANLAATKMSECVLGQSKRVDFCGKGYHLMSFPQSAPHGVVFLHVTYVPAQEKNFTTAPAICHDGKAHFPREGVFVSNGTHWFVTQRNFYEPQIITTDNTFVCGNCDVVIGIVNNTVYDPLQPELDSFKEELDKYFKNHTSPDVDLGDISGINASVVNIQKEIDRLNEVAKNLNESLIDLQELGKYEQYIKWPWYIWLGFIAGLIAIVMVTIMLCCMTSCCSCLKGCCSCGSCCKFDEDDSEPVLKGVKLHYT

SEQ ID NO: 13557 - protein, 1273 aa, Artificial Sequence
  SARS-CoV-2/China/WF0004/2020__EPI_ISL_413694 spike protein (1-1273)(N914C_S1123C)
MFVFLVLLPLVSSQCVNLTTRTQLPPAYTNSFTRGVYYPDKVFRSSVLHSTQDLFLPFFSNVTWFHAIHVSGTNGTKRFDNPVLPFNDGVYFASTEKSNIIRGWIFGTTLDSKTQSLLIVNNATNVVIKVCEFQFCNDPFLGVYYHKNNKSWTESEFRVYSSANNCTFEYVSQPFLMDLEGKQGNFKNLREFVFKNIDGYFKIYSKHTPINLVRDLPQGFSALEPLVDLPIGINITRFQTLLALHRSYLTPGDSSSGWTAGAAAYYVGYLQPRTFLLKYNENGTITDAVDCALDPLSETKCTLKSFTVEKGIYQTSNFRVQPTESIVRFPNITNLCPFGEVFNATRFASVYAWNRKRISNCVADYSVLYNSASFSTFKCYGVSPTKLNDLCFTNVYADSFVIRGDEVRQIAPGQTGKIADYNYKLPDDFTGCVIAWNSNNLDSKVGGNYNYLYRLFRKSNLKPFERDISTEIYQAGSTPCNGVEGFNCYFPLQSYGFQPTNGVGYQPYRVVVLSFELLHAPATVCGPKKSTNLVKNKCVNFNFNGLTGTGVLTESNKKFLPFQQFGRDIADTTDAVRDPQTLEILDITPCSFGGVSVITPGTNTSNQVAVLYQDVNCTEVPVAIHADQLTPTWRVYSTGSNVFQTRAGCLIGAEHVNNSYECDIPIGAGICASYQTQTNSPRRARSVASQSIIAYTMSLGAENSVAYSNNSIAIPTNFTISVTTEILPVSMTKTSVDCTMYICGDSTECSNLLLQYGSFCTQLNRALTGIAVEQDKNTQEVFAQVKQIYKTPPIKDFGGFNFSQILPDPSKPSKRSFIEDLLFNKVTLADAGFIKQYGDCLGDIAARDLICAQKFNGLTVLPPLLTDEMIAQYTSALLAGTITSGWTFGAGAALQIPFAMQMAYRFNGIGVTQCVLYENQKLIANQFNSAIGKIQDSLSSTASALGKLQDVVNQNAQALNTLVKQLSSNFGAISSVLNDILSRLDKVEAEVQIDRLITGRLQSLQTYVTQQLIRAAEIRASANLAATKMSECVLGQSKRFDFCGKGYHLMSFPQSAPHGVVFLHVTYVPAQEKNFTTAPAICHDGKAHFPREGVFVSNGTHWFVTQRNFYEPQIITTDNTFVCGNCDVVIGIVNNTVYDPLQPELDSFKEELDKYFKNHTSPDVDLGDISGINASVVNIQKEIDRLNEVAKNLNESLIDLQELGKYEQYIKWPWYIWLGFIAGLIAIVMVTIMLCCMTSCCSCLKGCCSCGSCCKFDEDDSEPVLKGVKLHYT

SEQ ID NO: 13558 - protein, 1273 aa, Artificial Sequence
  SARS-CoV-2/China/WF0028/2020__EPI_ISL_413791 spike protein (1-1273)(N914C_S1123C)
MFVFLVLLPLVSSQCVNLTTRTQLPPAYTNSFTRGVYYPDKVFRSSVLHSTQDLFLPFFSNVTWFHAIHVSGTNGTKRFDNPVLPFNDGVYFASTEKSNIIRGWIFGTTLDSKTQSLLIVNNATNVVIKVCEFQFCNDPFLGVYYHKNNKSWMESEFRVYSSANNCTFEYVSQPFLMDLEGKQGNFKNLREFVFKNIDGYFKIYSKHTPINLVRDLPQGFSALEPLVDLPIGINITRFQTLLALHRSYLTPGDSSSGWTAGAAAYYVGYLQPRTFLLKYNENGTITDAVDCALDPLSETKCTLKSFTVEKGIYQTSNFRVQPTESIVRFPNITNLCPFGEVFNATRFASVYAWNRKRISNCVADYSVLYNSASFSTFKCYGVSPTKLNDLCFTNVYADSFVIRGDEVRQIAPGQTGKIADYNYKLPDDFTGCVIAWNSNNLDSKVGGNYNYLYRLFRKSNLKPFERDISTEIYQAGSTPCNGVEGFNCYFPLQSYGFQPTNGVGYQPYRVVVLSFELLHAPATVCGPKKSTNLVKNKCVNFNFNGLTGTGVLTESNKKFLPFQQFGRDIADTTDAVRDPQTLEILDITPCSFGGVSVITPGTNTSNQVAVLYQDVNCTEVPVAIHADQLTPTWRVYSTGSNVFQTRAGCLIGAEHVNNSYECDIPIGAGICASYQTQTNSPRRARSVASQSIIAYTMSLGAENSVAYSNNSIAIPTNFTISVTTEILPVSMTKTSVDCTMYICGDSTECSNLLLQYGSFCTQLNRALTGIAVEQDKNTQEVFAQVKQIYKTPPIKDFGGFNFSQILPDPSKPSKRSFIEDLLFNKVTLADAGFIKQYGDCLGDIAARDLICAQKFNGLTVLPPLLTDEMIAQYTSALLAGTITSGWTFGAGAALQIPFAMQMAYRFNGIGVTQCVLYENQKLIANQFNSAIGKIQDSLSSTASALGKLQDVVNQNAQALNTLVKQLSSNFGAISSVLNDILSRLDKVEAEVQIDRLITGRLQSLQTYVTQQLIRAAEIRASANLAATKMSECVLGQSKRVDFCGKGYHLMSFPQSAPHGVVFLHVTYVPAQEKNFTTAPAICHDGKAHFPREGVFVSNGTHWFVTQRNFYEPQIITTDNTFVCGNCDVVIGIVNNTVYDPLQPELESFKEELDKYFKNHTSPDVDLGDISGINASVVNIQKEIDRLNEVAKNLNESLIDLQELGKYEQYIKWPWYIWLGFIAGLIAIVMVTIMLCCMTSCCSCLKGCCSCGSCCKFDEDDSEPVLKGVKLHYT

SEQ ID NO: 13559 - protein, 1273 aa, Artificial Sequence
  SARS-CoV-2/2019-nCoV/USA-CruiseA-18/2020__MT159716.1 spike protein (1-1273)(N914C_S1123C)
MFVFLVLLPLVSSQCVNLTTRTQLPPAYTNSFTRGVYYPDKVFRSSVLHSTQDLFLPFFSNVTWFHAIHVSGTNGTKRFDNPVLPFNDGVYFASTEKSNIIRGWIFGTTLDSKTQSLLIVNNATNVVIKVCEFQFCNDPFLGVYYHKNNKSWMESELRVYSSANNCTFEYVSQPFLMDLEGKQGNFKNLREFVFKNIDGYFKIYSKHTPINLVRDLPQGFSALEPLVDLPIGINITRFQTLLALHRSYLTPGDSSSGWTAGAAAYYVGYLQPRTFLLKYNENGTITDAVDCALDPLSETKCTLKSFTVEKGIYQTSNFRVQPTESIVRFPNITNLCPFGEVFNATRFASVYAWNRKRISNCVADYSVLYNSASFSTFKCYGVSPTKLNDLCFTNVYADSFVIRGDEVRQIAPGQTGKIADYNYKLPDDFTGCVIAWNSNNLDSKVGGNYNYLYRLFRKSNLKPFERDISTEIYQAGSTPCNGVEGFNCYFPLQSYGFQPTNGVGYQPYRVVVLSFELLHAPATVCGPKKSTNLVKNKCVNFNFNGLTGTGVLTESNKKFLPFQQFGRDIADTTDAVRDPQTLEILDITPCSFGGVSVITPGTNTSNQVAVLYQDVNCTEVPVAIHADQLTPTWRVYSTGSNVFQTRAGCLIGAEHVNNSYECDIPIGAGICASYQTQTNSPRRARSVASQSIIAYTMSLGAENSVAYSNNSIAIPTNFTISVTTEILPVSMTKTSVDCTMYICGDSTECSNLLLQYGSFCTQLNRALTGIAVEQDKNTQEVFAQVKQIYKTPPIKDFGGFNFSQILPDPSKPSKRSFIEDLLFNKVTLADAGFIKQYGDCLGDIAARDLICAQKFNGLTVLPPLLTDEMIAQYTSALLAGTITSGWTFGAGAALQIPFAMQMAYRFNGIGVTQCVLYENQKLIANQFNSAIGKIQDSLSSTASALGKLQDVVNQNAQALNTLVKQLSSNFGAISSVLNDILSRLDKVEAEVQIDRLITGRLQSLQTYVTQQLIRAAEIRASANLAATKMSECVLGQSKRVDFCGKGYHLMSFPQSAPHGVVFLHVTYVPAQEKNFTTAPAICHDGKAHFPREGVFVSNGTHWFVTQRNFYEPQIITTDNTFVCGNCDVVIGIVNNTVYDPLQPELDSFKEELDKYFKNHTSPDVDLGDISGINASVVNIQKEIDRLNEVAKNLNESLIDLQELGKYEQYIKWPWYIWLGFIAGLIAIVMVTIMLCCMTSCCSCLKGCCSCGSCCKFDEDDSEPVLKGVKLHYT

SEQ ID NO: 13560 - protein, 1273 aa, Artificial Sequence
  SARS-CoV-2/SARS-CoV-2/Yunnan-01/human/2020/CHN__MT049951.1 spike protein (1-1273)(N914C_S1123C)
MFVFLVLLPLVSSQCVNLTTRTQLPPANTNSFTRGVYYPDKVFRSSVLHSTQDLFLPFFSNVTWFHAIHVSGTNGTKRFDNPVLPFNDGVYFASTEKSNIIRGWIFGTTLDSKTQSLLIVNNATNVVIKVCEFQFCNDPFLGVYYHKNNKSWMESEFRVYSSANNCTFEYVSQPFLMDLEGKQGNFKNLREFVFKNIDGYFKIYSKHTPINLVRDLPQGFSALEPLVDLPIGINITRFQTLLALHRSYLTPGDSSSGWTAGAAAYYVGYLQPRTFLLKYNENGTITDAVDCALDPLSETKCTLKSFTVEKGIYQTSNFRVQPTESIVRFPNITNLCPFGEVFNATRFASVYAWNRKRISNCVADYSVLYNSASFSTFKCYGVSPTKLNDLCFTNVYADSFVIRGDEVRQIAPGQTGKIADYNYKLPDDFTGCVIAWNSNNLDSKVGGNYNYLYRLFRKSNLKPFERDISTEIYQAGSTPCNGVEGFNCYFPLQSYGFQPTNGVGYQPYRVVVLSFELLHAPATVCGPKKSTNLVKNKCVNFNFNGLTGTGVLTESNKKFLPFQQFGRDIADTTDAVRDPQTLEILDITPCSFGGVSVITPGTNTSNQVAVLYQDVNCTEVPVAIHADQLTPTWRVYSTGSNVFQTRAGCLIGAEHVNNSYECDIPIGAGICASYQTQTNSPRRARSVASQSIIAYTMSLGAENSVAYSNNSIAIPTNFTISVTTEILPVSMTKTSVDCTMYICGDSTECSNLLLQYGSFCTQLNRALTGIAVEQDKNTQEVFAQVKQIYKTPPIKDFGGFNFSQILPDPSKPSKRSFIEDLLFNKVTLADAGFIKQYGDCLGDIAARDLICAQKFNGLTVLPPLLTDEMIAQYTSALLAGTITSGWTFGAGAALQIPFAMQMAYRFNGIGVTQCVLYENQKLIANQFNSAIGKIQDSLSSTASALGKLQDVVNQNAQALNTLVKQLSSNFGAISSVLNDILSRLDKVEAEVQIDRLITGRLQSLQTYVTQQLIRAAEIRASANLAATKMSECVLGQSKRVDFCGKGYHLMSFPQSAPHGVVFLHVTYVPAQEKNFTTAPAICHDGKAHFPREGVFVSNGTHWFVTQRNFYEPQIITTDNTFVCGNCDVVIGIVNNTVYDPLQPELDSFKEELDKYFKNHTSPDVDLGDISGINASVVNIQKEIDRLNEVAKNLNESLIDLQELGKYEQYIKWPWYIWLGFIAGLIAIVMVTIMLCCMTSCCSCLKGCCSCGSCCKFDEDDSEPVLKGVKLHYT

SEQ ID NO: 13561 - protein, 1273 aa, Artificial Sequence
  SARS-CoV-2/USA/WA-UW292/2020__EPI_ISL_418077 spike protein (1-1273)(N914C_S1123C)
MFVFLVLLPLVSSQCVNLTTRTQLPPAYTNSFTRGVYYPDKVFRSSVLHSTQDLFLPFFSNVTWFHAIHVSGTNGTKRFDNPVLPFNDGVYFASTEKSNIIRGWIFGTTLDSKTQSLLIVNNATNVVIKVCEFQFCNDPFLGVYYHKNNKSWMESEFRVYSSANNCTFEYVSQPFLMDLEGKQGNFKNLREFVFKNIDGYFKIYSKHTPINLVRDLPQGFSALEPLVDLPIGINITRFQTLLALHRSYLTPGDSSSGWTAGAAAYYVGYLQPRTFLLKYNENGTITDAVDCALDPLSETKCTLKSFTVEKGIYQTSNFRVQPTESIVRFPNITNLCPFGEVFNATRFASVYAWNRKRISNCVADYSVLYNSASFSTFKCYGVSPTKLNDLCFTNVYADSFVIRGDEVRQIAPGQTGKIADYNYKLPDDFTGCVIAWNSNNLDSKVGGNYNYLYRLFRKSNLKPFERDISTEIYQASSTPCNGVEGFNCYFPLQSYGFQPTNGVGYQPYRVVVLSFELLHAPATVCGPKKSTNLVKNKCVNFNFNGLTGTGVLTESNKKFLPFQQFGRDIADTTDAVRDPQTLEILDITPCSFGGVSVITPGTNTSNQVAVLYQDVNCTEVPVAIHADQLTPTWRVYSTGSNVFQTRAGCLIGAEHVNNSYECDIPIGAGICASYQTQTNSPRRARSVASQSIIAYTMSLGAENSVAYSNNSIAIPTNFTISVTTEILPVSMTKTSVDCTMYICGDSTECSNLLLQYGSFCTQLNRALTGIAVEQDKNTQEVFAQVKQIYKTPPIKDFGGFNFSQILPDPSKPSKRSFIEDLLFNKVTLADAGFIKQYGDCLGDIAARDLICAQKFNGLTVLPPLLTDEMIAQYTSALLAGTITSGWTFGAGAALQIPFAMQMAYRFNGIGVTQCVLYENQKLIANQFNSAIGKIQDSLSSTASALGKLQDVVNQNAQALNTLVKQLSSNFGAISSVLNDILSRLDKVEAEVQIDRLITGRLQSLQTYVTQQLIRAAEIRASANLAATKMSECVLGQSKRVDFCGKGYHLMSFPQSAPHGVVFLHVTYVPAQEKNFTTAPAICHDGKAHFPREGVFVSNGTHWFVTQRNFYEPQIITTDNTFVCGNCDVVIGIVNNTVYDPLQPELDSFKEELDKYFKNHTSPDVDLGDISGINASVVNIQKEIDRLNEVAKNLNESLIDLQELGKYEQYIKWPWYIWLGFIAGLIAIVMVTIMLCCMTSCCSCLKGCCSCGSCCKFDEDDSEPVLKGVKLHYT

SEQ ID NO: 13562 - protein, 1273 aa, Artificial Sequence
  SARS-CoV-2/Iceland/192/2020__EPI_ISL_417819 spike protein (1-1273)(N914C_S1123C)
MFVFFVLLPLVSSQCVNLTTRTQLPPAYTNSFTRGVYYPDKVFRSSVLHSTQDLFLPFFSNVTWFHAIHVSGTNGTKRFDNPVLPFNDGVYFASTEKSNIIRGWIFGTTLDSKTQSLLIVNNATNVVIKVCEFQFCNDPFLGVYYHKNNKSWMESEFRVYSSANNCTFEYVSQPFLMDLEGKQGNFKNLREFVFKNIDGYFKIYSKHTPINLVRDLPQGFSALEPLVDLPIGINITRFQTLLALHRSYLTPGDSSSGWTAGAAAYYVGYLQPRTFLLKYNENGTITDAVDCALDPLSETKCTLKSFTVEKGIYQTSNFRVQPTESIVRFPNITNLCPFGEVFNATRFASVYAWNRKRISNCVADYSVLYNSASFSTFKCYGVSPTKLNDLCFTNVYADSFVIRGDEVRQIAPGQTGKIADYNYKLPDDFTGCVIAWNSNNLDSKVGGNYNYLYRLFRKSNLKPFERDISTEIYQAGSTPCNGVEGFNCYFPLQSYGFQPTNGVGYQPYRVVVLSFELLHAPATVCGPKKSTNLVKNKCVNFNFNGLTGTGVLTESNKKFLPFQQFGRDIADTTDAVRDPQTLEILDITPCSFGGVSVITPGTNTSNQVAVLYQGVNCTEVPVAIHADQLTPTWRVYSTGSNVFQTRAGCLIGAEHVNNSYECDIPIGAGICASYQTQTNSPRRARSVASQSIIAYTMSLGAENSVAYSNNSIAIPTNFTISVTTEILPVSMTKTSVDCTMYICGDSTECSNLLLQYGSFCTQLNRALTGIAVEQDKNTQEVFAQVKQIYKTPPIKDFGGFNFSQILPDPSKPSKRSFIEDLLFNKVTLADAGFIKQYGDCLGDIAARDLICAQKFNGLTVLPPLLTDEMIAQYTSALLAGTITSGWTFGAGAALQIPFAMQMAYRFNGIGVTQCVLYENQKLIANQFNSAIGKIQDSLSSTASALGKLQDVVNQNAQALNTLVKQLSSNFGAISSVLNDILSRLDKVEAEVQIDRLITGRLQSLQTYVTQQLIRAAEIRASANLAATKMSECVLGQSKRVDFCGKGYHLMSFPQSAPHGVVFLHVTYVPAQEKNFTTAPAICHDGKAHFPREGVFVSNGTHWFVTQRNFYEPQIITTDNTFVCGNCDVVIGIVNNTVYDPLQPELDSFKEELDKYFKNHTSPDVDLGDISGINASVVNIQKEIDRLNEVAKNLNESLIDLQELGKYEQYIKWPWYIWLGFIAGLIAIVMVTIMLCCMTSCCSCLKGCCSCGSCCKFDEDDSEPVLKGVKLHYT

SEQ ID NO: 13563 - protein, 1273 aa, Artificial Sequence
  SARS-CoV-2/Belgium/ULG-6939/2020__EPI_ISL_417020 spike protein (1-1273)(N914C_S1123C)
MFVFLVLLPLVSSQCVNLTTRTQLPPAYTNSFTRGVYYPDKVFRSSVLHSTQDLFLPFFSNVTWFHAIHVSGTNGTKRFDNPVLPFNDGVYFASTEKSNIIRGWIFGTTLDSKTQSLLIVNNATNVVIKVCEFQFCNDPFLGVYYHKNNKSWMESEFRVYSSANNCTFEYVSQPFLMDLEGKQGNFKNLREFVFKNIDGYFKIYSKHTPINLVRDLPQGFSALEPLVDLPIGINITRFQTLLALHRSYLTPGDSSSGWTAGAAAYYVGYLQPRTFLLKYNENGTITDAVDCALDPLSETKCTLKSFTVEKGIYQTSNFRVQPTESIVRFPNITNLCPFGEVFNATRFASVYAWNRKRISNCVADYSVLYNSASFSTFKCYGVSPTKLNDLCFTNVYADSFVIRGDEVRQIAPGQTGKIADYNYKLPDDFTGCVIAWNSNNLDSKVGGNYNYLYRLFRKSNLKPFERDISTEIYQAGSTPCNGVEGFNCYFPLQSYGFQPTNGVGYQPYRVVVLSFELLHAPATVCGPKKSTNLVKNKCVNFNFNGLTGTGVLTESNKKFLPFQQFGRDIADTTDAVRDPQTLEILDITPCSFGGVSVITPGTNTSNQVAVLYQGVNCTEVPVAIHADQLTPTWRVYSTGSNVFQTRAGCLIGAEHVNNSYECDIPIGAGICASYQTQTNSPRRARSVASQSIIAYTMSLGAENSVVYSNNSIAIPTNFTISVTTEILPVSMTKTSVDCTMYICGDSTECSNLLLQYGSFCTQLNRALTGIAVEQDKNTQEVFAQVKQIYKTPPIKDFGGFNFSQILPDPSKPSKRSFIEDLLFNKVTLADAGFIKQYGDCLGDIAARDLICAQKFNGLTVLPPLLTDEMIAQYTSALLAGTITSGWTFGAGAALQIPFAMQMAYRFNGIGVTQCVLYENQKLIANQFNSAIGKIQDSLSSTASALGKLQDVVNQNAQALNTLVKQLSSNFGAISSVLNDILSRLDKVEAEVQIDRLITGRLQSLQTYVTQQLIRAAEIRASANLAATKMSECVLGQSKRVDFCGKGYHLMSFPQSAPHGVVFLHVTYVPAQEKNFTTAPAICHDGKAHFPREGVFVSNGTHWFVTQRNFYEPQIITTDNTFVCGNCDVVIGIVNNTVYDPLQPELDSFKEELDKYFKNHTSPDVDLGDISGINASVVNIQKEIDRLNEVAKNLNESLIDLQELGKYEQYIKWPWYIWLGFIAGLIAIVMVTIMLCCMTSCCSCLKGCCSCGSCCKFDEDDSEPVLKGVKLHYT

SEQ ID NO: 13564 - protein, 1273 aa, Artificial Sequence
  SARS-CoV-2/France/HF2496/2020__EPI_ISL_418231 spike protein (1-1273)(N914C_S1123C)
MFVFLVLLPLVSSQCVNLTTRTQLPPAYTNSFTRGVYYPDKVFRSSVLHSTQDLFLPFFSNVTWFHAIHVSGTNGTKRFDNPVLPFNDGVYFASTEKSNIIRGWIFGTTLDSKTQSLLIVNNATNVVIKVCEFQFCNDPFLGVYYHKNNKSWMESEFRVYSSANNCTFEYVSQPFLMDLEGKQGNFKNLREFVFKNIDGYFKIYSKHTPINLVRDLPQGFSALEPLVDLPIGINITRFQTLLALHRSYLTPGDSSSGWTAGAAAYYVGYLQPRTFLLKYNENGTITDAVDCALDPLSETKCTLKSFTVEKGIYQTSNFRVQPTESIVRFPNITNLCPFGEVFNATRFASVYAWNRKRISNCVADYSVLYNSASFSTFKCYGVSPTKLNDLCFTNVYADSFVIRGDEVRQIAPGQTGKIADYNYKLPDDFTGCVIAWNSNNLDSKVGGNYNYLYRLFRKSNLKPFERDISTEIYQAGSTPCNGVEGFNCYFPLQSYGFQPTNGVGYQPYRVVVLSFELLHAPATVCGPKKSTNLVKNKCVNFNFNGLTGTGVLTESNKKFLPFQQFGRDIADTTDAVRDPQTLEILDITPCSFGGVSVITPGTNTSNQVAVLYQGVNCTEVPVAIHADQLTPTWRVYSTGSNVFQTRAGCLIGAEHVNNSYECDIPIGAGICASYQTQTNSPRRARSVASQSIIAYTMSLGAENSVAYSNNSIAIPTNFTISVTTEILPVSMTKTSVDCTMYICGDSTECSNLLLQYGSFCTQLNRALTGIAVEQDKNTQEVFAQVKQIYKTPPIKDFGGFNFSQILPDPSKPSKRSFIEDLLFNKVTLADAGFIKQYGDCLGDIVARDLICAQKFNGLTVLPPLLTDEMIAQYTSALLAGTITSGWTFGAGAALQIPFAMQMAYRFNGIGVTQCVLYENQKLIANQFNSAIGKIQDSLSSTASALGKLQDVVNQNAQALNTLVKQLSSNFGAISSVLNDILSRLDKVEAEVQIDRLITGRLQSLQTYVTQQLIRAAEIRASANLAATKMSECVLGQSKRVDFCGKGYHLMSFPQSAPHGVVFLHVTYVPAQEKNFTTAPAICHDGKAHFPREGVFVSNGTHWFVTQRNFYEPQIITTDNTFVCGNCDVVIGIVNNTVYDPLQPELDSFKEELDKYFKNHTSPDVDLGDISGINASVVNIQKEIDRLNEVAKNLNESLIDLQELGKYEQYIKWPWYIWLGFIAGLIAIVMVTIMLCCMTSCCSCLKGCCSCGSCCKFDEDDSEPVLKGVKLHYT

SEQ ID NO: 13565 - protein, 1273 aa, Artificial Sequence
  SARS-CoV-2/USA/WA-UW291/2020__EPI_ISL_418076 spike protein (1-1273)(N914C_S1123C)
MFVFLVLLPLVSSQCVNLTTRTQLPPAYTNSFTRGVYYPDKVFRSSVLHSTQDLFLPFFSNVTWFHAIHVSGTNGTKRFDNPVLPFNDGVYFASTEKSNIIRGWIFGTTLDSKTQSLLIVNNATNVVIKVCEFQFCNDPFLGVYYHKNNKSWMESEFRVYSSANNCTFEYVSQPFLMDLEGKQGNFKNLREFVFKNIDGYFKIYSKHTPINLVRDLPQGFSALEPLVDLPIGINITRFQTLLALHRSYLTPGDSSSGWTAGAAAYYVGYLQPRTFLLKYNENGTITDAVDCALDPLSETKCTLKSFTVEKGIYQTSNFRVQPTESIVRFPNITNLCPFGEVFNATRFASVYAWNRKRISNCVADYSVLYNSASFSTFKCYGVSPTKLNDLCFTNVYADSFVIRGDEVRQIAPGQTGKIADYNYKLPDDFTGCVIAWNSNNLDSKVGGNYNYLYRLFRKSNLKPFERDISTEIYQAGSTPCNGVEGFNCYFPLQSYGFQPTNGVGYQPYRVVVLSFELLHAPATVCGPKKSTNLVKNKCVNFNFNGLTGTGVLTESNKKFLPFQQFGRDIADTTDAVRDPQTLEILDITPCSFGGVSVITPGTNTSNQVAVLYQGVNCTEVPVAIHADQLTPTWRVYSTGSNVFQTRAGCLIGAEHVNNSYECDIPIGAGICASYQTQTNSPRRARSVASQSIIAYTMSLGAENSVAYSNNSIAIPTNFTISVTTEILPVSMTKTSVDCTMYICGDSTECSNLLLQYGSFCTQLNRALTGIAVEQDKNTQEVFAQVKQIYKTPPIKDFGGFNFSQILPDPSKPSKRSFIEDLLFNKVTLADAGFIKQYGDCLGDIAARDLICAQKFNGLTVLPPLLTDEMIAQYTSALLAGTITSGWTFGAGAALQIPFAMQMAYRFNGIGVTQCVLYENQKLIANQFNSAIGKIQYSLSSTASALGKLQDVVNQNAQALNTLVKQLSSNFGAISSVLNDILSRLDKVEAEVQIDRLITGRLQSLQTYVTQQLIRAAEIRASANLAATKMSECVLGQSKRVDFCGKGYHLMSFPQSAPHGVVFLHVTYVPAQEKNFTTAPAICHDGKAHFPREGVFVSNGTHWFVTQRNFYEPQIITTDNTFVCGNCDVVIGIVNNTVYDPLQPELDSFKEELDKYFKNHTSPDVDLGDISGINASVVNIQKEIDRLNEVAKNLNESLIDLQELGKYEQYIKWPWYIWLGFIAGLIAIVMVTIMLCCMTSCCSCLKGCCSCGSCCKFDEDDSEPVLKGVKLHYT

SEQ ID NO: 13566 - protein, 1273 aa, Artificial Sequence
  SARS-CoV-2/Portugal/PT0034/2020__EPI_ISL_418019 spike protein (1-1273)(N914C_S1123C)
MFVFLVLLPLVSSQCVNLTTRTQLPPAYTNSFTRGVYYPDKVFRSSVLHSTQDLFLPFFSNVTWFHAIHVSGTNGTKRFDNPVLPFNDGVYFASTEKSNIIRGWIFGTTLDSKTQSLLIVNNATNVVIKVCEFQFCNDPFLGVYYHKNNKSWMESEFRVYSSANNCTFEYVSQPFLMDLEGKQGNFKNLREFVFKNIDGYFKIYSKHTPINLVRDLPQGFSALEPLVDLPIGINITRFQTLLALHRSYLTPGDSSSGWTAGAAAYYVGYLQPRTFLLKYNENGTITDAVDCALDPLSETKCTLKSFTVEKGIYQTSNFRVQPTESIVRFPNITNLCPFGEVFNATRFASVYAWNRKRISNCVADYSVLYNSASFSTFKCYGVSPTKLNDLCFTNVYADSFVIRGDEVRQIAPGQTGKIADYNYKLPDDFTGCVIAWNSNNLDSKVGGNYNYLYRLFRKSNLKPFERDISTEIYQAGSTPCNGVEGFNCYFPLQSYGFQPTNGVGYQPYRVVVLSFELLHAPATVCGPKKSTNLVKNKCVNFNFNGLTGTGVLTESNKKFLPFQQFGRDIADTTDAVRDPQTLEILDITPCSFGGVSVITPGTNTSNQVAVLYQGVNCTEVPVAIHADQLTPTWRVYSTGSNVFQTRAGCLIGAEHVNNSYECDIPIGAGICASYQTQTNSPRRARSVASQSIIAYTMSLGAENSVAYSNNSIAIPTNFTISVTTEILPVSMTKTSVDCTMYICGDSTECSNLLLQYGSFCTQLNRALTGIAVEQDKNTQEVFAQVKQIYKTPPIKDFGGFNFSQILPDPSKPSKRSFIEDLLFNKVTLADAGFIKQYGDCLGDIAARDLICAQKFNGLTVLPPLLTDEMIAQYTSALLAGTITSGWTFGAGAALQIPFAMQMAYRFNGIGVTQCVLYENQKLIANQFNSAIGKIQDSLSSTASALGKLQDVVNQNAQALNTLVKQLSSNFGAISSVLNDILSRLDKVEAEVQIDRLITGRLQSLQTYVTQQLIRAAEIRASANLAATKMSECVLGQSKRVDFCGKGYHLMSFPQSAPHGVVFLHVTYVPAQEKNFTTAPAICHDGKAHFPREGVFVSNGTHWFVTQRNFYEPQIITTDNTFVCGNCDVVIGIVNNTVYDPLQPELDSFKEELDKYFKNHTSPDVDLGDISGINASVVNIQKEIDRLNEVAKNLNESLIDLQELGKYEQYIKWPWYIWLGFIAGLIAIVMVTIMLCCITSCCSCLKGCCSCGSCCKFDEDDSEPVLKGVKLHYT

SEQ ID NO: 13567 - protein, 1273 aa, Artificial Sequence
  SARS-CoV-2/Iceland/202/2020__EPI_ISL_417750 spike protein (1-1273)(N914C_S1123C)
MFVFLVLLPLVSSQCVNLTTRTQLPPAYTNSFTRGVYYPDKVFRSSVLHSTQDLFLPFFSNVTWFHAIHVSGTNGTKRFDNPVLPFNDGVYFASTEKSNIIRGWIFGTTLDSKTQSLLIVNNATNVVIKVCEFQFCNDPFLGVYYHKNNKSWMESEFRVYSSANNCTFEYVSQPFLMDLEGKQGNFKNLREFVFKNIDGYFKIYSKHTPINLVRDLPQGFSALEPLVDLPIGINITRFQTLLALHRSYLTPGDSSSGWTAGAAAYYVGYLQPRTFLLKYNENGTITDAVDCALDPLSETKCTLKSFTVEKGIYQTSNFRVQPTESIVRFPNITNLCPFGEVFNATRFASVYAWNRKRISNCVADYSVLYNSASFSTFKCYGVSPTKLNDLCFTNVYADSFVIRGDEVRQIAPGQTGKIADYNYKLPDDFTGCVIAWNSNNLDSKVGGNYNYLYRLFRKSNLKPFERDISTEIYQAGSTPCNGVEGFNCYFPLQSYGFQPTNGVGYQPYRVVVLSFELLHAPATVCGPKKSTNLVKNKCVNFNFNGLTGTGVLTESNKKFLPFQQFGRDIADTTDAVRDPQTLEILDITPCSFGGVSVITPGTNTSNQVAVLYQDVNCTEVPVAIHADQLTPTWRVYSTGSNVFQTRAGCLIGAEHVNNSYECDIPIGAGICASYQTQTNSPRRARSVASQSIIAYTMSLGAENSVAYSNNSIAIPTNFTISVTTEILPVSMTKTSVDCTMYICGDSTECSNLLLQYGSFCTQLNRALTGIAVEQDKNTQEVFAQVKQIYKTPPIKDFGGFNFSQILPDPSKPSKRSFIEDLLFNKVTLADAGFIKQYGDCLGDIAARDLICAQKFNGLTVLPPLLTDEMIAQYTSALLAGTITSGWTFGAGAALQIPFAMQMAYRFNGIGVTQCVLYENQKLIANQFNSAIGKIQDSLSSTASALGKLQDVVNQNAQALNTLVKQLSSNFGAISSVLNDILSRLDKVEAEVQIDRLITGRLQSLQTYVTQQLIRAAEIRASANLAATKMSECVLGQSKRVDFCGKGYHLMSFPQSAPHGVVFLHVTYVPAQEKNFTTAPAICHDGKAHFPREGVFVSNGTHWFVTQRNFYEPQIITTDNTFVCGNCDVVIGIVNNTVYDPLQPELDSFKEELDKYFKNHTSPDVDLGDIPGINASVVNIQKEIDRLNEVAKNLNESLIDLQELGKYEQYIKWPWYIWLGFIAGLIAIVMVTIMLCCMTSCCSCLKGCCSCGSCCKFDEDDSEPVLKGVKLHYT

SEQ ID NO: 13568 - protein, 1273 aa, Artificial Sequence
  SARS-CoV-2/USA/WA-UW261/2020__EPI_ISL_418046 spike protein (1-1273)(N914C_S1123C)
MFVFLVLLPLVSSQCVNLTTRTQLPPAYTNSFTRGVYYPDKVFRSSVLHSTQDLFLPFFSNVTWFHAIHVSGTNGTKRFDNPVLPFNDGVYFASTEKSNIIRGWIFGTTLDSKTQSLLIVNNATNVVIKVCEFQFCNDPFLGVYYHKNNKSWMESEFRVYSSANNCTFEYVSQPFLMDLEGKQGNFKNLREFVFKNIDGYFKIYSKHTPINLVRDLPQGFSALEPLVDLPIGINITRFQTLLALHRSYLTPGDSSSGWTAGAAAYYVGYLQPRTFLLKYNENGTITDAVDCALDPLSETKCTLKSFTVEKGIYQTSNFRVQPTESIVRFPNITNLCPFGEVFNATRFTSVYAWNRKRISNCVADYSVLYNSASFSTFKCYGVSPTKLNDLCFTNVYADSFVIRGDEVRQIAPGQTGKIADYNYKLPDDFTGCVIAWNSNNLDSKVGGNYNYLYRLFRKSNLKPFERDISTEIYQAGSTPCNGVEGFNCYFPLQSYGFQPTNGVGYQPYRVVVLSFELLHAPATVCGPKKSTNLVKNKCVNFNFNGLTGTGVLTESNKKFLPFQQFGRDIADTTDAVRDPQTLEILDITPCSFGGVSVITPGTNTSNQVAVLYQDVNCTEVPVAIHADQLTPTWRVYSTGSNVFQTRAGCLIGAEHVNNSYECDIPIGAGICASYQTQTNSPRRARSVASQSIIAYTMSLGAENSVAYSNNSIAIPTNFTISVTTEILPVSMTKTSVDCTMYICGDSTECSNLLLQYGSFCTQLNRALTGIAVEQDKNTQEVFAQVKQIYKTPPIKDFGGFNFSQILPDPSKPSKRSFIEDLLFNKVTLADAGFIKQYGDCLGDIAARDLICAQKFNGLTVLPPLLTDEMIAQYTSALLAGTITSGWTFGAGAALQIPFAMQMAYRFNGIGVTQCVLYENQKLIANQFNSAIGKIQDSLSSTASALGKLQDVVNQNAQALNTLVKQLSSNFGAISSVLNDILSRLDKVEAEVQIDRLITGRLQSLQTYVTQQLIRAAEIRASANLAATKMSECVLGQSKRVDFCGKGYHLMSFPQSAPHGVVFLHVTYVPAQEKNFTTAPAICHDGKAHFPREGVFVSNGTHWFVTQRNFYEPQIITTDNTFVCGNCDVVIGIVNNTVYDPLQPELDSFKEELDKYFKNHTSPDVDLGDISGINASVVNIQKEIDRLNEVAKNLNESLIDLQELGKYEQYIKWPWYIWLGFIAGLIAIVMVTIMLCCMTSCCSCLKGCCSCGSCCKFDEDDSEPVLKGVKLHYT

SEQ ID NO: 13569 - protein, 1273 aa, Artificial Sequence
  SARS-CoV-2/Portugal/PT0035/2020__EPI_ISL_418020 spike protein (1-1273)(N914C_S1123C)
MFVFLVLLPLVSSQCVNLTTRTQLPPAYTNSFTRGVYYPDKVFRSSVLHSTQDLFLPFFSNVTWFHAIHVSGTNGTKRFDNPVLPFNDGVYFASTEKSNIIRGWIFGTTLDSKTQSLLIVNNATNVVIKVCEFQFCNDPFLGVYYHKNNKSWMESEFRVYSSANNCTFEYVSQPFLMDLEGKQGNFKNLREFVFKNIDGYFKIYSKHTPINLVRDLPQGFSALEPLVDLPIGINITRFQTLLALHRSYLTPGDSSSGWTAGAAAYYVGYLQPRTFLLKYNENGTITDAVDCALDPLSETKCTLKSFTVEKGIYQTSNFRVQPTESIVRFPNITNLCPFGEVFNATRFASVYAWNRKRISNCVADYSVLYNSASFSTFKCYGVSPTKLNDLCFTNVYADSFVIRGDEVRQIAPGQTGKIADYNYKLPDDFTGCVIAWNSNNLDSKVGGNYNYLYRLFRKSNLKPFERDISTEIYQAGSTPCNGVEGFNCYFPLQSYGFQPTNGVGYQPYRVVVLSFELLHAPATVCGPKKSTNLVKNKCVNFNFNGLTGTGVLTESNKKFLPFQQFGRDIADTTDAVRDPQTLEILDITPCSFGGVSVITPGTNTSNQVAVLYQDVNCTEVPVAIHADQLTPTWRVYSTGSNVFQTRAGCLIGAEHVNNSYECDIPIGAGICASYQTQTNSPRRARSVASQSIIAYTMSLGAENSVAYSNNSIAIPTNFTISVTTEILPVSMTKTSVDCTMYICGDSTECSNLLLQYGSFCTQLNRALTGIAVEQDKNTQEVFAQVKQIYKTPPIKDFGGFNFSQILPDPSKPSKRSFIEDLLFNKVTLADAGFIKQYGDCLGDISARDLICAQKFNGLTVLPPLLTDEMIAQYTSALLAGTITSGWTFGAGAALQIPFAMQMAYRFNGIGVTQCVLYENQKLIANQFNSAIGKIQDSLSSTASALGKLQDVVNQNAQALNTLVKQLSSNFGAISSVLNDILSRLDKVEAEVQIDRLITGRLQSLQTYVTQQLIRAAEIRASANLAATKMSECVLGQSKRVDFCGKGYHLMSFPQSAPHGVVFLHVTYVPAQEKNFTTAPAICHDGKAHFPREGVFVSNGTHWFVTQRNFYEPQIITTDNTFVCGNCDVVIGIVNNTVYDPLQPELDSFKEELDKYFKNHTSPDVDLGDISGINASVVNIQKEIDRLNEVAKNLNESLIDLQELGKYEQYIKWPWYIWLGFIAGLIAIVMVTIMLCCMTSCCSCLKGCCSCGSCCKFDEDDSEPVLKGVKLHYT

SEQ ID NO: 13570 - protein, 1273 aa, Artificial Sequence
  SARS-CoV-2/USA/NY-NYUMC7/2020__EPI_ISL_418192 spike protein (1-1273)(N914C_S1123C)
MFVFLVLLPLVSSQCVNLTTRTQLPPAYTNSFTRGVYYPDKVFRSSVLHSTQDLFLPFFSNVTWFHAIHVSGTNGTKRFDNPVLPFNDGVYFASTEKSNIIRGWIFGTTLDSKTQSLLIVNNATNVVIKVCEFQFCNDPFLGVYHHKNNKSWMESEFRVYSSANNCTFEYVSQPFLMDLEGKQGNFKNLREFVFKNIDGYFKIYSKHTPINLVRDLPQGFSALEPLVDLPIGINITRFQTLLALHRSYLTPGDSSSGWTAGAAAYYVGYLQPRTFLLKYNENGTITDAVDCALDPLSETKCTLKSFTVEKGIYQTSNFRVQPTESIVRFPNITNLCPFGEVFNATRFASVYAWNRKRISNCVADYSVLYNSASFSTFKCYGVSPTKLNDLCFTNVYADSFVIRGDEVRQIAPGQTGKIADYNYKLPDDFTGCVIAWNSNNLDSKVGGNYNYLYRLFRKSNLKPFERDISTEIYQAGSTPCNGVEGFNCYFPLQSYGFQPTNGVGYQPYRVVVLSFELLHAPATVCGPKKSTNLVKNKCVNFNFNGLTGTGVLTESNKKFLPFQQFGRDIADTTDAVRDPQTLEILDITPCSFGGVSVITPGTNTSNQVAVLYQGVNCTEVPVAIHADQLTPTWRVYSTGSNVFQTRAGCLIGAEHVNNSYECDIPIGAGICASYQTQTNSPRRARSVASQSIIAYTMSLGAENSVAYSNNSIAIPTNFTISVTTEILPVSMTKTSVDCTMYICGDSTECSNLLLQYGSFCTQLNRALTGIAVEQDKNTQEVFAQVKQIYKTPPIKDFGGFNFSQILPDPSKPSKRSFIEDLLFNKVTLADAGFIKQYGDCLGDIAARDLICAQKFNGLTVLPPLLTDEMIAQYTSALLAGTITSGWTFGAGAALQIPFAMQMAYRFNGIGVTQCVLYENQKLIANQFNSAIGKIQDSLSSTASALGKLQDVVNQNAQALNTLVKQLSSNFGAISSVLNDILSRLDKVEAEVQIDRLITGRLQSLQTYVTQQLIRAAEIRASANLAATKMSECVLGQSKRVDFCGKGYHLMSFPQSAPHGVVFLHVTYVPAQEKNFTTAPAICHDGKAHFPREGVFVSNGTHWFVTQRNFYEPQIITTDNTFVCGNCDVVIGIVNNTVYDPLQPELDSFKEELDKYFKNHTSPDVDLGDISGINASVVNIQKEIDRLNEVAKNLNESLIDLQELGKYEQYIKWPWYIWLGFIAGLIAIVMVTIMLCCMTSCCSCLKGCCSCGSCCKFDEDDSEPVLKGVKLHYT

SEQ ID NO: 13571 - protein, 1273 aa, Artificial Sequence
  SARS-CoV-2/Iceland/189/2020__EPI_ISL_417709 spike protein (1-1273)(N914C_S1123C)
MFVFLVLLPLVSSQCVNLTTRTQLPPAYTNSFTRGVYYPDKVFRSSVLHSTQDLFLPFFSNVTWFHAIHVSGTNGTKRFDNPVLPFNDGVYFASTEKSNIIRGWIFGTTLDSKTQSLLIVNNATNVVIKVCEFQFCNDPFLGVYYHKNNKSWMESEFRVYSSANNCTFEYVSQPFLMDLEGKQGNFKNLREFVFKNIDGYFKIYSKHTPINLVRDLPQGFSALEPLVDLPIGINITRFQTLLALHRSYLTPGDSSSGWTAGAAAYYVGYLQPRTFLLKYNENGTITDAVDCALDPLSETKCTLKSFTVEKGIYQTSNFRVQPTESIVRFPNITNLCPFGEVFNATRFASVYAWNRKRISNCVADYSVLYNSASFSTFKCYGVSPTKLNDLCFTNVYADSFVIRGDEVRQIAPGQTGKIADYNYKLPDDFTGCVIAWNSNNLDSKVGGNYNYLYRLFRKSNLKPFERDISTEIYQAGSTPCNGVEGFNCYFPLQSYGFQPTNGVGYQPYRVVVLSFELLHAPATVCGPKKSTNLVKNKCVNFNFNGLTGTGVLTESNKKFLPFQQFGRDIADTTDAVRDPQTLEILDITPCSFGGVSVITPGTNTSNQVAVLYQGVNCTEVPVAIHADQLTPTWRVYSTGSNVFQTRAGCLIGAEHVNNSYECDIPIGAGICASYQTQTNSPRRARSVASQSIIAYTMSLGAENSVAYSNNSIAIPTNFTISVTTEILPVSMTKTSVDCTMYICGDSTECSNLLLQYGSFCTQLNRALTGIAVEQDKNTQEVFAQVKQIYKTPPIKDFGGFNFSQILPDPSKPSKRSFIEDLLFNKVTLADAGFTKQYGDCLGDIAARDLICAQKFNGLTVLPPLLTDEMIAQYTSALLAGTITSGWTFGAGAALQIPFAMQMAYRFNGIGVTQCVLYENQKLIANQFNSAIGKIQDSLSSTASALGKLQDVVNQNAQALNTLVKQLSSNFGAISSVLNDILSRLDKVEAEVQIDRLITGRLQSLQTYVTQQLIRAAEIRASANLAATKMSECVLGQSKRVDFCGKGYHLMSFPQSAPHGVVFLHVTYVPAQEKNFTTAPAICHDGKAHFPREGVFVSNGTHWFVTQRNFYEPQIITTDNTFVCGNCDVVIGIVNNTVYDPLQPELDSFKEELDKYFKNHTSPDVDLGDISGINASVVNIQKEIDRLNEVAKNLNESLIDLQELGKYEQYIKWPWYIWLGFIAGLIAIVMVTIMLCCMTSCCSCLKGCCSCGSCCKFDEDDSEPVLKGVKLHYT

SEQ ID NO: 13572 - protein, 1273 aa, Artificial Sequence
  SARS-CoV-2/Australia/NSW56/2020__EPI_ISL_417408 spike protein (1-1273)(N914C_S1123C)
MFVFLVLLPLVSSQCVNLTTRTQLPPAYTNSFTRGVYYPDKVFRSSVLHSTQDLFLPFFSNVTWFHAIHVSGTNGTKRFDNPVLPFNDGVYFASTEKSNIIRGWIFGTTLDSKTQSLLIVNNATNVVIKVCEFQFCNDPFLGVYYHKNNKSWMESEFRVYSSANNCTFEYVSQPFLMDLEGKQGNFKNLREFVFKNIDGYFKIYSKHTPINLVRDLPQGFSALEPLVDLPIGINITRFQTLLALHRSYLTPGDSSSGWTAGAAAYYVGYLQPRTFLLKYNENGTITDAVDCALDPLSETKCTLKSFTVEKGIYQTSNFRVQPTESIVRFPNITNLCPFGEVFNATRFASVYAWNRKRISNCVADYSVLYNSASFSTFKCYGVSPTKLNDLCFTNVYADSFVIRGDEVRQIAPGQTGKIADYNYKLPDDFTGCVIAWNSNNLDSKVGGNYNYLYRLFRKSNLKPFERDISTEIYQAGSTPCNGVEGFNCYFPLQSYGFQPTNGVGYQPYRVVVLSFELLHAPATVCGPKKSTNLVKNKCVNFNFNGLTGTGVLTESNKKFLPFQQFGRDIADTTDAVRDPQTLEILDITPCSFGGVSVITPGTNTSNQVAVLYQDVNCTEVPVAIHADQLTPTWRVYSTGSNVFQTRAGCLIGAEHVNNSYECDIPIGAGICASYQTQTNSPRRARSVASQSIIAYTMSLGAENSVAYSNNSIAIPTNFTISVTTEILPVSMTKTSVDCTMYICGDSTECSNLLLQYGSFCTQLNRALTGIAVEQDKNTQEVFAQVKQIYKTPPIKDFGGFNFSQILPDSSKPSKRSFIEDLLFNKVTLADAGFIKQYGDCLGDIAARDLICAQKFNGLTVLPPLLTDEMIAQYTSALLAGTITSGWTFGAGAALQIPFAMQMAYRFNGIGVTQCVLYENQKLIANQFNSAIGKIQDSLSSTASALGKLQDVVNQNAQALNTLVKQLSSNFGAISSVLNDILSRLDKVEAEVQIDRLITGRLQSLQTYVTQQLIRAAEIRASANLAATKMSECVLGQSKRVDFCGKGYHLMSFPQSAPHGVVFLHVTYVPAQEKNFTTAPAICHDGKAHFPREGVFVSNGTHWFVTQRNFYEPQIITTDNTFVCGNCDVVIGIVNNTVYDPLQPELDSFKEELDKYFKNHTSPDVDLGDISGINASVVNIQKEIDRLNEVAKNLNESLIDLQELGKYEQYIKWPWYIWLGFIAGLIAIVMVTIMLCCMTSCCSCLKGCCSCGSCCKFDEDDSEPVLKGVKLHYT

SEQ ID NO: 13573 - protein, 1273 aa, Artificial Sequence
  SARS-CoV-2/Iceland/280/2020__EPI_ISL_417608 spike protein (1-1273)(N914C_S1123C)
MFVFLVLLPLVSSQCVNLTTRTQLPPAYTNSFTRGVYYPDKVFRSSVLHSTQDLFLPFFSNVTWFHAIHVSGTNGTKRFDNPVLPFNDGVYFASTEKSNIIRGWIFGTTLDSKTQSLLIVNNATNVVIKVCEFQFCNDPFLGVYYHKNNKSWMESEFRVYSSANNCTFEYVSQPFLMDLEGKQGNFKNLREFVFKNIDGYFKIYSKHTPINLVRDLPQGFSALEPLVDLPIGINITRFQTLLALHRSYLTPGDSSSGWTAGAAAYYVGYLQPRTFLLKYNENGTITDAVDCALDPLSETKCTLKSFTVEKGIYQTSNFRVQPTESIVRFPNITNLCPFGEVFNATRFASVYAWNRKRISNCVADYSVLYNSASFSTFKCYGVSPTKLNDLCFTNVYADSFVIRGDEVRQIAPGQTGKIADYNYKLPDDFTGCVIAWNSNNLDSKVGGNYNYLYRLFRKSNLKPFERDISTEIYQAGSTPCNGVEGFNCYFPLQSYGFQPTNGVGYQPYRVVVLSFELLHAPATVCGPKKSTNLVKNKCVNFNFNGLTGTGVLTESNKKFLPFQQFGRDIADTTDAVRDPQTLEILDITPCSFGGVSVITPGTNTSNQVAVLYQGVNCTEVPVAIHADQLTPTWRVYSTGSNVFQTRAGCLIGAEHVNNSYECDIPIGAGICASYHTQTNSPRRARSVASQSIIAYTMSLGAENSVAYSNNSIAIPTNFTISVTTEILPVSMTKTSVDCTMYICGDSTECSNLLLQYGSFCTQLNRALTGIAVEQDKNTQEVFAQVKQIYKTPPIKDFGGFNFSQILPDPSKPSKRSFIEDLLFNKVTLADAGFIKQYGDCLGDIAARDLICAQKFNGLTVLPPLLTDEMIAQYTSALLAGTITSGWTFGAGAALQIPFAMQMAYRFNGIGVTQCVLYENQKLIANQFNSAIGKIQDSLSSTASALGKLQDVVNQNAQALNTLVKQLSSNFGAISSVLNDILSRLDKVEAEVQIDRLITGRLQSLQTYVTQQLIRAAEIRASANLAATKMSECVLGQSKRVDFCGKGYHLMSFPQSAPHGVVFLHVTYVPAQEKNFTTAPAICHDGKAHFPREGVFVSNGTHWFVTQRNFYEPQIITTDNTFVCGNCDVVIGIVNNTVYDPLQPELDSFKEELDKYFKNHTSPDVDLGDISGINASVVNIQKEIDRLNEVAKNLNESLIDLQELGKYEQYIKWPWYIWLGFIAGLIAIVMVTIMLCCMTSCCSCLKGCCSCGSCCKFDEDDSEPVLKGVKLHYT

SEQ ID NO: 13574 - protein, 1273 aa, Artificial Sequence
  SARS-CoV-2/Iceland/247/2020__EPI_ISL_417575 spike protein (1-1273)(N914C_S1123C)
MFVFLVLLPLVSSQCVNLTTRTQLPPAYTNSFTRGVYYPDKVFRSSVLHSTQDLFLPFFSNVTWFHAIHVSGTNGTKRFDNPVLPFNDGVYFASTEKSNIIRGWIFGTTLDSKTQSLLIVNNATNVVIKVCEFQFCNDPFLGVYYHKNNKSWMESEFRVYSSANNCTFEYVSQPFLMDLEGKQGNFKNLREFVFKNIDGYFKIYSKHTPINLVRDLPQGFSALEPLVDLPIGINITRFQTLLALHRSYLTPGDSSSGWTAGAAAYYVGYLQPRTFLLKYNENGTITDAVDCALDPLSETKCTLKSFTVEKGIYQTSNFRVQPTESIVRFPNITNLCPFGEVFNATRFASVYAWNRKRISNCVADYSVLYNSASFSTFKCYGVSPTKLNDLCFTNVYADSFVIRGDEVRQIAPGQTGKIADYNYKLPDDFTGCVIAWNSNNLDSKVGGNYNYLYRLFRKSNLKPFERDISTEIYQAGSTPCNGVEGFNCYFPLQSYGFQPTNGVGYQPYRVVVLSFELLHAPATVCGPKKSTNLVKNKCVNFNFNGLTGTGVLTESNKKFLPFQQFGRDIADTTDAVRDPQTLEILDITPCSFGGVSVITPGTNTSNQVAVLYQGVNCTEVPVAIHADQLTPTWRVYSTGSNVFQTRAGCLIGAEHVNNSYECDIPIGAGICASYQTQTNSPRRARSVASQSIIAYTMSLGAENSVAYSNNSIAIPTNFTISVTTEILPVSMTKTSVDCTMYICGDSTECSNLLLQYGSFCTQLNRALTGIAVEQDKNTQEVFAQVKQIYKTPPIKDFGGFNFSQILPDPSKPSKRSFIEDLLFNKVTLADAGFIKQYGDCLGDIAARDLICAQKFNGLTVLPPLLTDEMIAQYTSALLAGTITSGWTFGAGAALQIPFAMQMAYRFNGIGVTQCVLYENQKLIANQFNSAIGKIQDSLSSTASALGKLQDVVNQNAQALNTLVKQLSSNFGAISSVLNDILSRLDKVEAEVQIDRLITGRLQSLQTYVTQQLIRAAEIRASANLAATKMSECVLGQSKRVDFCGKGYHLMSFPQSAPHGVVFLHVTYVPAQEKNFTTAPAICHDGKAHFPREGVFVSNGTHWFVTQRNFYEPQIITTDNTFVCGNCDVVIGIVNNTVYDPLQPELDSFKEELDKYFKNHTSPDVDLGDISGINASVVNIQKEIDRLNEVAKNLNESLIDLQELGKYEQYIKWPWYIWLGFIAGLIAIVIVTIMLCCMTSCCSCLKGCCSCGSCCKFDEDDSEPVLKGVKLHYT

SEQ ID NO: 13575 - protein, 1273 aa, Artificial Sequence
  SARS-CoV-2/Iceland/238/2020__EPI_ISL_417566 spike protein (1-1273)(N914C_S1123C)
MFVFLVLLPLVSSQCVNLTTRTQLPPAYTNSFTRGVYYPDKVFRSSVLHSTQDLFLPFFSNVTWFHAIHVSGTNGTKRFDNPVLPFNDGVYFASTEKSNIIRGWIFGTTLDSKTQSLLIVNNATNVVIKVCEFQFCNDPFLGVYYHKNNKSWMESEFRVYSSANNCTFEYVSQPFLMDLEGKQGNFKNLREFVFKNIDGYFKIYSKHTPINLVRDLPQGFSALEPLVDLPIGINITRFQTLLALHRSYLTPGDSSSGWTAGAAAYYVGYLQPRTFLLKYNENGTITDAVDCALDPLSETKCTLKSFTVEKGIYQTSNFRVQPTESIVRFPNITNLCPFGEVFNATRFASVYAWNRKRISNCVADYSVLYNSASFSTFKCYGVSPTKLNDLCFTNVYADSFVIRGDEVRQIAPGQTGKIADYNYKLPDDFTGCVIAWNSNNLDSKVGGNYNYLYRLFRKSNLKPFERDISTEIYQAGSTPCNGVEGFNCYFPLQSYGFQPTNGVGYQPYRVVVLSFELLHAPATVCGPKKSTNLVKNKCVNFNFNGLTGTGVLTESNKKFLPFQQFGRDIADTTDAVRDPQTLEILDITPCSFGGVSVITPGTNTSNQVAVLYQGVNCTEVPVAIHADQLTPTWRVYSTGSNVFQTRAGCLIGAEHVNNSYECDIPIGAGICASYQTQTNSPRRARSVASQSIIAYTMSLGAENSVAYSNNSIAIPTNFTISVTTEILPVSMTKTSVDCTMYICGDSTECSNLLLQYGSFCTQLNRALTGIAVEQDKNTQEVFAQVKQIYKTPPIKDFGGFNFSQILPDPSKPSKRSFIEDLLFNKVTLADVGFIKQYGDCLGDIAARDLICAQKFNGLTVLPPLLTDEMIAQYTSALLAGTITSGWTFGAGAALQIPFAMQMAYRFNGIGVTQCVLYENQKLIANQFNSAIGKIQDSLSSTASALGKLQDVVNQNAQALNTLVKQLSSNFGAISSVLNDILSRLDKVEAEVQIDRLITGRLQSLQTYVTQQLIRAAEIRASANLAATKMSECVLGQSKRVDFCGKGYHLMSFPQSAPHGVVFLHVTYVPAQEKNFTTAPAICHDGKAHFPREGVFVSNGTHWFVTQRNFYEPQIITTDNTFVCGNCDVVIGIVNNTVYDPLQPELDSFKEELDKYFKNHTSPDVDLGDISGINASVVNIQKEIDRLNEVAKNLNESLIDLQELGKYEQYIKWPWYIWLGFIAGLIAIVMVTIMLCCMTSCCSCLKGCCSCGSCCKFDEDDSEPVLKGVKLHYT

SEQ ID NO: 13576 - protein, 1273 aa, Artificial Sequence
  SARS-CoV-2/Greece/16/2020__EPI_ISL_418265 spike protein (1-1273)(N914C_S1123C)
MFVFLVLLPLVSSQCVNLTTRTQLPPAYTNSFTRGVYYPDKVFRSSVLHSTQDLFLPFFSNVTWFHAIHVSGTNGTKRFDNPVLPFNDGVYFASTEKSNIIRGWIFGTTLDSKTQSLLIVNNATNVVIKVCEFQFCNDPFLGVYYHKNNKSWMESEFRVYSSANNCTFEYVSQPFLMDLEGKQGNFKNLREFVFKNVDGYFKIYSKHTPINLVRDLPQGFSALEPLVDLPIGINITRFQTLLALHRSYLTPGDSSSGWTAGAAAYYVGYLQPRTFLLKYNENGTITDAVDCALDPLSETKCTLKSFTVEKGIYQTSNFRVQPTESIVRFPNITNLCPFGEVFNATRFASVYAWNRKRISNCVADYSVLYNSASFSTFKCYGVSPTKLNDLCFTNVYADSFVIRGDEVRQIAPGQTGKIADYNYKLPDDFTGCVIAWNSNNLDSKVGGNYNYLYRLFRKSNLKPFERDISTEIYQAGSTPCNGVEGFNCYFPLQSYGFQPTNGVGYQPYRVVVLSFELLHAPATVCGPKKSTNLVKNKCVNFNFNGLTGTGVLTESNKKFLPFQQFGRDIADTTDAVRDPQTLEILDITPCSFGGVSVITPGTNTSNQVAVLYQDVNCTEVPVAIHADQLTPTWRVYSTGSNVFQTRAGCLIGAEHVNNSYECDIPIGAGICASYQTQTNSPRRARSVASQSIIAYTMSLGAENSVAYSNNSIAIPTNFTISVTTEILPVSMTKTSVDCTMYICGDSTECSNLLLQYGSFCTQLNRALTGIAVEQDKNTQEVFAQVKQIYKTPPIKDFGGFNFSQILPDPSKPSKRSFIEDLLFNKVTLADAGFIKQYGDCLGDIAARDLICAQKFNGLTVLPPLLTDEMIAQYTSALLAGTITSGWTFGAGAALQIPFAMQMAYRFNGIGVTQCVLYENQKLIANQFNSAIGKIQDSLSSTASALGKLQDVVNQNAQALNTLVKQLSSNFGAISSVLNDILSRLDKVEAEVQIDRLITGRLQSLQTYVTQQLIRAAEIRASANLAATKMSECVLGQSKRVDFCGKGYHLMSFPQSAPHGVVFLHVTYVPAQEKNFTTAPAICHDGKAHFPREGVFVSNGTHWFVTQRNFYEPQIITTDNTFVCGNCDVVIGIVNNTVYDPLQPELDSFKEELDKYFKNHTSPDVDLGDISGINASVVNIQKEIDRLNEVAKNLNESLIDLQELGKYEQYIKWPWYIWLGFIAGLIAIVMVTIMLCCMTSCCSCLKGCCSCGSCCKFDEDDSEPVLKGVKLHYT

SEQ ID NO: 13577 - protein, 1273 aa, Artificial Sequence
  SARS-CoV-2/Iceland/319/2020__EPI_ISL_417648 spike protein (1-1273)(N914C_S1123C)
MFVFLVLLPLVSSQCVNLTTRTQLPPAYTNSFTRGVYYPDKVFRSSVLHSTQDLFLPFFSNVTWFHAIHVSGTNGTKRFDNPVLPFNDGVYFASTEKSNIIRGWIFGTTLDSKTQSLLIVNNATNVVIKVCEFQFCNDPFLGVYYHKNNKSWMESEFRVYSSANNCTFEYVSQPFLIDLEGKQGNFKNLREFVFKNIDGYFKIYSKHTPINLVRDLPQGFSALEPLVDLPIGINITRFQTLLALHRSYLTPGDSSSGWTAGAAAYYVGYLQPRTFLLKYNENGTITDAVDCALDPLSETKCTLKSFTVEKGIYQTSNFRVQPTESIVRFPNITNLCPFGEVFNATRFASVYAWNRKRISNCVADYSVLYNSASFSTFKCYGVSPTKLNDLCFTNVYADSFVIRGDEVRQIAPGQTGKIADYNYKLPDDFTGCVIAWNSNNLDSKVGGNYNYLYRLFRKSNLKPFERDISTEIYQAGSTPCNGVEGFNCYFPLQSYGFQPTNGVGYQPYRVVVLSFELLHAPATVCGPKKSTNLVKNKCVNFNFNGLTGTGVLTESNKKFLPFQQFGRDIADTTDAVRDPQTLEILDITPCSFGGVSVITPGTNTSNQVAVLYQGVNCTEVPVAIHADQLTPTWRVYSTGSNVFQTRAGCLIGAEHVNNSYECDIPIGAGICASYQTQTNSPRRARSVASQSIIAYTMSLGAENSVAYSNNSIAIPTNFTISVTTEILPVSMTKTSVDCTMYICGDSTECSNLLLQYGSFCTQLNRALTGIAVEQDKNTQEVFAQVKQIYKTPPIKDFGGFNFSQILPDPSKPSKRSFIEDLLFNKVTLADAGFIKQYGDCLGDIAARDLICAQKFNGLTVLPPLLTDEMIAQYTSALLAGTITSGWTFGAGAALQIPFAMQMAYRFNGIGVTQCVLYENQKLIANQFNSAIGKIQDSLSSTASALGKLQDVVNQNAQALNTLVKQLSSNFGAISSVLNDILSRLDKVEAEVQIDRLITGRLQSLQTYVTQQLIRAAEIRASANLAATKMSECVLGQSKRVDFCGKGYHLMSFPQSAPHGVVFLHVTYVPAQEKNFTTAPAICHDGKAHFPREGVFVSNGTHWFVTQRNFYEPQIITTDNTFVCGNCDVVIGIVNNTVYDPLQPELDSFKEELDKYFKNHTSPDVDLGDISGINASVVNIQKEIDRLNEVAKNLNESLIDLQELGKYEQYIKWPWYIWLGFIAGLIAIVMVTIMLCCMTSCCSCLKGCCSCGSCCKFDEDDSEPVLKGVKLHYT

SEQ ID NO: 13578 - protein, 1273 aa, Artificial Sequence
  SARS-CoV-2/Congo/94/2020__EPI_ISL_417947 spike protein (1-1273)(N914C_S1123C)
MFVFLVLLPLVSSQCVNLTTRTQLPPAYTNSFTRGVYYPDKVFRSSVLHSTQDLFLPFFSNVTWFHAIHVSGTNGTKRFDNPVLPFNDGVYFASTEKSNIIRGWIFGTTLDSKTQSLLIVNNATNVVIKVCEFQFCNDPFLGVYYHKNNKSWMESEFRVYSSANNCTFEYVSQPFLMDLEGKQGNFKNLREFVFKNIDGYFKIYSKHTPINLVRDLPQGFSALEPLVDLPIGINITRFQTLLALHRSYLTPGDSSSGWTAGAAAYYVGYLQPRTFLLKYNENGTITDAVDCALDPLSETKCTLKSFTVEKGIYQTSNFRVQPTESIVRFPNITNLCPFGEVFNATRFASVYAWNRKRISNCVADYSVLYNSASFSTFKCYGVSPTKLNDLCFTNVYADSFVIRGDEVRQIAPGQTGKIADYNYKLPDDFTGCVIAWNSNNLDSKVGGNYNYLYRLFRKSNLKPFERDISTEIYQAGSTPCNGVEGFNCYFPLQSYGFQPTNGVGYQPYRVVVLSFELLHAPATVCGPKKSTNLVKNKCVNFNFNGLTGTGVLTESNKKFLPFQQFGRDIADTTDAVRDPQTLEILDITPCSFGGVSVITPGTNTSNQVAVLYQGVNCTEVPVAIHADQLTPTWRVYSTGSNVFQTRAGCLIGAEHVNNSYECDIPIGAGICASYQTQTNSPRRARSVASQSIIAYTMSLGAENSVAYSNNSIAIPTNFTISVTTEILPVSMTKTSVDCTMYICGDSTECSNLLLQYGSFCTQLNRALTGIAVEQDKNTQEVFAQVKQIYKTPPIKDFGGFNFSQILPDPSKPSKRSFIEDILFNKVTLADAGFIKQYGDCLGDIAARDLICAQKFNGLTVLPPLLTDEMIAQYTSALLAGTITSGWTFGAGAALQIPFAMQMAYRFNGIGVTQCVLYENQKLIANQFNSAIGKIQDSLSSTASALGKLQDVVNQNAQALNTLVKQLSSNFGAISSVLNDILSRLDKVEAEVQIDRLITGRLQSLQTYVTQQLIRAAEIRASANLAATKMSECVLGQSKRVDFCGKGYHLMSFPQSAPHGVVFLHVTYVPAQEKNFTTAPAICHDGKAHFPREGVFVSNGTHWFVTQRNFYEPQIITTDNTFVCGNCDVVIGIVNNTVYDPLQPELDSFKEELDKYFKNHTSPDVDLGDISGINASVVNIQKEIDRLNEVAKNLNESLIDLQELGKYEQYIKWPWYIWLGFIAGLIAIVMVTIMLCCMTSCCSCLKGCCSCGSCCKFDEDDSEPVLKGVKLHYT

SEQ ID NO: 13579 - protein, 1273 aa, Artificial Sequence
  SARS-CoV-2/Congo/158/2020__EPI_ISL_417950 spike protein (1-1273)(N914C_S1123C)
MFVFLVLLPLVSSQCVNLTTRTQLPPAYTNSFTRGVYYPDKVFRSSVLHSTQDLFLPFFSNVTWFHAIHVSGTNGTKRFDNPVLPFNDGVYFASTEKSNIIRGWIFGTTLDSKTQSLLIVNNATNVVIKVCEFQFCNDPFLGVYYHKNNKSWMESEFRVYSSANNCTFEYVSQPFLMDLEGKQGNFKNLREFVFKNIDGYFKIYSKHTPINLVRDLPQGFSALEPLVDLPIGINITRFQTLLALHRSYLTPGDSSSGWTAGAAAYYVGYLQPRTFLLKYNENGTITDAVDCALDPLSETKCTLKSFTVEKGIYQTSNFRVQPTESIVRFPNITNLCPFGEVFNATRFASVYAWNRKRISNCVADYSVLYNSASFSTFKCYGVSPTKLNDLCFTNVYADSFVIRGDEVRQIAPGQTGKIADYNYKLPDDFTGCVIAWNSNNLDSKVGGNYNYLYRLFRKSNLKPFERDISTEIYQAGSTPCNGVEGFNCYFPLQSYGFQPTNGVGYQPYRVVVLSFELLHAPATVCGPKKSTNLVKNKCVNFNFNGLTGTGVLTESNKKFLPFQQFGRDIADTTDAVRDPQTLEILDITPCSFGGVSVITPGTNTSNQVAVLYQDVNCTEVPVAIHADQLTPTWRVYSTGSNVFQTRAGCLIGAEHVNNSYECDIPIGAGICASYQTQTNSPRRARSVASQSIIAYTMSLGAENSVAYSNNSIAIPTNFTISVTTEILPVSMTKTSVDCTMYICGDSTECSNLLLQYGSFCTQLNRALTGIAVEQDKNTQEVFAQVKQIYKTPPIKDFGGFNFSQILPDPSKPSKRSFIEDLLFNKVTLADAGFIKQYGDCLGDIAARDLICAQKFNGLTVLPPLLTDEMIAQYTSALLAGTITSGWTFGAGAALQIPFAMQMAYRFNGIGVTQCVLYENQKLIANQFNSAIGKIQDSLSSTASALGKLQDVVNQNAQALNTLVKQLSSNFGAISSVLNDILSRLDKVEAEVQIDRLITGRLQSLQTYVTQQLIRAAEIRASANLAATKMSECVLGQSKRVDFCGKGYHLMSFPQSAPHGVVFLHVTYVPAQEKNFTTAPAICHDGKAHFPREGVFVSNGTHWFVTQRNFYEPQIITTDNTFLCGNCDVVIGIVNNTVYDPLQPELDSFKEELDKYFKNHTSPDVDLGDISGINASVVNIQKEIDRLNEVAKNLNESLIDLQELGKYEQYIKWPWYIWLGFIAGLIAIVMVTIMLCCMTSCCSCLKGCCSCGSCCKFDEDDSEPVLKGVKLHYT

SEQ ID NO: 13580 - protein, 1273 aa, Artificial Sequence
  SARS-CoV-2/USA/UT-00034/2020__EPI_ISL_417977 spike protein (1-1273)(N914C_S1123C)
MFVFLVLLPLVSSQCVNLTTRTQLPPAYTNSFTRGVYYPDKVFRSSVLHSTQDLFLPFFSNVTWFHAIHVSGTNGTKRFDNPVLPFNDGVYFASTEKSNIIRGWIFGTTLDSKTQSLLIVNNATNVVIKVCEFQFCNDPFLGVYYYKNNKSWMESEFRVYSSANNCTFEYVSQPFLMDLEGKQGNFKNLREFVFKNIDGYFKIYSKHTPINLVRDLPQGFSALEPLVDLPIGINITRFQTLLALHRSYLTPGDSSSGWTAGAAAYYVGYLQPRTFLLKYNENGTITDAVDCALDPLSETKCTLKSFTVEKGIYQTSNFRVQPTESIVRFPNITNLCPFGEVFNATRFASVYAWNRKRISNCVADYSVLYNSASFSTFKCYGVSPTKLNDLCFTNVYADSFVIRGDEVRQIAPGQTGKIADYNYKLPDDFTGCVIAWNSNNLDSKVGGNYNYLYRLFRKSNLKPFERDISTEIYQAGSTPCNGVEGFNCYFPLQSYGFQPTNGVGYQPYRVVVLSFELLHAPATVCGPKKSTNLVKNKCVNFNFNGLTGTGVLTESNKKFLPFQQFGRDIADTTDAVRDPQTLEILDITPCSFGGVSVITPGTNTSNQVAVLYQGVNCTEVPVAIHADQLTPTWRVYSTGSNVFQTRAGCLIGAEHVNNSYECDIPIGAGICASYQTQTNSPRRARSVASQSIIAYTMSLGAENSVAYSNNSIAIPTNFTISVTTEILPVSMTKTSVDCTMYICGDSTECSNLLLQYGSFCTQLNRALTGIAVEQDKNTQEVFAQVKQIYKTPPIKDFGGFNFSQILPDPSKPSKRSFIEDLLFNKVTLADAGFIKQYGDCLGDIAARDLICAQKFNGLTVLPPLLTDEMIAQYTSALLAGTITSGWTFGAGAALQIPFAMQMAYRFNGIGVTQCVLYENQKLIANQFNSAIGKIQDSLSSTASALGKLQDVVNQNAQALNTLVKQLSSNFGAISSVLNDILSRLDKVEAEVQIDRLITGRLQSLQTYVTQQLIRAAEIRASANLAATKMSECVLGQSKRVDFCGKGYHLMSFPQSAPHGVVFLHVTYVPAQEKNFTTAPAICHDGKAHFPREGVFVSNGTHWFVTQRNFYEPQIITTDNTFVCGNCDVVIGIVNNTVYDPLQPELDSFKEELDKYFKNHTSPDVDLGDISGINASVVNIQKEIDRLNEVAKNLNESLIDLQELGKYEQYIKWPWYIWLGFIAGLIAIVMVTIMLCCMTSCCSCLKGCCSCGSCCKFDEDDSEPVLKGVKLHYT

SEQ ID NO: 13581 - protein, 1273 aa, Artificial Sequence
  SARS-CoV-2/USA/UT-00033/2020__EPI_ISL_417976 spike protein (1-1273)(N914C_S1123C)
MFVFLVLLPLVSSQCVNLTTRTQLPPAYTNSFTRGVYYPDKVFRSSVLHSTQDLFLPFFSNVTWFHAIHVSGTNGTKRFDNPVLPFNDGVYFASTEKSNIIRGWIFGTTLDSKTQSLLIVNNATNVVIKVCEFQFCNDPFLGVYYHKNNKSWMESEFRVYSSANNCTFEYVSQPFLMDLEGKQGNFKNLREFVFKNIDGYFKIYSKHTPINLVRDLPQGFSALEPLVDLPIGINITRFQTLLALHRSYLTPGDSSSGLTAGAAAYYVGYLQPRTFLLKYNENGTITDAVDCALDPLSETKCTLKSFTVEKGIYQTSNFRVQPTESIVRFPNITNLCPFGEVFNATRFASVYAWNRKRISNCVADYSVLYNSASFSTFKCYGVSPTKLNDLCFTNVYADSFVIRGDEVRQIAPGQTGKIADYNYKLPDDFTGCVIAWNSNNLDSKVGGNYNYLYRLFRKSNLKPFERDISTEIYQAGSTPCNGVEGFNCYFPLQSYGFQPTNGVGYQPYRVVVLSFELLHAPATVCGPKKSTNLVKNKCVNFNFNGLTGTGVLTESNKKFLPFQQFGRDIADTTDAVRDPQTLEILDITPCSFGGVSVITPGTNTSNQVAVLYQGVNCTEVPVAIHADQLTPTWRVYSTGSNVFQTRAGCLIGAEHVNNSYECDIPIGAGICASYQTQTNSPRRARSVASQSIIAYTMSLGAENSVAYSNNSIAIPTNFTISVTTEILPVSMTKTSVDCTMYICGDSTECSNLLLQYGSFCTQLNRALTGIAVEQDKNTQEVFAQVKQIYKTPPIKDFGGFNFSQILPDPSKPSKRSFIEDLLFNKVTLADAGFIKQYGDCLGDIAARDLICAQKFNGLTVLPPLLTDEMIAQYTSALLAGTITSGWTFGAGAALQIPFAMQMAYRFNGIGVTQCVLYENQKLIANQFNSAIGKIQDSLSSTASALGKLQDVVNQNAQALNTLVKQLSSNFGAISSVLNDILSRLDKVEAEVQIDRLITGRLQSLQTYVTQQLIRAAEIRASANLAATKMSECVLGQSKRVDFCGKGYHLMSFPQSAPHGVVFLHVTYVPAQEKNFTTAPAICHDGKAHFPREGVFVSNGTHWFVTQRNFYEPQIITTDNTFVCGNCDVVIGIVNNTVYDPLQPELDSFKEELDKYFKNHTSPDVDLGDISGINASVVNIQKEIDRLNEVAKNLNESLIDLQELGKYEQYIKWPWYIWLGFIAGLIAIVMVTIMLCCMTSCCSCLKGCCSCGSCCKFDEDDSEPVLKGVKLHYT

SEQ ID NO: 13582 - protein, 1273 aa, Artificial Sequence
  SARS-CoV-2/USA/WI-13/2020__EPI_ISL_417516 spike protein (1-1273)(N914C_S1123C)
MFVFLVLLPLVSSQCVNLTTRTQLPPAYTNSFTRGVYYPDKVFRSSVLHSTQDLFLPFFSNVTWFHAIHVSGTNGTKRFDNPVLPFNDGVYFASTEKSNIIRGWIFGTTLDSKTQSLLIVNNATNVVIKVCEFQFCNDPFLGVYYHKNNKSWMESEFRVYSSANNCTFEYVSQPFLMDLEGKQGNFKNLREFVFKNIDGYFKIYSKHTPINLVRDLPQGFSALEPLVDLPIGINITRFQTLLALHRSYLTPGDSSSGWTAGAAAYYVGYLQPRTFLLKYNENGTITDAVDCALDPLSETKCTLKSFTVEKGIYQTSNFRVLPTESIVRFPNITNLCPFGEVFNATRFASVYAWNRKRISNCVADYSVLYNSASFSTFKCYGVSPTKLNDLCFTNVYADSFVIRGDEVRQIAPGQTGKIADYNYKLPDDFTGCVIAWNSNNLDSKVGGNYNYLYRLFRKSNLKPFERDISTEIYQAGSTPCNGVEGFNCYFPLQSYGFQPTNGVGYQPYRVVVLSFELLHAPATVCGPKKSTNLVKNKCVNFNFNGLTGTGVLTESNKKFLPFQQFGRDIADTTDAVRDPQTLEILDITPCSFGGVSVITPGTNTSNQVAVLYQGVNCTEVPVAIHADQLTPTWRVYSTGSNVFQTRAGCLIGAEHVNNSYECDIPIGAGICASYQTQTNSPRRARSVASQSIIAYTMSLGAENSVAYSNNSIAIPTNFTISVTTEILPVSMTKTSVDCTMYICGDSTECSNLLLQYGSFCTQLNRALTGIAVEQDKNTQEVFAQVKQIYKTPPIKDFGGFNFSQILPDPSKPSKRSFIEDLLFNKVTLADAGFIKQYGDCLGDIAARDLICAQKFNGLTVLPPLLTDEMIAQYTSALLAGTITSGWTFGAGAALQIPFAMQMAYRFNGIGVTQCVLYENQKLIANQFNSAIGKIQDSLSSTASALGKLQDVVNQNAQALNTLVKQLSSNFGAISSVLNDILSRLDKVEAEVQIDRLITGRLQSLQTYVTQQLIRAAEIRASANLAATKMSECVLGQSKRVDFCGKGYHLMSFPQSAPHGVVFLHVTYVPAQEKNFTTAPAICHDGKAHFPREGVFVSNGTHWFVTQRNFYEPQIITTDNTFVCGNCDVVIGIVNNTVYDPLQPELDSFKEELDKYFKNHTSPDVDLGDISGINASVVNIQKEIDRLNEVAKNLNESLIDLQELGKYEQYIKWPWYIWLGFIAGLIAIVMVTIMLCCMTSCCSCLKGCCSCGSCCKFDEDDSEPVLKGVKLHYT

SEQ ID NO: 13583 - protein, 1272 aa, Artificial Sequence
  SARS-CoV-2/India/1-27/2020__EPI_ISL_413522 spike protein (1-1273)(N913C_S1122C)
MFVFLVLLPLVSSQCVNLTTRTQLPPAYTNSFTRGVYYPDKVFRSSVLHSTQDLFLPFFSNVTWFHAIHVSGTNGTKRFDNPVLPFNDGVYFASTEKSNIIRGWIFGTTLDSKTQSLLIVNNATNVVIKVCEFQFCNDPFLGVYHKNNKSWMESEFRVYSSANNCTFEYVSQPFLMDLEGKQGNFKNLREFVFKNIDGYFKIYSKHTPINLVRDLPQGFSALEPLVDLPIGINITRFQTLLALHRSYLTPGDSSSGWTAGAAAYYVGYLQPRTFLLKYNENGTITDAVDCALDPLSETKCTLKSFTVEKGIYQTSNFRVQPTESIVRFPNITNLCPFGEVFNATRFASVYAWNRKRISNCVADYSVLYNSASFSTFKCYGVSPTKLNDLCFTNVYADSFVIRGDEVIQIAPGQTGKIADYNYKLPDDFTGCVIAWNSNNLDSKVGGNYNYLYRLFRKSNLKPFERDISTEIYQAGSTPCNGVEGFNCYFPLQSYGFQPTNGVGYQPYRVVVLSFELLHAPATVCGPKKSTNLVKNKCVNFNFNGLTGTGVLTESNKKFLPFQQFGRDIADTTDAVRDPQTLEILDITPCSFGGVSVITPGTNTSNQVAVLYQDVNCTEVPVAIHADQLTPTWRVYSTGSNVFQTRAGCLIGAEHVNNSYECDIPIGAGICASYQTQTNSPRRARSVASQSIIAYTMSLGAENSVAYSNNSIAIPTNFTISVTTEILPVSMTKTSVDCTMYICGDSTECSNLLLQYGSFCTQLNRALTGIAVEQDKNTQEVFAQVKQIYKTPPIKDFGGFNFSQILPDPSKPSKRSFIEDLLFNKVTLADAGFIKQYGDCLGDIAARDLICAQKFNGLTVLPPLLTDEMIAQYTSALLAGTITSGWTFGAGAALQIPFAMQMAYRFNGIGVTQCVLYENQKLIANQFNSAIGKIQDSLSSTASALGKLQDVVNQNAQALNTLVKQLSSNFGAISSVLNDILSRLDKVEAEVQIDRLITGRLQSLQTYVTQQLIRAAEIRASANLAATKMSECVLGQSKRVDFCGKGYHLMSFPQSAPHGVVFLHVTYVPAQEKNFTTAPAICHDGKAHFPREGVFVSNGTHWFVTQRNFYEPQIITTDNTFVCGNCDVVIGIVNNTVYDPLQPELDSFKEELDKYFKNHTSPDVDLGDISGINASVVNIQKEIDRLNEVAKNLNESLIDLQELGKYEQYIKWPWYIWLGFIAGLIAIVMVTIMLCCMTSCCSCLKGCCSCGSCCKFDEDDSEPVLKGVKLHYT

SEQ ID NO: 13584 - protein, 1267 aa, Artificial Sequence
  SARS-CoV-2/pangolin/Guangxi/P4L/2017__EPI_ISL_410538 spike protein (1-1273)(N908C_S1117C)
MFVFLFVLPLVSSQCVNLTTRTGIPPGYTNSSTRGVYYPDKVFRSSILHLTQDLFLPFFSNVTWFNTINYQGGFKKFDNPVLPFNDGVYFASTEKSNIIRGWIFGTTLDARTQSLLIVNNATNVVIKVCEFQFCTDPFLGVYYHNNNKTWVENEFRVYSSANNCTFEYISQPFLMDLEGKQGNFKNLREFVFKNVDGYFKIYSKHTPIDLVRDLPRGFAALEPLVDLPIGINITRFQTLLALHRSYLTPGNLESGWTTGAAAYYVGYLQQRTFLLSYNQNGTITDAVDCSLDPLSETKCTLKSLTVEKGIYQTSNFRVQPTISIVRFPNITNLCPFGEVFNASKFASVYAWNRKRISNCVADYSVLYNSTSFSTFKCYGVSPTKLNDLCFTNVYADSFVVKGDEVRQIAPGQTGVIADYNYKLPDDFTGCVIAWNSVKQDALTGGNYGYLYRLFRKSKLKPFERDISTEIYQAGSTPCNGQVGLNCYYPLERYGFHPTTGVNYQPFRVVVLSFELLNGPATVCGPKLSTTLVKDKCVNFNFNGLTGTGVLTTSKKQFLPFQQFGRDISDTTDAVRDPQTLEILDITPCSFGGVSVITPGTNTSNQVAVLYQDVNCTEVPMAIHAEQLTPAWRVYSAGANVFQTRAGCLVGAEHVNNSYECDIPVGAGICASYHSMSSLRSVNQRSIIAYTMSLGAENSVAYSNNSIAIPTNFTISVTTEILPVSMTKTSVDCTMYICGDSIECSNLLLQYGSFCTQLNRALTGIAVEQDKNTQEVFAQVKQIYKTPPIKDFGGFNFSQILPDPSKPSKRSFIEDLLFNKVTLADAGFIKQYGDCLGDIAARDLICAQKFNGLTVLPPLLTDEMIAQYTSALLAGTITSGWTFGAGAALQIPFAMQMAYRFNGIGVTQCVLYENQKLIANQFNSAIGKIQDSLSSTASALGKLQDVVNQNAQALNTLVKQLSSNFGAISSVLNDILSRLDKVEAEVQIDRLITGRLQSLQTYVTQQLIRAAEIRASANLAATKMSECVLGQSKRVDFCGKGYHLMSFPQSAPHGVVFLHVTYVPAQEKNFTTAPAICHEGKAHFPREGVFVSNGTHWFITQRNFYEPQIITTDNTFVCGSCDVVIGIVNNTVYDPLQPELDSFKEELDKYFKNHTSPDVDLGDISGINASVVNIQKEIDRLNEVAKNLNESPIDLQELGKYEQYIKWPWYIWLGFIAGLIAIIMVTIMLCCMTSCCSCLKGCCSCGSCCKFDEDDSEPVLKGVKLHYT

SEQ ID NO: 13585 - protein, 1267 aa, Artificial Sequence
  SARS-CoV-2/pangolin/Guangxi/P5L/2017__EPI_ISL_410540 spike protein (1-1273)(N908C_S1117C)
MFVFLFVLPLVSSQCVNLTTRTGIPPGYTNSSTRGVYYPDKVFRSSILHLTQDLFLPFFSNVTWFNTINYQGGFKKFDNPVLPFNDGVYFASTEKSNIIRGWIFGTTLDARTQSLLIVNNATNVVIKVCEFQFCTDPFLGVYYHNNNKTWVENEFRVYSSANNCTFEYISQPFLMDLEGKQGNFKNLREFVFKNVDGYFKIYSKHTPIDLVRDLPRGFAALEPLVDLPIGINITRFQTLLALHRSYLTPGKLESGWTTGAAAYYVGYLQQRTFLLSYNQNGTITDAVDCSLDPLSETKCTLKSLTVEKGIYQTSNFRVQPTISIVRFPNITNLCPFGEVFNASKFASVYAWNRKRISNCVADYSVLYNSTSFSTFKCYGVSPTKLNDLCFTNVYADSFVVKGDEVRQIAPGQTGVIADYNYKLPDDFTGCVIAWNSVKQDALTGGNYGYLYRLFRKSKLKPFERDISTEIYQAGSTPCNGQVGLNCYYPLERYGFHPTTGVNYQPFRVVVLSFELLNGPATVCGPKLSTTLVKDKCVNFNFNGLTGTGVLTTSKKQFLPFQQFGRDISDTTDAVRDPQTLEILDITPCSFGGVSVITPGTNTSNQVAVLYQDVNCTEVPMAIHAEQLTPAWRVYSAGANVFQTRAGCLVGAEHVNNSYECDIPVGAGICASYHSMSSFRSVNQRSIIAYTMSLGAENSVAYSNNSIAIPTNFTISVTTEILPVSMTKTSVDCTMYICGDSIECSNLLLQYGSFCTQLNRALTGIAVEQDKNTQEVFAQVKQIYKTPPIKDFGGFNFSQILPDPSKPSKRSFIEDLLFNKVTLADAGFIKQYGDCLGDIAARDLICAQKFNGLTVLPPLLTDEMIAQYTSALLAGTITSGWTFGAGAALQIPFAMQMAYRFNGIGVTQCVLYENQKLIANQFNSAIGKIQDSLSSTASALGKLQDVVNQNAQALNTLVKQLSSNFGAISSVLNDILSRLDKVEAEVQIDRLITGRLQSLQTYVTQQLIRAAEIRASANLAATKMSECVLGQSKRVDFCGKGYHLMSFPQSAPHGVVFLHVTYVPAQEKNFTTAPAICHEGKAHFPREGVFVSNGTHWFITQRNFYEPQIITTDNTFVCGSCDVVIGIVNNTVYDPLQPELDSFKEELDKYFKNHTSPDVDLGDISGINASVVNIQKEIDRLNEVAKNLNESLIDLQELGKYEQYIKWPWYIWLGFIAGLIAIIMVTIMLCCMTSCCSCLKGCCSCGSCCKFDEDDSEPVLKGVKLHYT

SEQ ID NO: 13586 - protein, 1267 aa, Artificial Sequence
  SARS-CoV-2/pangolin/Guangxi/P5E/2017__EPI_ISL_410541 spike protein (1-1273)(N908C_S1117C)
MFVFLFVLPLVSSQCVNLTTRTGIPPGYTNSSTRGVYYPDKVFRSSILHLTQDLFLPFFSNVTWFNTITYQGGSKKFDNPVLPFNDGVYFASTEKSNIIRGWIFGTTLDARTQSLLIVNNATNVVIKVCEFQFCTDPFLGVYYHNNNKTWVENEFRVYSSANNCTFEYISQPFLMDLEGKQGNFKNLREFVFKNVDGYFKIYSKHTPIDLVRDLPRGFAALEPLVDLPIGINITRFQTLLALHRSYLTPGKLESGWTTGAAAYYVGYLQQRTFLLSYNQNGTITDAVDCSLDPLSETKCTLKSLTVEKGIYQTSNFRVQPTISIVRFPNITNLCPFGEVFNASKFASVYAWNRKRISNCVADYSVLYNSTSFSTFKCYGVSPTKLNDLCFTNVYADSFVVKGDEVRQIAPGQTGVIADYNYKLPDDFTGCVIAWNSVKQDALTGDNYGYLYRLFRKSKLKPFERDISTEIYQAGSTPCNGQVGLNCYYPLERYGFHPTTGVNYQPFRVVVLSFELLNGPATVCGPKLSTTLVKDKCVNFNFNGLTGTGVLTTSKKQFLPFQQFGRDISDTTDAVRDPQTLEILDITPCSFGGVSVITPGTNTSNQVAVLYQDVNCTEVPMAIHAEQLTPAWRVYSAGANVFQTRAGCLVGAEHVNNSYECDIPVGAGICASYHSMSSFRSVNQRSIIAYTMSLGAENSVAYSNNSIAIPTNFTISVTTEILPVSMTKTSVDCTMYICGDSIECSNLLLQYGSFCTQLNRALTGIAVEQDKNTQEVFAQVKQIYKTPPIKDFGGFNFSQILPDPSKPSKRSFIEDLLFNKVTLADAGFIKQYGDCLGDIAARDLICAQKFNGLTVLPPLLTDEMIAQYTSALLAGTITSGWTFGAGAALQIPFAMQMAYRFNGIGVTQCVLYENQKLIANQFNSAIGKIQDSLSSTASALGKLQDVVNQNAQALNTLVKQLSSNFGAISSVLNDILSRLDKVEAEVQIDRLITGRLQSLQTYVTQQLIRAAEIRASANLAATKMSECVLGQSKRVDFCGKGYHLMSFPQSAPHGVVFLHVTYVPAQEKNFTTAPAICHEGKAHFPREGVFVSNGTHWFITQRNFYEPQIITTDNTFVCGSCDVVIGIVNNTVYDPLQPELDSFKEELDKYFKNHTSPDVDLGDISGINASVVNIQKEIDRLNEVAKNLNESLIDLQELGKYEQYIKWPWYIWLGFIAGLIAIIMVTIMLCCMTSCCSCLKGCCSCGSCCKFDEDDSEPVLKGVKLHYT

SEQ ID NO: 13587 - protein, 1265 aa, Artificial Sequence
  SARS-CoV-2/pangolin/Guangxi/P1E/2017__EPI_ISL_410539 spike protein (1-1273)(N906C_S1115C)
MFVFLFVLPLVSSQCVNLTTRTGIQPGYTNSSTRGVYYPDKVFRSSILHLTQDLFLPFFSNVTWFNTINYQGGFKKFDNPVLPFNDGVYFASTEKSNIIRGWIFGTTLDARTQSLLIVNNATNVVIKVCEFQFCTDPFLGVYYHNNNKTWVENEFRVYSSANNCTFEYISQPFLMDLEGKQGNFKNLREFVFKNVDGYFKIYSKHTPIDLVRDLPRGFAALEPLVDLPIGINITRFQTLLALHRSYLTPGKLESGWTTGAAAYYVGYLQQRTFLLSYNQNGTITDAVDCSLDPLSETKCTLKSLTVEKGIYQTSNFRVQPTISIVRFPNITNLCPFGEVFNASKFASVYAWNRKRISNCVADYSVLYNSTSFSTFKCYGVSPTKLNDLCFTNVYADSFVVKGDEVRQIAPGQTGVIADYNYKLPDDFTGCVIAWNSVKQDALTGGNYLYRLFRKSKLKPFERDISTEIYQAGSTPCNGQVGLNCYYPLERYGFHPTTGVNYQPFRVVVLSFELLNGPATVCGPKLSTTLVKDKCVNFNFNGLTGTGVLTTSKKQFLPFQQFGRDISDTTDAVRDPQTLEILDITPCSFGGVSVITPGTNTSNQVAVLYQDVNCTEVPMAIHAEQLTPAWRVYSAGANVFQTRAGCLVGAEHVNNSYECDIPVGAGICASYHSMSSLRSVNQRSIIAYTMSLGAENSVAYSNNSIAIPTNFTISVTTEILPVSMTKTSVDCTMYICGDSIECSNLLLQYGSFCTQLNRALTGIAVEQDKNTQEVFAQVKQIYKTPPIKDFGGFNFSQILPDPSKPSKRSFIEDLLFNKVTLADAGFIKQYGDCLGDIAARDLICAQKFNGLTVLPPLLTDEMIAQYTSALLAGTITSGWTFGAGAALQIPFAMQMAYRFNGIGVTQCVLYENQKLIANQFNSAIGKIQDSLSSTASALGKLQDVVNQNAQALNTLVKQLSSNFGAISSVLNDILSRLDKVEAEVQIDRLITGRLQSLQTYVTQQLIRAAEIRASANLAATKMSECVLGQSKRVDFCGKGYHLMSFPQSAPHGVVFLHVTYVPAQEKNFTTAPAICHEGKAHFPREGVFVSNGTHWFITQRNFYEPQIITTDNTFVCGSCDVVIGIVNNTVYDPLQPELDSFKEELDKYFKNHTSPDVDLGDISGINASVVNIQKEIDRLNEVAKNLNESLIDLQELGKYEQYIKWPWYIWLGFIAGLIAIIMVTIMLCCMTSCCSCLKGCCSCGSCCKFDEDDSEPVLKGVKLHYT

SEQ ID NO: 13588 - protein, 1371 aa, Artificial Sequence
  SARS-CoV-2/Wuhan/WIV05/2019__EPI_ISL_402128 spike protein (1-1211)(N914C_S1123C) LumSynth construct
MFVFLVLLPLVSSQCVNLTTRTQLPPAYTNSFTRGVYYPDKVFRSSVLHSTQDLFLPFFSNVTWFHAIHVSGTNGTKRFDNPVLPFNDGVYFASTEKSNIIRGWIFGTTLDSKTQSLLIVNNATNVVIKVCEFQFCNDPFLGVYYHKNNKSWMESEFRVYSSANNCTFEYVSQPFLMDLEGKQGNFKNLREFVFKNIDGYFKIYSKHTPINLVRDLPQGFSALEPLVDLPIGINITRFQTLLALHRSYLTPGDSSSGWTAGAAAYYVGYLQPRTFLLKYNENGTITDAVDCALDPLSETKCTLKSFTVEKGIYQTSNFRVQPTESIVRFPNITNLCPFGEVFNATRFASVYAWNRKRISNCVADYSVLYNSASFSTFKCYGVSPTKLNDLCFTNVYADSFVIRGDEVRQIAPGQTGKIADYNYKLPDDFTGCVIAWNSNNLDSKVGGNYNYLYRLFRKSNLKPFERDISTEIYQAGSTPCNGVEGFNCYFPLQSYGFQPTNGVGYQPYRVVVLSFELLHAPATVCGPKKSTNLVKNKCVNFNFNGLTGTGVLTESNKKFLPFQQFGRDIADTTDAVRDPQTLEILDITPCSFGGVSVITPGTNTSNQVAVLYQDVNCTEVPVAIHADQLTPTWRVYSTGSNVFQTRAGCLIGAEHVNNSYECDIPIGAGICASYQTQTNSPRRARSVASQSIIAYTMSLGAENSVAYSNNSIAIPTNFTISVTTEILPVSMTKTSVDCTMYICGDSTECSNLLLQYGSFCTQLNRALTGIAVEQDKNTQEVFAQVKQIYKTPPIKDFGGFNFSQILPDPSKPSKRSFIEDLLFNKVTLADAGFIKQYGDCLGDIAARDLICAQKFNGLTVLPPLLTDEMIAQYTSALLAGTITSGWTFGAGAALQIPFAMQMAYRFNGIGVTQCVLYENQKLIANQFNSAIGKIQDSLSSTASALGKLQDVVNQNAQALNTLVKQLSSNFGAISSVLNDILSRLDKVEAEVQIDRLITGRLQSLQTYVTQQLIRAAEIRASANLAATKMSECVLGQSKRVDFCGKGYHLMSFPQSAPHGVVFLHVTYVPAQEKNFTTAPAICHDGKAHFPREGVFVSNGTHWFVTQRNFYEPQIITTDNTFVCGNCDVVIGIVNNTVYDPLQPELDSFKEELDKYFKNHTSPDVDLGDISGINASVVNIQKEIDRLNEVAKNLNESLIDLQELGKYEQYIKGGGSGGGQIYEGKLTAEGLRFGIVASRFNHALVDRLVEGAIDAIVRHGGREEDITLVRVPGSWEIPVAAGELARKEDIDAVIAIGVLIRGATPHFDYIASEVSKGLADLSLELRKPITFGVITADTLEQAIERAGTKHGNKGWEAALSAIEMANLFKSLR

SEQ ID NO: 13589 - protein, 1367 aa, Artificial Sequence
  SARS-CoV-2/bat/Yunnan/RaTG13/2013__EPI_ISL_402131 spike protein (1-1207)(N910C_S1119C) LumSynth construct
MFVFLVLLPLVSSQCVNLTTRTQLPPAYTNSSTRGVYYPDKVFRSSVLHLTQDLFLPFFSNVTWFHAIHVSGTNGIKRFDNPVLPFNDGVYFASTEKSNIIRGWIFGTTLDSKTQSLLIVNNATNVVIKVCEFQFCNDPFLGVYYHKNNKSWMESEFRVYSSANNCTFEYVSQPFLMDLEGKQGNFKNLREFVFKNIDGYFKIYSKHTPINLVRDLPPGFSALEPLVDLPIGINITRFQTLLALHRSYLTPGDSSSGWTAGAAAYYVGYLQPRTFLLKYNENGTITDAVDCALDPLSETKCTLKSFTVEKGIYQTSNFRVQPTDSIVRFPNITNLCPFGEVFNATTFASVYAWNRKRISNCVADYSVLYNSTSFSTFKCYGVSPTKLNDLCFTNVYADSFVITGDEVRQIAPGQTGKIADYNYKLPDDFTGCVIAWNSKHIDAKEGGNFNYLYRLFRKANLKPFERDISTEIYQAGSKPCNGQTGLNCYYPLYRYGFYPTDGVGHQPYRVVVLSFELLNAPATVCGPKKSTNLVKNKCVNFNFNGLTGTGVLTESNKKFLPFQQFGRDIADTTDAVRDPQTLEILDITPCSFGGVSVITPGTNASNQVAVLYQDVNCTEVPVAIHADQLTPTWRVYSTGSNVFQTRAGCLIGAEHVNNSYECDIPIGAGICASYQTQTNSRSVASQSIIAYTMSLGAENSVAYSNNSIAIPTNFTISVTTEILPVSMTKTSVDCTMYICGDSTECSNLLLQYGSFCTQLNRALTGIAVEQDKNTQEVFAQVKQIYKTPPIKDFGGFNFSQILPDPSKPSKRSFIEDLLFNKVTLADAGFIKQYGDCLGDIAARDLICAQKFNGLTVLPPLLTDEMIAQYTSALLAGTITSGWTFGAGAALQIPFAMQMAYRFNGIGVTQCVLYENQKLIANQFNSAIGKIQDSLSSTASALGKLQDVVNQNAQALNTLVKQLSSNFGAISSVLNDILSRLDKVEAEVQIDRLITGRLQSLQTYVTQQLIRAAEIRASANLAATKMSECVLGQSKRVDFCGKGYHLMSFPQSAPHGVVFLHVTYVPAQEKNFTTAPAICHDGKAHFPREGVFVSNGTHWFVTQRNFYEPQIITTDNTFVCGSCDVVIGIVNNTVYDPLQPELDSFKEELDKYFKNHTSPDVDLGDISGINASVVNIQKEIDRLNEVAKNLNESLIDLQELGKYEQYIKGGGSGGGQIYEGKLTAEGLRFGIVASRFNHALVDRLVEGAIDAIVRHGGREEDITLVRVPGSWEIPVAAGELARKEDIDAVIAIGVLIRGATPHFDYIASEVSKGLADLSLELRKPITFGVITADTLEQAIERAGTKHGNKGWEAALSAIEMANLFKSLR

SEQ ID NO: 13590 - protein, 1371 aa, Artificial Sequence
  SARS-CoV-2/Wuhan/HBCDC-HB-01/2019__EPI_ISL_402132 spike protein (1-1211)(N914C_S1123C) LumSynth construct
MFVFLVLLPLVSSQCVNLTTRTQLPPAYTNSITRGVYYPDKVFRSSVLHSTQDLFLPFFSNVTWFHAIHVSGTNGTKRFDNPVLPFNDGVYFASTEKSNIIRGWIFGTTLDSKTQSLLIVNNATNVVIKVCEFQFCNDPFLGVYYHKNNKSWMESEFRVYSSANNCTFEYVSQPFLMDLEGKQGNFKNLREFVFKNIDGYFKIYSKHTPINLVRDLPQGFSALEPLVDLPIGINITRFQTLLALHRSYLTPGDSSSGWTAGAAAYYVGYLQPRTFLLKYNENGTITDAVDCALDPLSETKCTLKSFTVEKGIYQTSNFRVQPTESIVRFPNITNLCPFGEVFNATRFASVYAWNRKRISNCVADYSVLYNSASFSTFKCYGVSPTKLNDLCFTNVYADSFVIRGDEVRQIAPGQTGKIADYNYKLPDDFTGCVIAWNSNNLDSKVGGNYNYLYRLFRKSNLKPFERDISTEIYQAGSTPCNGVEGFNCYFPLQSYGFQPTNGVGYQPYRVVVLSFELLHAPATVCGPKKSTNLVKNKCVNFNFNGLTGTGVLTESNKKFLPFQQFGRDIADTTDAVRDPQTLEILDITPCSFGGVSVITPGTNTSNQVAVLYQDVNCTEVPVAIHADQLTPTWRVYSTGSNVFQTRAGCLIGAEHVNNSYECDIPIGAGICASYQTQTNSPRRARSVASQSIIAYTMSLGAENSVAYSNNSIAIPTNFTISVTTEILPVSMTKTSVDCTMYICGDSTECSNLLLQYGSFCTQLNRALTGIAVEQDKNTQEVFAQVKQIYKTPPIKDFGGFNFSQILPDPSKPSKRSFIEDLLFNKVTLADAGFIKQYGDCLGDIAARDLICAQKFNGLTVLPPLLTDEMIAQYTSALLAGTITSGWTFGAGAALQIPFAMQMAYRFNGIGVTQCVLYENQKLIANQFNSAIGKIQDSLSSTASALGKLQDVVNQNAQALNTLVKQLSSNFGAISSVLNDILSRLDKVEAEVQIDRLITGRLQSLQTYVTQQLIRAAEIRASANLAATKMSECVLGQSKRVDFCGKGYHLMSFPQSAPHGVVFLHVTYVPAQEKNFTTAPAICHDGKAHFPREGVFVSNGTHWFVTQRNFYEPQIITTDNTFVCGNCDVVIGIVNNTVYDPLQPELDSFKEELDKYFKNHTSPDVDLGDISGINASVVNIQKEIDRLNEVAKNLNESLIDLQELGKYEQYIKGGGSGGGQIYEGKLTAEGLRFGIVASRFNHALVDRLVEGAIDAIVRHGGREEDITLVRVPGSWEIPVAAGELARKEDIDAVIAIGVLIRGATPHFDYIASEVSKGLADLSLELRKPITFGVITADTLEQAIERAGTKHGNKGWEAALSAIEMANLFKSLR

SEQ ID NO: 13591 - protein, 1371 aa, Artificial Sequence
  SARS-CoV-2/Guangdong/20SF028/2020__EPI_ISL_403936 spike protein (1-1211)(N914C_S1123C) LumSynth construct
MFVFLVLLPLVSSQCVNLTTRTQLPPAYTNSFTRGVYYPDKVFRSSVLYSTQDLFLPFFSNVTWFHAIHVSGTNGTKRFDNPVLPFNDGVYFASTEKSNIIRGWIFGTTLDSKTQSLLIVNNATNVVIKVCEFQFCNDPFLGVYYHKNNKSWMESEFRVYSSANNCTFEYVSQPFLMDLEGKQGNFKNLREFVFKNIDGYFKIYSKHTPINLVRDLPQGFSALEPLVDLPIGINITRFQTLLALHRSYLTPGDSSSGWTAGAAAYYVGYLQPRTFLLKYNENGTITDAVDCALDPLSETKCTLKSFTVEKGIYQTSNFRVQPTESIVRFPNITNLCPFGEVFNATRFASVYAWNRKRISNCVADYSVLYNSASFSTFKCYGVSPTKLNDLCFTNVYADSFVIRGDEVRQIAPGQTGKIADYNYKLPDDFTGCVIAWNSNNLDSKVGGNYNYLYRLFRKSNLKPFERDISTEIYQAGSTPCNGVEGFNCYFPLQSYGFQPTNGVGYQPYRVVVLSFELLHAPATVCGPKKSTNLVKNKCVNFNFNGLTGTGVLTESNKKFLPFQQFGRDIADTTDAVRDPQTLEILDITPCSFGGVSVITPGTNTSNQVAVLYQDVNCTEVPVAIHADQLTPTWRVYSTGSNVFQTRAGCLIGAEHVNNSYECDIPIGAGICASYQTQTNSPRRARSVASQSIIAYTMSLGAENSVAYSNNSIAIPTNFTISVTTEILPVSMTKTSVDCTMYICGDSTECSNLLLQYGSFCTQLNRALTGIAVEQDKNTQEVFAQVKQIYKTPPIKDFGGFNFSQILPDPSKPSKRSFIEDLLFNKVTLADAGFIKQYGDCLGDIAARDLICAQKFNGLTVLPPLLTDEMIAQYTSALLAGTITSGWTFGAGAALQIPFAMQMAYRFNGIGVTQCVLYENQKLIANQFNSAIGKIQDSLSSTASALGKLQDVVNQNAQALNTLVKQLSSNFGAISSVLNDILSRLDKVEAEVQIDRLITGRLQSLQTYVTQQLIRAAEIRASANLAATKMSECVLGQSKRVDFCGKGYHLMSFPQSAPHGVVFLHVTYVPAQEKNFTTAPAICHDGKAHFPREGVFVSNGTHWFVTQRNFYEPQIITTDNTFVCGNCDVVIGIVNNTVYDPLQPELDSFKEELDKYFKNHTSPDVDLGDISGINASVVNIQKEIDRLNEVAKNLNESLIDLQELGKYEQYIKGGGSGGGQIYEGKLTAEGLRFGIVASRFNHALVDRLVEGAIDAIVRHGGREEDITLVRVPGSWEIPVAAGELARKEDIDAVIAIGVLIRGATPHFDYIASEVSKGLADLSLELRKPITFGVITADTLEQAIERAGTKHGNKGWEAALSAIEMANLFKSLR

SEQ ID NO: 13592 - protein, 1371 aa, Artificial Sequence
  SARS-CoV-2/Shenzhen/SZTH-001/2020__EPI_ISL_406592 spike protein (1-1211)(N914C_S1123C) LumSynth construct
MFVFLVLLPLVSSQCVNLTTRTQLPPAYTNSFTRGVYYPDKVFRSSVLHSTQDLFLPFFSNVTWFHAIHVSGTNGTKRFDNPVLPFNDGVYFASTEKSNIIRGWIFGTTLDSKTQSLLIVNNATNVVIKVCEFQFCNDPFLGVYYHKNNKSWMESEFRVYSSANNCTFEYVSQPFLMDLEGKQGNFKNLREFVFKNIDGYFKIYSKHTPINLVRDLPQGFSALEPLVDLPIGINITRFQTLLALHRSYLTPGDSSSGWTAGAAAYYVGYLQPRTFLLKYNENGTITDAVDCALDPLSETKCTLKSFTVEKGIYQTSNFRVQPTESIVRFPNITNLCPFGEVFNATRFASVYAWNRKRISNCVADYSVLYNSASFSTFKCYGVSPTKLNDLCFTNVYADSFVIRGDEVRQIAPGQTGKIADYNYKLPDDFTGCVIAWNSNNLDSKVGGNYNYLYRLFRKSNLKPFERDISTEIYQAGSTPCNGVEGFNCYFPLQSYGFQPTNGVGYQPYRVVVLSFELLHAPATVCGPKKSTNLVKNKCVNFNFNGLTGTGVLTESNKKFLPFQQFGRDIADTTDAVRDPQTLEILDITPCSFGGVSVITPGTNTSNQVAVLYQDVNCTEVPVAIHADQLTPTWRVYSTGSNVFQTRAGCLIGAEHVNNSYECDIPIGAGICASYQTQTNSPRRARSVASQSIIAYTMSLGAENSVAYSNNSIAIPTNFTISVTTEILPVSMTKTSVDCTMYICGDSTECSNLLLQYGSFCTQLNRALTGIAVEQDKNTQEVFAQVKQIYKTPPIKDFGGFNFSQILPDPSKPSKRSFIEDLLFNKVTLADAGFIKQYGDCLGDIAARDLICAQKFNGLTVLPPLLTDEMIAQYTSALLAGTITSGWTFGAGAALQIPFAMQMAYRFNGIGVTQCVLYENQKLIANQFNSAIGKIQDSLSSTASALGKLQDVVNQNAQALNTLVKQLSSNFGAISSVLNDILSRLDKVEAEVQIDRLITGRLQSLQTYVTQQLIRAAEIRASANLAATKMSECVLGQSKRVDFCGKGYHLMSFPQSAPHGVVFLHVTYVPAQEKNFTTAPAICHDGKAHFPREGVFVSNGTHWFVTQRNFYEPQIITTDNTFVCGNCDVLIGIVNNTVYDPLQPELDSFKEELDKYFKNHTSPDVDLGDISGINASVVNIQKEIDRLNEVAKNLNESLIDLQELGKYEQYIKGGGSGGGQIYEGKLTAEGLRFGIVASRFNHALVDRLVEGAIDAIVRHGGREEDITLVRVPGSWEIPVAAGELARKEDIDAVIAIGVLIRGATPHFDYIASEVSKGLADLSLELRKPITFGVITADTLEQAIERAGTKHGNKGWEAALSAIEMANLFKSLR

SEQ ID NO: 13593 - protein, 1371 aa, Artificial Sequence
  SARS-CoV-2/Shenzhen/SZTH-004/2020__EPI_ISL_406595 spike protein (1-1211)(N914C_S1123C) LumSynth construct
MFVFLVLLPLVSSQCVNLTTRTQLPPAYTNSFTRGVYYPDKVFRSSVLHSTQDLFLPFFSNVTWFHAIHVSGTNGTKRFDNPVLPFNDGVYFASTEKSNIIRGWIFGTTLDSKTQSLLIVNNATNVVIKVCEFQFCNDPFLGVYYHKNNKSWMESEFRVYSSANNCTFEYVSQPFLMDLEGKQGNFKNLREFVFKNIDGYFKIYSKHTPINLVRDLPQGFSALEPLVDLPIGINITRFQTLLALHRSYLTPGDSSSGWTAGAAAYYVGYLQPRTFLLKYNENGTITDAVDCALDPLSETKCTLKSFTVEKGIYQTSNFRVQPTESIVRFPNITNLCPFGEVFNATRFASVYAWDRKRISNCVAYYSVLYNSASFSTFKCYGVSPTKLNDLCFTNVYADSFVIRGDEVRQIAPGQTGKIADYNYKLPDDFTGCVIAWNSNNLDSKVGGNYNYLYRLFRKSNLKPFERDISTEIYQAGSTPCNGVEGFNCYFPLQSYGFQPTNGVGYQPYRVVVLSFELLHAPATVCGPKKSTNLVKNKCVNFNFNGLTGTGVLTESNKKFLPFQQFGRDIADTTDAVRDPQTLEILDITPCSFGGVSVITPGTNTSNQVAVLYQDVNCTEVPVAIHADQLTPTWRVYSTGSNVFQTRAGCLIGAEHVNNSYECDIPIGAGICASYQTQTNSPRRARSVASQSIIAYTMSLGAENSVAYSNNSIAIPTNFTISVTTEILPVSMTKTSVDCTMYICGDSTECSNLLLQYGSFCTQLNRALTGIAVEQDKNTQEVFAQVKQIYKTPPIKDFGGFNFSQILPDPSKPSKRSFIEDLLFNKVTLADAGFIKQYGDCLGDIAARDLICAQKFNGLTVLPPLLTDEMIAQYTSALLAGTITSGWTFGAGAALQIPFAMQMAYRFNGIGVTQCVLYENQKLIANQFNSAIGKIQDSLSSTASALGKLQDVVNQNAQALNTLVKQLSSNFGAISSVLNDILSRLDKVEAEVQIDRLITGRLQSLQTYVTQQLIRAAEIRASANLAATKMSECVLGQSKRVDFCGKGYHLMSFPQSAPHGVVFLHVTYVPAQEKNFTTAPAICHDGKAHFPREGVFVSNGTHWFVTQRNFYEPQIITTDNTFVCGNCDVVIGIVNNTVYDPLQPELDSFKEELDKYFKNHTSPDVDLGDISGINASVVNIQKEIDRLNEVAKNLNESLIDLQELGKYEQYIKGGGSGGGQIYEGKLTAEGLRFGIVASRFNHALVDRLVEGAIDAIVRHGGREEDITLVRVPGSWEIPVAAGELARKEDIDAVIAIGVLIRGATPHFDYIASEVSKGLADLSLELRKPITFGVITADTLEQAIERAGTKHGNKGWEAALSAIEMANLFKSLR

SEQ ID NO: 13594 - protein, 1371 aa, Artificial Sequence
  SARS-CoV-2/France/IDF0372/2020__EPI_ISL_406596 spike protein (1-1211)(N914C_S1123C) LumSynth construct
MFVFLVLLPLVSSQCVNLTTRTQLPPAYTNSFTRGVYYPDKVFRSSVLHSTQDLFLPFFSNVTWFHAIHVSGTNGTKRFDNPVLPFNDGVYFASTEKSNIIRGWIFGTTLDSKTQSLLIVNNATNVVIKVCEFQFCNDPFLGVYYHKNNKSWMESEFRVYSSANNCTFEYVSQPFLMDLEGKQGNFKNLREFVFKNIDGYFKIYSKHTPINLVRDLPQGFSALEPLVDLPIGINITRFQTLLALHRSYLTPGDSSSGWTAGAAAYYVGYLQPRTFLLKYNENGTITDAVDCALDPLSETKCTLKSFTVEKGIYQTSNFRVQPTESIVRFPNITNLCPFGEVFNATRFASVYAWNRKRISNCVADYSFLYNSASFSTFKCYGVSPTKLNDLCFTNVYADSFVIRGDEVRQIAPGQTGKIADYNYKLPDDFTGCVIAWNSNNLDSKVGGNYNYLYRLFRKSNLKPFERDISTEIYQAGSTPCNGVEGFNCYFPLQSYGFQPTNGVGYQPYRVVVLSFELLHAPATVCGPKKSTNLVKNKCVNFNFNGLTGTGVLTESNKKFLPFQQFGRDIADTTDAVRDPQTLEILDITPCSFGGVSVITPGTNTSNQVAVLYQDVNCTEVPVAIHADQLTPTWRVYSTGSNVFQTRAGCLIGAEHVNNSYECDIPIGAGICASYQTQTNSPRRARSVASQSIIAYTMSLGAENSVAYSNNSIAIPTNFTISVTTEILPVSMTKTSVDCTMYICGDSTECSNLLLQYGSFCTQLNRALTGIAVEQDKNTQEVFAQVKQIYKTPPIKDFGGFNFSQILPDPSKPSKRSFIEDLLFNKVTLADAGFIKQYGDCLGDIAARDLICAQKFNGLTVLPPLLTDEMIAQYTSALLAGTITSGWTFGAGAALQIPFAMQMAYRFNGIGVTQCVLYENQKLIANQFNSAIGKIQDSLSSTASALGKLQDVVNQNAQALNTLVKQLSSNFGAISSVLNDILSRLDKVEAEVQIDRLITGRLQSLQTYVTQQLIRAAEIRASANLAATKMSECVLGQSKRVDFCGKGYHLMSFPQSAPHGVVFLHVTYVPAQEKNFTTAPAICHDGKAHFPREGVFVSNGTHWFVTQRNFYEPQIITTDNTFVCGNCDVVIGIVNNTVYDPLQPELDSFKEELDKYFKNHTSPDVDLGDISGINASVVNIQKEIDRLNEVAKNLNESLIDLQELGKYEQYIKGGGSGGGQIYEGKLTAEGLRFGIVASRFNHALVDRLVEGAIDAIVRHGGREEDITLVRVPGSWEIPVAAGELARKEDIDAVIAIGVLIRGATPHFDYIASEVSKGLADLSLELRKPITFGVITADTLEQAIERAGTKHGNKGWEAALSAIEMANLFKSLR

SEQ ID NO: 13595 - protein, 1371 aa, Artificial Sequence
  SARS-CoV-2/Australia/VIC01/2020__EPI_ISL_406844 spike protein (1-1211)(N914C_S1123C) LumSynth construct
MFVFLVLLPLVSSQCVNLTTRTQLPPAYTNSFTRGVYYPDKVFRSSVLHSTQDLFLPFFSNVTWFHAIHVSGTNGTKRFDNPVLPFNDGVYFASTEKSNIIRGWIFGTTLDSKTQSLLIVNNATNVVIKVCEFQFCNDPFLGVYYHKNNKSWMESEFRVYSSANNCTFEYVSQPFLMDLEGKQGNFKNLREFVFKNIDGYFKIYSKHTPINLVRDLPQGFSALEPLVDLPIGINITRFQTLLALHRRYLTPGDSSSGWTAGAAAYYVGYLQPRTFLLKYNENGTITDAVDCALDPLSETKCTLKSFTVEKGIYQTSNFRVQPTESIVRFPNITNLCPFGEVFNATRFASVYAWNRKRISNCVADYSVLYNSASFSTFKCYGVSPTKLNDLCFTNVYADSFVIRGDEVRQIAPGQTGKIADYNYKLPDDFTGCVIAWNSNNLDSKVGGNYNYLYRLFRKSNLKPFERDISTEIYQAGSTPCNGVEGFNCYFPLQSYGFQPTNGVGYQPYRVVVLSFELLHAPATVCGPKKSTNLVKNKCVNFNFNGLTGTGVLTESNKKFLPFQQFGRDIADTTDAVRDPQTLEILDITPCSFGGVSVITPGTNTSNQVAVLYQDVNCTEVPVAIHADQLTPTWRVYSTGSNVFQTRAGCLIGAEHVNNSYECDIPIGAGICASYQTQTNSPRRARSVASQSIIAYTMSLGAENSVAYSNNSIAIPTNFTISVTTEILPVSMTKTSVDCTMYICGDSTECSNLLLQYGSFCTQLNRALTGIAVEQDKNTQEVFAQVKQIYKTPPIKDFGGFNFSQILPDPSKPSKRSFIEDLLFNKVTLADAGFIKQYGDCLGDIAARDLICAQKFNGLTVLPPLLTDEMIAQYTSALLAGTITSGWTFGAGAALQIPFAMQMAYRFNGIGVTQCVLYENQKLIANQFNSAIGKIQDSLSSTASALGKLQDVVNQNAQALNTLVKQLSSNFGAISSVLNDILSRLDKVEAEVQIDRLITGRLQSLQTYVTQQLIRAAEIRASANLAATKMSECVLGQSKRVDFCGKGYHLMSFPQSAPHGVVFLHVTYVPAQEKNFTTAPAICHDGKAHFPREGVFVSNGTHWFVTQRNFYEPQIITTDNTFVCGNCDVVIGIVNNTVYDPLQPELDSFKEELDKYFKNHTSPDVDLGDISGINASVVNIQKEIDRLNEVAKNLNESLIDLQELGKYEQYIKGGGSGGGQIYEGKLTAEGLRFGIVASRFNHALVDRLVEGAIDAIVRHGGREEDITLVRVPGSWEIPVAAGELARKEDIDAVIAIGVLIRGATPHFDYIASEVSKGLADLSLELRKPITFGVITADTLEQAIERAGTKHGNKGWEAALSAIEMANLFKSLR

SEQ ID NO: 13596 - protein, 1371 aa, Artificial Sequence
  SARS-CoV-2/Germany/BavPat1/2020__EPI_ISL_406862 spike protein (1-1211)(N914C_S1123C) LumSynth construct
MFVFLVLLPLVSSQCVNLTTRTQLPPAYTNSFTRGVYYPDKVFRSSVLHSTQDLFLPFFSNVTWFHAIHVSGTNGTKRFDNPVLPFNDGVYFASTEKSNIIRGWIFGTTLDSKTQSLLIVNNATNVVIKVCEFQFCNDPFLGVYYHKNNKSWMESEFRVYSSANNCTFEYVSQPFLMDLEGKQGNFKNLREFVFKNIDGYFKIYSKHTPINLVRDLPQGFSALEPLVDLPIGINITRFQTLLALHRSYLTPGDSSSGWTAGAAAYYVGYLQPRTFLLKYNENGTITDAVDCALDPLSETKCTLKSFTVEKGIYQTSNFRVQPTESIVRFPNITNLCPFGEVFNATRFASVYAWNRKRISNCVADYSVLYNSASFSTFKCYGVSPTKLNDLCFTNVYADSFVIRGDEVRQIAPGQTGKIADYNYKLPDDFTGCVIAWNSNNLDSKVGGNYNYLYRLFRKSNLKPFERDISTEIYQAGSTPCNGVEGFNCYFPLQSYGFQPTNGVGYQPYRVVVLSFELLHAPATVCGPKKSTNLVKNKCVNFNFNGLTGTGVLTESNKKFLPFQQFGRDIADTTDAVRDPQTLEILDITPCSFGGVSVITPGTNTSNQVAVLYQGVNCTEVPVAIHADQLTPTWRVYSTGSNVFQTRAGCLIGAEHVNNSYECDIPIGAGICASYQTQTNSPRRARSVASQSIIAYTMSLGAENSVAYSNNSIAIPTNFTISVTTEILPVSMTKTSVDCTMYICGDSTECSNLLLQYGSFCTQLNRALTGIAVEQDKNTQEVFAQVKQIYKTPPIKDFGGFNFSQILPDPSKPSKRSFIEDLLFNKVTLADAGFIKQYGDCLGDIAARDLICAQKFNGLTVLPPLLTDEMIAQYTSALLAGTITSGWTFGAGAALQIPFAMQMAYRFNGIGVTQCVLYENQKLIANQFNSAIGKIQDSLSSTASALGKLQDVVNQNAQALNTLVKQLSSNFGAISSVLNDILSRLDKVEAEVQIDRLITGRLQSLQTYVTQQLIRAAEIRASANLAATKMSECVLGQSKRVDFCGKGYHLMSFPQSAPHGVVFLHVTYVPAQEKNFTTAPAICHDGKAHFPREGVFVSNGTHWFVTQRNFYEPQIITTDNTFVCGNCDVVIGIVNNTVYDPLQPELDSFKEELDKYFKNHTSPDVDLGDISGINASVVNIQKEIDRLNEVAKNLNESLIDLQELGKYEQYIKGGGSGGGQIYEGKLTAEGLRFGIVASRFNHALVDRLVEGAIDAIVRHGGREEDITLVRVPGSWEIPVAAGELARKEDIDAVIAIGVLIRGATPHFDYIASEVSKGLADLSLELRKPITFGVITADTLEQAIERAGTKHGNKGWEAALSAIEMANLFKSLR

SEQ ID NO: 13597 - protein, 1371 aa, Artificial Sequence
  SARS-CoV-2/Wuhan/HBCDC-HB-02/2020__EPI_ISL_412978 spike protein (1-1211)(N914C_S1123C) LumSynth construct
MFVFLVLLPLVSSQCVNLTTRTQLPPAYTNSFTRGVYYPDKVFRSSVLHSTQDLFLPFFSNVTWFHAIHVSGTNGTKRFDNPVLPFNDGVYFASTEKSNIIRGWIFGTTLDSKTQSLLIVNNATNVVIKVCEFQFCNDPFLGVYYHKNNKSWMESEFRVYSSANNCTFEYVSQPFLMDLEGKQGNFKNLREFVFKNIDGYFKIYSKHTPINLVRDLPQGFSALEPLVDLPIGINITRFQTLLALHRSYLTPGDSSSGWTAGAAAYYVGYLQPRTFLLKYNENGTITDAVDCALDPLSETKCTLKSFTVEKGIYQTSNFRVQPTESIVRFPNITNLCPFGEVFNATRFASVYAWNRKRISNCVADYSVLYNSASFSTFKCYGVSPTKLNDLCFTNVYADSFVIRGDEVRQIAPGQTGKIADYNYKLPDDFTGCVIAWNSNNLDSKVGGNYNYLYRLFRKSNLKPFERDISTEIYQAGSTPCNGVEGFNCYFPLQSYGFQPTNGVGYQPYRVVVLSFELLHAPATVCGPKKSTNLVKNKCVNFNFNGLTGTGVLTESNKKFLPFQQFGRDIADTTDAVRDPQTLEILDITPCSFGGVSVITPGTNTSNQVAVLYQDVNCTEVPVAIHADQLTPTWRVYSTGSNVFQTRAGCLIGAEHVNNSYECDIPIGAGICASYQTQTNSPRRARSVASQSIIAYTMSLGAENSVAYSNNSIAIPTNFTISVTTEILPVSMTKTSVDCTMYICGDSTECSNFLLQYGSFCTQLNRALTGIAVEQDKNTQEVFAQVKQIYKTPPIKDFGGFNFSQILPDPSKPSKRSFIEDLLFNKVTLADAGFIKQYGDCLGDIAARDLICAQKFNGLTVLPPLLTDEMIAQYTSALLAGTITSGWTFGAGAALQIPFAMQMAYRFNGIGVTQCVLYENQKLIANQFNSAIGKIQDSLSSTASALGKLQDVVNQNAQALNTLVKQLSSNFGAISSVLNDILSRLDKVEAEVQIDRLITGRLQSLQTYVTQQLIRAAEIRASANLAATKMSECVLGQSKRVDFCGKGYHLMSFPQSAPHGVVFLHVTYVPAQEKNFTTAPAICHDGKAHFPREGVFVSNGTHWFVTQRNFYEPQIITTDNTFVCGNCDVVIGIVNNTVYDPLQPELDSFKEELDKYFKNHTSPDVDLGDISGINASVVNIQKEIDRLNEVAKNLNESLIDLQELGKYEQYIKGGGSGGGQIYEGKLTAEGLRFGIVASRFNHALVDRLVEGAIDAIVRHGGREEDITLVRVPGSWEIPVAAGELARKEDIDAVIAIGVLIRGATPHFDYIASEVSKGLADLSLELRKPITFGVITADTLEQAIERAGTKHGNKGWEAALSAIEMANLFKSLR

SEQ ID NO: 13598 - protein, 1371 aa, Artificial Sequence
  SARS-CoV-2/Australia/QLD02/2020__EPI_ISL_407896 spike protein (1-1211)(N914C_S1123C) LumSynth construct
MFVFLVLLPLVSSQCVNLTTRTQLPPAYTNSFTRGVYYPDKVFRSSVLHSTQDLFLPFFSNVTWFHAIHVSGTNGTKRFDNPVLPFNDGVYFASTEKSNIIRGWIFGTTLDSKTQSLLIVNNATNVVIKVCEFQFCNDPFLGVYYHKNNKSWMESEFRVYSSANNCTFEYVSQPFLMDLEGKQGNFKNLREFVFKNIDGYFKIYSKHTPINLVRDLPQGFSALEPLVDLPIGINITRFQTLLALHRSYLTPGDSSSGWTAGAAAYYVGYLQPRTFLLKYNENGTITDAVDCALDPLSETKCTLKSFTVEKGIYQTSNFRVQPTESIVRFPNITNLCPFGEVFNATRFASVYAWNRKRISNCVADYSVLYNSASFSTFKCYGVSPTKLNDLCFTNVYADSFVIRGDEVRQIAPGQTGKIADYNYKLPDDFTGCVIAWNSNNLDSKVGGNYNYLYRLFRKSNLKPFERDISTEIYQAGSTPCNGVEGFNCYFPLQSYGFQPTNGVGYQPYRVVVLSFELLHAPATVCGPKKSTNLVKNKCVNFNFNGLTGTGVLTESNKKFLPFQQFGRDIADTTDAVRDPQTLEILDITPCSFGGVSVITPGTNTSNQVAVLYQDVNCTEVPVAIHADQLTPTWRVYSTGSNVFQTRAGCLIGAEHVNNSYECDIPIGAGICASYQTQTNSPRRARSVASQSIIAYTMSLGAENSVAYSNNSIAIPTNFTISVTTEILPVSMTKTSVDCTMYICGDSTECSNLLLQYGSFCTQLNRALTGIAVEQDKNTQEVFAQVKQIYKTPPIKDFGGFNFSQILPDPSKPSKRSFIEDLLFNKVTLADAGFIKQYGDCLGDIAARDLICAQKFNGLTVLPPLLTDEMIAQYTSALLAGTITSGWTFGAGAALQIPFAMQMAYRFNGIGVTQCVLYENQKLIANQFNSAIGKIQDSLSSTASALGKLQDVVNQNAQALNTLVKQLSSNFGAISSVLNDILSRLDKVEAEVQIDRLITGRLQSLQTYVTQQLIRAAEIRASANLAATKMSECVLGQSKRVDFCGKGYHLMSFPQSAPHGVVFLHVTYVPAQEKNFTTAPAICHDGKAHFPREGVFVSNGTHWFVTQRNFYEPQIITTDNTFVCGNCDVVIGIVNNTVYDPLQLELDSFKEELDKYFKNHTSPDVDLGDISGINASVVNIQKEIDRLNEVAKNLNESLIDLQELGKYEQYIKGGGSGGGQIYEGKLTAEGLRFGIVASRFNHALVDRLVEGAIDAIVRHGGREEDITLVRVPGSWEIPVAAGELARKEDIDAVIAIGVLIRGATPHFDYIASEVSKGLADLSLELRKPITFGVITADTLEQAIERAGTKHGNKGWEAALSAIEMANLFKSLR

SEQ ID NO: 13599 - protein, 1371 aa, Artificial Sequence
  SARS-CoV-2/India/1-31/2020__EPI_ISL_413523 spike protein (1-1211)(N914C_S1123C) LumSynth construct
MFVFLVLLPLVSSQCVNLTTRTQLPPAYTNSFTRGVYYPDKVFRSSVLHSTQDLFLPFFSNVTWFHAIHVSGTNGTKRFDNPVLPFNDGVYFASTEKSNIIRGWIFGTTLDSKTQSLLIVNNATNVVIKVCEFQFCNDPFLGVYYHKNNKSWMESEFRVYSSANNCTFEYVSQPFLMDLEGKQGNFKNLREFVFKNIDGYFKIYSKHTPINLVRDLPQGFSALEPLVDLPIGINITRFQTLLALHRSYLTPGDSSSGWTAGAAAYYVGYLQPRTFLLKYNENGTITDAVDCALDPLSETKCTLKSFTVEKGIYQTSNFRVQPTESIVRFPNITNLCPFGEVFNATRFASVYAWNRKRISNCVADYSVLYNSASFSTFKCYGVSPTKLNDLCFTNVYADSFVIRGDEVRQIAPGQTGKIADYNYKLPDDFTGCVIAWNSNNLDSKVGGNYNYLYRLFRKSNLKPFERDISTEIYQAGSTPCNGVEGFNCYFPLQSYGFQPTNGVGYQPYRVVVLSFELLHAPATVCGPKKSTNLVKNKCVNFNFNGLTGTGVLTESNKKFLPFQQFGRDIADTTDAVRDPQTLEILDITPCSFGGVSVITPGTNTSNQVAVLYQDVNCTEVPVAIHADQLTPTWRVYSTGSNVFQTRAGCLIGAEHVNNSYECDIPIGAGICASYQTQTNSPRRARSVASQSIIAYTMSLGAENSVAYSNNSIAIPTNFTISVTTEILPVSMTKTSVDCTMYICGDSTECSNLLLQYGSFCTQLNRALTGIAVEQDKNTQEVFAQVKQIYKTPPIKDFGGFNFSQILPDPSKPSKRSFIEDLLFNKVTLADAGFIKQYGDCLGDIAARDLICAQKFNGLTVLPPLLTDEMIAQYTSALLAGTITSGWTFGAGAALQIPFAMQMAYRFNGIGVTQCVLYENQKLIANQFNSVIGKIQDSLSSTASALGKLQDVVNQNAQALNTLVKQLSSNFGAISSVLNDILSRLDKVEAEVQIDRLITGRLQSLQTYVTQQLIRAAEIRASANLAATKMSECVLGQSKRVDFCGKGYHLMSFPQSAPHGVVFLHVTYVPAQEKNFTTAPAICHDGKAHFPREGVFVSNGTHWFVTQRNFYEPQIITTDNTFVCGNCDVVIGIVNNTVYDPLQPELDSFKEELDKYFKNHTSPDVDLGDISGINASVVNIQKEIDRLNEVAKNLNESLIDLQELGKYEQYIKGGGSGGGQIYEGKLTAEGLRFGIVASRFNHALVDRLVEGAIDAIVRHGGREEDITLVRVPGSWEIPVAAGELARKEDIDAVIAIGVLIRGATPHFDYIASEVSKGLADLSLELRKPITFGVITADTLEQAIERAGTKHGNKGWEAALSAIEMANLFKSLR

SEQ ID NO: 13600 - protein, 1371 aa, Artificial Sequence
  SARS-CoV-2/Guangdong/GD2020087-P0008/2020__EPI_ISL_413863 spike protein (1-1211)(N914C_S1123C) LumSynth construct
MFVFLVLLPLVSSQCVNLTTRTQLPPAYTNSFTRGVYYPDKVFRSSVLHSTQDLFLPFFSNVTWFHAIHVSGTNGTKRFDNPVLPFNDGVYFASTEKSNIIRGWIFGTTLDSKTQSLLIVNNATNVVIKVCEFQFCNDPFLGVYYHKNNKSWMESEFRVYSSANNCTFEYVSQPFLMDLEGKQGNFKNLREFVFKNIDGYFKIYSKHTPINLVRDLPQGFSALEPLVDLPIGINITRFQTLLALHRSYLTPGDSSSGWTAGAAAYYVGYLQPRTFLLKYNENGTITDAVDCALDPLSETKCTLKSFTVEKGIYQTSNFRVQPTESIVRFPNITNLCPFGEVFNATRFASVYAWNRKRISNCVADYSVLYNSASFSTFKCYGVSPTKLNDLCFTNVYADSFVIRGDEVREIAPGQTGKIADYNYKLPDDFTGCVIAWNSNNLDSKVGGNYNYLYRLFRKSNLKPFERDISTEIYQAGSTPCNGVEGFNCYFPLQSYGFQPTNGVGYQPYRVVVLSFELLHAPATVCGPKKSTNLVKNKCVNFNFNGLTGTGVLTESNKKFLPFQQFGRDIADTTDAVRDPQTLEILDITPCSFGGVSVITPGTNTSNQVAVLYQDVNCTEVPVAIHADQLTPTWRVYSTGSNVFQTRAGCLIGAEHVNNSYECDIPIGAGICASYQTQTNSPRRARSVASQSIIAYTMSLGAENSVAYSNNSIAIPTNFTISVTTEILPVSMTKTSVDCTMYICGDSTECSNLLLQYGSFCTQLNRALTGIAVEQDKNTQEVFAQVKQIYKTPPIKDFGGFNFSQILPDPSKPSKRSFIEDLLFNKVTLADAGFIKQYGDCLGDIAARDLICAQKFNGLTVLPPLLTDEMIAQYTSALLAGTITSGWTFGAGAALQIPFAMQMAYRFNGIGVTQCVLYENQKLIANQFNSAIGKIQDSLSSTASALGKLQDVVNQNAQALNTLVKQLSSNFGAISSVLNDILSRLDKVEAEVQIDRLITGRLQSLQTYVTQQLIRAAEIRASANLAATKMSECVLGQSKRVDFCGKGYHLMSFPQSAPHGVVFLHVTYVPAQEKNFTTAPAICHDGKAHFPREGVFVSNGTHWFVTQRNFYEPQIITTDNTFVCGNCDVVIGIVNNTVYDPLQPELDSFKEELDKYFKNHTSPDVDLGDISGINASVVNIQKEIDRLNEVAKNLNESLIDLQELGKYEQYIKGGGSGGGQIYEGKLTAEGLRFGIVASRFNHALVDRLVEGAIDAIVRHGGREEDITLVRVPGSWEIPVAAGELARKEDIDAVIAIGVLIRGATPHFDYIASEVSKGLADLSLELRKPITFGVITADTLEQAIERAGTKHGNKGWEAALSAIEMANLFKSLR

SEQ ID NO: 13601 - protein, 1371 aa, Artificial Sequence
  SARS-CoV-2/Sweden/01/2020__EPI_ISL_411951 spike protein (1-1211)(N914C_S1123C) LumSynth construct
MFVFLVLLPLVSSQCVNLTTRTQLPPAYTNSFTRGVYYPDKVFRSSVLHSTQDLFLPFFSNVTWFHAIHVSGTNGTKRFDNPVLPFNDGVYFASTEKSNIIRGWIFGTTLDSKTQSLLIVNNATNVVIKVCEFQFCNDPFLGVYYHKNNKSWMESEFRVYSSANNCTFEYVSQPFLMDLEGKQGNFKNLREFVFKNIDGYFKIYSKHTPINLVRDLPQGFSALEPLVDLPIGINITRFQTLLALHRSYLTPGDSSSGWTAGAAAYYVGYLQPRTFLLKYNENGTITDAVDCALDPLSETKCTLKSFTVEKGIYQTSNFRVQPTESIVRFPNITNLCPFGEVFNATRFASVYAWNRKRISNCVADYSVLYNSASFSTFKCYGVSPTKLNDLCFTNVYADSFVIRGDEVRQIAPGQTGKIADYNYKLPDDFTGCVIAWNSNNLDSKVGGNYNYLYRLFRKSNLKPFERDISTEIYQAGSTPCNGVEGFNCYFPLQSYGFQPTNGVGYQPYRVVVLSFELLHAPATVCGPKKSTNLVKNKCVNFNFNGLTGTGVLTESNKKFLPFQQFGRDIADTTDAVRDPQTLEILDITPCSFGGVSVITPGTNTSNQVAVLYQDVNCTEVPVAIHADQLTPTWRVYSTGSNVFQTRAGCLIGAEHVNNSYECDIPIGAGICASYQTQTNSPRRARSVASQSIIAYTMSLGAENSVAYSNNSIAIPTNFTISVTTEILPVSMTKTSVDCTMYICGDSTECSNLLLQYGSFCTQLNRALTGIAVEQDKNTQEVFAQVKQIYKTPPIKDCGGFNFSQILPDPSKPSKRSFIEDLLFNKVTLADAGFIKQYGDCLGDIAARDLICAQKFNGLTVLPPLLTDEMIAQYTSALLAGTITSGWTFGAGAALQIPFAMQMAYRFNGIGVTQCVLYENQKLIANQFNSAIGKIQDSLSSTASALGKLQDVVNQNAQALNTLVKQLSSNFGAISSVLNDILSRLDKVEAEVQIDRLITGRLQSLQTYVTQQLIRAAEIRASANLAATKMSECVLGQSKRVDFCGKGYHLMSFPQSAPHGVVFLHVTYVPAQEKNFTTAPAICHDGKAHFPREGVFVSNGTHWFVTQRNFYEPQIITTDNTFVCGNCDVVIGIVNNTVYDPLQPELDSFKEELDKYFKNHTSPDVDLGDISGINASVVNIQKEIDRLNEVAKNLNESLIDLQELGKYEQYIKGGGSGGGQIYEGKLTAEGLRFGIVASRFNHALVDRLVEGAIDAIVRHGGREEDITLVRVPGSWEIPVAAGELARKEDIDAVIAIGVLIRGATPHFDYIASEVSKGLADLSLELRKPITFGVITADTLEQAIERAGTKHGNKGWEAALSAIEMANLFKSLR

SEQ ID NO: 13602 - protein, 1371 aa, Artificial Sequence
  SARS-CoV-2/Tianmen/HBCDC-HB-07/2020__EPI_ISL_412983 spike protein (1-1211)(N914C_S1123C) LumSynth construct
MFVFLVLLPLVSSQCVNLTTRTQLPPAYTNSFTRGVYYPDKVFRSSVLHSTQDLFLPFFSNVTWFHAIHVSGTNGTKRFDNPVLPFNDGVYFASTEKSNIIRGWIFGTTLDSKTQSLLIVNNATNVVIKVCEFQFCNDPFLGVYYHKNNKSWMESEFRVYSSANNCTFEYVSQPFLMDLEGKQGNFKNLREFVFKNIDGYFKIYSKHTPINLVRDLPQGFSALEPLVDLPIGINITRFQTLLALHRSYLTPGDSSSGWTAGAAAYYVGYLQPRTFLLKYNENGTITDAVDCALDPLSETKCTLKSFTVEKGIYQTSNFRVQPTESIVRFPNITNLCPFGEVFNATRFASVYAWNRKRISNCVADYSVLYNSASFSTFKCYGVSPTKLNDLCFTNVYADSFVIRGDEVRQIAPGQTGKIADYNYKLPDDFTGCVIAWNSNNLDSKVGGNYNYLYRLFRKSNLKPFERDISTEIYQAGSTPCNGVEGFNCYFPLQSYGFQPTNGVGYQPYRVVVLSFELLHAPATVCGPKKSTNLVKNKCVNFNFNGLTGTGVLTESNKKFLPFQQFGRDIADTTDAVRDPQTLEILDITPCSFGGVSVITPGTNTSNQVAVLYQDLNCTEVPVAIHADQLTPTWRVYSTGSNVFQTRAGCLIGAEHVNNSYECDIPIGAGICASYQTQTNSPRRARSVASQSIIAYTMSLGAENSVAYSNNSIAIPTNFTISVTTEILPVSMTKTSVDCTMYICGDSTECSNLLLQYGSFCTQLNRALTGIAVEQDKNTQEVFAQVKQIYKTPPIKDFGGFNFSQILPDPSKPSKRSFIEDLLFNKVTLADAGFIKQYGDCLGDIAARDLICAQKFNGLTVLPPLLTDEMIAQYTSALLAGTITSGWTFGAGAALQIPFAMQMAYRFNGIGVTQCVLYENQKLIANQFNSAIGKIQDSLSSTASALGKLQDVVNQNAQALNTLVKQLSSNFGAISSVLNDILSRLDKVEAEVQIDRLITGRLQSLQTYVTQQLIRAAEIRASANLAATKMSECVLGQSKRVDFCGKGYHLMSFPQSAPHGVVFLHVTYVPAQEKNFTTAPAICHDGKAHFPREGVFVSNGTHWFVTQRNFYEPQIITTDNTFVCGNCDVVIGIVNNTVYDPLQPELDSFKEELDKYFKNHTSPDVDLGDISGINASVVNIQKEIDRLNEVAKNLNESLIDLQELGKYEQYIKGGGSGGGQIYEGKLTAEGLRFGIVASRFNHALVDRLVEGAIDAIVRHGGREEDITLVRVPGSWEIPVAAGELARKEDIDAVIAIGVLIRGATPHFDYIASEVSKGLADLSLELRKPITFGVITADTLEQAIERAGTKHGNKGWEAALSAIEMANLFKSLR

SEQ ID NO: 13603 - protein, 1371 aa, Artificial Sequence
  SARS-CoV-2/Hong Kong/case42_VM20002493/2020__EPI_ISL_414527 spike protein (1-1211)(N914C_S1123C) LumSynth construct
MFVFLVLLPLVSSQCVNLTTRTQLPPAYTNSFTRGVYYPDKVFRSSVLHSTQDLFLPFFSNVTWFHAIHVSGTNGTKRFDNPVLPFNDGVYFASTEKSNIIRGWIFGTTLDSKTQSLLIVNNATNVVIKVCEFQFCNDPFLGVYYHKNNKSWMESEFRVYSSANNCTFEYVSQPFLMDLEGKQGNFKNLREFVFKNIDGYFKIYSKHTPINLVRDLPQGFSALEPLVDLPIGINITRFQTLLALHRSYLTPGDSSSGWTAGAAAYYVGYLQPRTFLLKYNENGTITDAVDCALDPLSETKCTLKSFTVEKGIYQTSNFRVQPTESIVRFPNITNLCPFGEVFNATRFASVYAWNRKRISNCVADYSVLYNSASFSTFKCYGVSPTKLNDLCFTNVYADSFVIRGDEVRQIAPGQTGKIADYNYKLPDDFTGCVIAWNSNNLDSKVGGNYNYLYRLFRKSNLKPFERDISTEIYQAGSTPCNGVEGFNCYFPLQSYGFQPTNGVGYQPYRVVVLSFELLHAPATVCGPKKSTNLVKNKCVNFNFNGLTGTGVLTESNKKFLPFQQFGRDIADTTDAVRDPQTLEILDITPCSFGGVSVITPGTNTSNQVAVLYQDVNCTEVPVAIHADQLTPTWRVYSTGSNVFQTRAGCLIGAEHVNNSYECDIPIGAGICASYQTQTNSPRRARSVASQSIIAYTMSLGAENSVAYSNNSIAIPTNFAISVTTEILPVSMTKTSVDCTMYICGDSTECSNLLLQYGSFCTQLNRALTGIAVEQDKNTQEVFAQVKQIYKTPPIKDFGGFNFSQILPDPSKPSKRSFIEDLLFNKVTLADAGFIKQYGDCLGDIAARDLICAQKFNGLTVLPPLLTDEMIAQYTSALLAGTITSGWTFGAGAALQIPFAMQMAYRFNGIGVTQCVLYENQKLIANQFNSAIGKIQDSLSSTASALGKLQDVVNQNAQALNTLVKQLSSNFGAISSVLNDILSRLDKVEAEVQIDRLITGRLQSLQTYVTQQLIRAAEIRASANLAATKMSECVLGQSKRVDFCGKGYHLMSFPQSAPHGVVFLHVTYVPAQEKNFTTAPAICHDGKAHFPREGVFVSNGTHWFVTQRNFYEPQIITTDNTFVCGNCDVVIGIVNNTVYDPLQPELDSFKEELDKYFKNHTSPDVDLGDISGINASVVNIQKEIDRLNEVAKNLNESLIDLQELGKYEQYIKGGGSGGGQIYEGKLTAEGLRFGIVASRFNHALVDRLVEGAIDAIVRHGGREEDITLVRVPGSWEIPVAAGELARKEDIDAVIAIGVLIRGATPHFDYIASEVSKGLADLSLELRKPITFGVITADTLEQAIERAGTKHGNKGWEAALSAIEMANLFKSLR

SEQ ID NO: 13604 - protein, 1371 aa, Artificial Sequence
  SARS-CoV-2/USA/CruiseA-23/2020__EPI_ISL_414482 spike protein (1-1211)(N914C_S1123C) LumSynth construct
MFVFLVLLPLVSSQCVNLTTRTQLPPAYTNSFTRGVYYPDKVFRSSVLHSTQDLFLPFFSNVTWFHAIHVSGTNGTKRFDNPVLPFNDGVYFASTEKSNIIRGWIFGTTLDSKTQSLLIVNNATNVVIKVCEFQFCNDPFLGVYYHKNNKSWMESEFRVYSSANNCTFEYVSQPFLMDLEVKQGNFKNLREFVFKNIDGYFKIYSKHTPINLVRDLPQGFSALEPLVDLPIGINITRFQTLLALHRSYLTPGDSSSGWTAGAAAYYVGYLQPRTFLLKYNENGTITDAVDCALDPLSETKCTLKSFTVEKGIYQTSNFRVQPTESIVRFPNITNLCPFGEVFNATRFASVYAWNRKRISNCVADYSVLYNSASFSTFKCYGVSPTKLNDLCFTNVYADSFVIRGDEVRQIAPGQTGKIADYNYKLPDDFTGCVIAWNSNNLDSKVGGNYNYLYRLFRKSNLKPFERDISTEIYQAGSTPCNGVEGFNCYFPLQSYGFQPTNGVGYQPYRVVVLSFELLHAPATVCGPKKSTNLVKNKCVNFNFNGLTGTGVLTESNKKFLPFQQFGRDIADTTDAVRDPQTLEILDITPCSFGGVSVITPGTNTSNQVAVLYQDVNCTEVPVAIHADQLTPTWRVYSTGSNVFQTRAGCLIGAEHVNNSYECDIPIGAGICASYQTQTNSPRRARSVASQSIIAYTMSLGAENSVAYSNNSIAIPTNFTISVTTEILPVSMTKTSVDCTMYICGDSTECSNLLLQYGSFCTQLNRALTGIAVEQDKNTQEVFAQVKQIYKTPPIKDFGGFNFSQILPDPSKPSKRSFIEDLLFNKVTLADAGFIKQYGDCLGDIAARDLICAQKFNGLTVLPPLLTDEMIAQYTSALLAGTITSGWTFGAGAALQIPFAMQMAYRFNGIGVTQCVLYENQKLIANQFNSAIGKIQDSLSSTASALGKLQDVVNQNAQALNTLVKQLSSNFGAISSVLNDILSRLDKVEAEVQIDRLITGRLQSLQTYVTQQLIRAAEIRASANLAATKMSECVLGQSKRVDFCGKGYHLMSFPQSAPHGVVFLHVTYVPAQEKNFTTAPAICHDGKAHFPREGVFVSNGTHWFVTQRNFYEPQIITTDNTFVCGNCDVVIGIVNNTVYDPLQPELDSFKEELDKYFKNHTSPDVDLGDISGINASVVNIQKEIDRLNEVAKNLNESLIDLQELGKYEQYIKGGGSGGGQIYEGKLTAEGLRFGIVASRFNHALVDRLVEGAIDAIVRHGGREEDITLVRVPGSWEIPVAAGELARKEDIDAVIAIGVLIRGATPHFDYIASEVSKGLADLSLELRKPITFGVITADTLEQAIERAGTKHGNKGWEAALSAIEMANLFKSLR

SEQ ID NO: 13605 - protein, 1371 aa, Artificial Sequence
  SARS-CoV-2/Hong Kong/case85_VM20002868/2020__EPI_ISL_414519 spike protein (1-1211)(N914C_S1123C) LumSynth construct
MFVFLVLVPLVSSQCVNLTTRTQLPPAYTNSFTRGVYYPDKVFRSSVLHSTQDLFLPFFSNVTWFHAIHVSGTNGTKRFDNPVLPFNDGVYFASTEKSNIIRGWIFGTTLDSKTQSLLIVNNATNVVIKVCEFQFCNDPFLGVYYHKNNKSWMESEFRVYSSANNCTFEYVSQPFLMDLEGKQGNFKNLREFVFKNIDGYFKIYSKHTPINLVRDLPQGFSALEPLVDLPIGINITRFQTLLALHRSYLTPGDSSSGWTAGAAAYYVGYLQPRTFLLKYNENGTITDAVDCALDPLSETKCTLKSFTVEKGIYQTSNFRVQPTESIVRFPNITNLCPFGEVFNATRFASVYAWNRKRISNCVADYSVLYNSASFSTFKCYGVSPTKLNDLCFTNVYADSFVIRGDEVRQIAPGQTGKIADYNYKLPDDFTGCVIAWNSNNLDSKVGGNYNYLYRLFRKSNLKPFERDISTEIYQAGSTPCNGVEGFNCYFPLQSYGFQPTNGVGYQPYRVVVLSFELLHAPATVCGPKKSTNLVKNKCVNFNFNGLTGTGVLTESNKKFLPFQQFGRDIADTTDAVRDPQTLEILDITPCSFGGVSVITPGTNTSNQVAVLYQDVNCTEVPVAIHADQLTPTWRVYSTGSNVFQTRAGCLIGAEHVNNSYECDIPIGAGICASYQTQTNSPRRARSVASQSIIAYTMSLGAENSVAYSNNSIAIPTNFTISVTTEILPVSMTKTSVDCTMYICGDSTECSNLLLQYGSFCTQLNRALTGIAVEQDKNTQEVFAQVKQIYKTPPIKDFGGFNFSQILPDPSKPSKRSFIEDLLFNKVTLADAGFIKQYGDCLGDIAARDLICAQKFNGLTVLPPLLTDEMIAQYTSALLAGTITSGWTFGAGAALQIPFAMQMAYRFNGIGVTQCVLYENQKLIANQFNSAIGKIQDSLSSTASALGKLQDVVNQNAQALNTLVKQLSSNFGAISSVLNDILSRLDKVEAEVQIDRLITGRLQSLQTYVTQQLIRAAEIRASANLAATKMSECVLGQSKRVDFCGKGYHLMSFPQSAPHGVVFLHVTYVPAQEKNFTTAPAICHDGKAHFPREGVFVSNGTHWFVTQRNFYEPQIITTDNTFVCGNCDVVIGIVNNTVYDPLQPELDSFKEELDKYFKNHTSPDVDLGDISGINASVVNIQKEIDRLNEVAKNLNESLIDLQELGKYEQYIKGGGSGGGQIYEGKLTAEGLRFGIVASRFNHALVDRLVEGAIDAIVRHGGREEDITLVRVPGSWEIPVAAGELARKEDIDAVIAIGVLIRGATPHFDYIASEVSKGLADLSLELRKPITFGVITADTLEQAIERAGTKHGNKGWEAALSAIEMANLFKSLR

SEQ ID NO: 13606 - protein, 1371 aa, Artificial Sequence; identical to SEQ ID NO: 13596
  SARS-CoV-2/England/200990660/2020__EPI_ISL_414523 spike protein (1-1211)(N914C_S1123C) LumSynth construct

SEQ ID NO: 13607 - protein, 1371 aa, Artificial Sequence
  SARS-CoV-2/Australia/NSW09/2020__EPI_ISL_413595 spike protein (1-1211)(N914C_S1123C) LumSynth construct
MFVFLVLLPLVSSQCVNLTTRTQLPPAYTNSFTRGVYYPDKVFRSSVLHSTQDLFLPFFSNVTWFHAIHVSGTNGTKRFDNPVLPFNDGVYFASTEKSNIIRGWIFGTTLDSKTQSLLIVNNATNVVIKVCEFQFCNDPFLGVYYHKNNKSWMESEFRVYSSANNCTFEYVSQPFLMDLEGKQGNFKNLREFVFKNIDGYFKIYSKHTPINLVRDLPQGFSALEPLVDLPIGINITRFQTLLALHRSYLTPGDSSSGWTAGAAAYYVGYLQPRTFLLKYNENGTITDAVDCALDPLSETKCTLKSFTVEKGIYQTSNFRVQPTESIVRFPNITNLCPFGEVFNATRFASVYAWNRKRISNCVADYSVLYNSASFSTFKCYGVSPTKLNDLCFTNVYADSFVIRGDEVRQIAPGQTGKIADYNYKLPDDFTGCVIAWNSNNLDSKVGGNYNYLYRLFRKSNLKPFERDISTEIYQAGSTPCNGVEGFNCYFPLQSYGFQPTNGVGYQPYRVVVLSFELLHAPATVCGPKKSTNLVKNKCVNFNFNGLTGTGVLTESNKKFLPFQQFGRDIADTTDAVRDPQTLEILDITPCSFGGVSVITPGTNTSNQVAVLYQDVNCTEVPVAIHADQLTPTWRVYSTGSNVFQTRAGCLIGAEHVNNSYECDIPIGAGICASYQTQTNSPRRARSVASQSIIAYTMSLGAENSVAYSNNSIAIPTNFTISVTTEILPVSMTKTSVDCTMYICGDSTECSNLLLQYGSFCTQLNRALTGIAVEQDKNTQEVFAQVKQIYKTPPIKDFGGFNFSQILPDPSKPSKRSFIEDLLFNKVTLADAGFIKQYGDCLGDIAARDLICAQKFNGLTVLPPLLTDEMIAQYTSALLAGTITSGWTFGAGAALQIPFAMQMAYRFNGIGVTQCVLYENQKLIANQFNSAIGKIQDSLSFTASALGKLQDVVNQNAQALNTLVKQLSSNFGAISSVLNDILSRLDKVEAEVQIDRLITGRLQSLQTYVTQQLIRAAEIRASANLAATKMSECVLGQSKRVDFCGKGYHLMSFPQSAPHGVVFLHVTYVPAQEKNFTTAPAICHDGKAHFPREGVFVSNGTHWFVTQRNFYEPQIITTDNTFVCGNCDVVIGIVNNTVYDPLQPELDSFKEELDKYFKNHTSPDVDLGDISGINASVVNIQKEIDRLNEVAKNLNESLIDLQELGKYEQYIKGGGSGGGQIYEGKLTAEGLRFGIVASRFNHALVDRLVEGAIDAIVRHGGREEDITLVRVPGSWEIPVAAGELARKEDIDAVIAIGVLIRGATPHFDYIASEVSKGLADLSLELRKPITFGVITADTLEQAIERAGTKHGNKGWEAALSAIEMANLFKSLR

SEQ ID NO: 13608 - protein, 1371 aa, Artificial Sequence; identical to SEQ ID NO: 13588
  SARS-CoV-2/Australia/NSW10/2020__EPI_ISL_413596 spike protein (1-1211)(N914C_S1123C) LumSynth construct

SEQ ID NO: 13609 - protein, 1371 aa, Artificial Sequence
  SARS-CoV-2/Switzerland/1000477797/2020__EPI_ISL_413023 spike protein (1-1211)(N914C_S1123C) LumSynth construct
MFVFLVLLPLVSSQCVNLTTRTQLPPAYTNSFTRGVYYPDKVFRSSVLHSTQDLFLPFFSNVTWFHAIHVSGTNGTKRFDNPVLPFNDGVYFASTEKSNIIRGWIFGTTLDSKTQSLLIVNNATNVVIKVCEFQFCNDPFLGVYYHKNNKSWMESEFRVYSSANNCTFEYVSQPFLMDLEGKQGNFKNLREFVFKNIDGYFNIYSKHTPINLVRDLPQGFSALEPLVDLPIGINITRFQTLLALHRSYLTPGDSSSGWTAGAAAYYVGYLQPRTFLLKYNENGTITDAVDCALDPLSETKCTLKSFTVEKGIYQTSNFRVQPTESIVRFPNITNLCPFGEVFNATRFASVYAWNRKRISNCVADYSVLYNSASFSTFKCYGVSPTKLNDLCFTNVYADSFVIRGDEVRQIAPGQTGKIADYNYKLPDDFTGCVIAWNSNNLDSKVGGNYNYLYRLFRKSNLKPFERDISTEIYQAGSTPCNGVEGFNCYFPLQSYGFQPTNGVGYQPYRVVVLSFELLHAPATVCGPKKSTNLVKNKCVNFNFNGLTGTGVLTESNKKFLPFQQFGRDIADTTDAVRDPQTLEILDITPCSFGGVSVITPGTNTSNQVAVLYQGVNCTEVPVAIHADQLTPTWRVYSTGSNVFQTRAGCLIGAEHVNNSYECDIPIGAGICASYQTQTNSPRRARSVASQSIIAYTMSLGAENSVAYSNNSIAIPTNFTISVTTEILPVSMTKTSVDCTMYICGDSTECSNLLLQYGSFCTQLNRALTGIAVEQDKNTQEVFAQVKQIYKTPPIKDFGGFNFSQILPDPSKPSKRSFIEDLLFNKVTLADAGFIKQYGDCLGDIAARDLICAQKFNGLTVLPPLLTDEMIAQYTSALLAGTITSGWTFGAGAALQIPFAMQMAYRFNGIGVTQCVLYENQKLIANQFNSAIGKIQDSLSSTASALGKLQDVVNQNAQALNTLVKQLSSNFGAISSVLNDILSRLDKVEAEVQIDRLITGRLQSLQTYVTQQLIRAAEIRASANLAATKMSECVLGQSKRVDFCGKGYHLMSFPQSAPHGVVFLHVTYVPAQEKNFTTAPAICHDGKAHFPREGVFVSNGTHWFVTQRNFYEPQIITTDNTFVCGNCDVVIGIVNNTVYDPLQPELDSFKEELDKYFKNHTSPDVDLGDISGINASVVNIQKEIDRLNEVAKNLNESLIDLQELGKYEQYIKGGGSGGGQIYEGKLTAEGLRFGIVASRFNHALVDRLVEGAIDAIVRHGGREEDITLVRVPGSWEIPVAAGELARKEDIDAVIAIGVLIRGATPHFDYIASEVSKGLADLSLELRKPITFGVITADTLEQAIERAGTKHGNKGWEAALSAIEMANLFKSLR

SEQ ID NO: 13610 - protein, 1371 aa, Artificial Sequence
  SARS-CoV-2/Belgium/BA-02291/2020__EPI_ISL_415159 spike protein (1-1211)(N914C_S1123C) LumSynth construct
MFVFLVLLPLVSSQCVNLTTRTQLPPAYTNSFTRGVYYPDKVFRSSVLHSTQDLFLPFFSNVTWFHAIHVSGTNGTKRFDNPVLPFNDGVYFASTEKSNIIRGWIFGTTLDSKTQSLLIVNNATNVVIKVCEFQFCNDPFLGVYYHKNNKSWMESEFRVYSSANNCTFEYVSQPFLMDLEGKQGNFKNLREFVFKNIDGYFKIYSKHTPINLVRDLPQGFSALEPLVDLPIGINITRFQTLLALHRSYLTPGDSSSGWTAGAAAYYVGYLQPRTFLLKYNENGTITDAVDCALDPLSETKCTLKSFTVEKGIYQTSNFRVQPTESIVRFPNITNLCPFGEVFNATRFASVYAWNRKRISNCVADYSVLYNSASFSTFKCYGVSPTKLNDLCFTNVYADSFVIRGDEVRQIAPGQTGKIADYNYKLPDDFTGCVIAWNSNNLDSKVGGNYNYLYRLFRRSNLKPFERDISTEIYQAGSTPCNGVEGFNCYFPLQSYGFQPTNGVGYQPYRVVVLSFELLPAPATVCGPKKSTNLVKNKCVNFNFNGLTGTGVLTESNKKFLPFQQFGRDIADTTDAVRDPQTLEILDITPCSFGGVSVITPGTNTSNQVAVLYQGVNCTEVPVAIHADQLTPTWRVYSTGSNVFQTRAGCLIGAEHVNNSYECDIPIGAGICASYQTQTNSPRRARSVASQSIIAYTMSLGAENSVAYSNNSIAIPTNFTISVTTEILPVSMTKTSVDCTMYICGDSTECSNLLLQYGSFCTQLNRALTGIAVEQDKNTQEVFAQVKQIYKTPPIKDFGGFNFSQILPDPSKPSKRSFIEDLLFNKVTLADAGFIKQYGDCLGDIAARDLICAQKFNGLTVLPPLLTDEMIAQYTSALLAGTITSGWTFGAGAALQIPFAMQMAYRFNGIGVTQCVLYENQKLIANQFNSAIGKIQDSLSSAAPALGKLQDVVNQNAQALNTLVKQLSSNFGAISSVLNDILSRLDKVEAEVQIDRLITGRLQSLQTYVTQQLIRAAEIRASANLAATKMSECVLGQSKRVDFCGKGYHLMSFPQSAPHGVVFLHVTYVPAQEKNFTTAPAICHDGKAHFPREGVFVSNGTHWFVTQRNFYEPQIITTDNTFVCGNCDVVIGIVNNTVYDPLQPELDSFKEELDKYFKNHTSPDVDLGDISGINASVVNIQKEIDRLNEVAKNLNESLIDLQELGKYEQYIKGGGSGGGQIYEGKLTAEGLRFGIVASRFNHALVDRLVEGAIDAIVRHGGREEDITLVRVPGSWEIPVAAGELARKEDIDAVIAIGVLIRGATPHFDYIASEVSKGLADLSLELRKPITFGVITADTLEQAIERAGTKHGNKGWEAALSAIEMANLFKSLR

SEQ ID NO: 13611 - protein, 1371 aa, Artificial Sequence
  SARS-CoV-2/USA/WA8-UW5/2020__EPI_ISL_413486 spike protein (1-1211)(N914C_S1123C) LumSynth construct
MFVFLVLLPLVSSQCVNLTTRTQLPPAYTNSFTRGVYYPDKVFRSSVLHSTQDLFLPFFSNVTWFHAIHVSGTNGTKRFDNPVLPFNDGVYFASTEKSNIIRGWIFGTTLDSKTQSLLIVNNATNVVIKVCEFQFCNDPFLGVYYHKNNKSWMESEFRVYSSANNCTFEYVSQPFLMDLEGKQGNFKNLREFVFKNIDGYFKIYSKHTPINLVRDLPQGFSALEPLVDLPIGINITRFQTLLALHRSYLTPGDSSSGWTAGAAAYYVGYLQPRTFLLKYNENGTITDAVDCALDPLSETKCTLKSFTVEKGIYQTSNFRVQPTESIVRFPNITNLCPFGEVFNATRFASVYAWNRKRISNCVADYSVLYNSASFSTFKCYGVSPTKLNDLCFTNVYADSFVIRGDEVRQIAPGQTGKIADYNYKLPDDFTGCVIAWNSNNLDSKVGGNYNYLYRLFRKSNLKPFERDISTEIYQAGSTPCNGVEGFNCYFPLQSYGFQPTNGVGYQPYRVVVLSFELLHAPATVCGPKKSTNLVKNKCVNFNFNGLTGTGVLTESNKKFLPFQQFGRDIADTTDAVRDPQTLEILDITPCSFGGVSVITPGTNTSNQVAVLYQDVNCTEVPVAIHADQLTPTWRVYSTGSNVFQTRAGCLIGAEYVNNSYECDIPIGAGICASYQTQTNSPRRARSVASQSIIAYTMSLGAENSVAYSNNSIAIPTNFTISVTTEILPVSMTKTSVDCTMYICGDSTECSNLLLQYGSFCTQLNRALTGIAVEQDKNTQEVFAQVKQIYKTPPIKDFGGFNFSQILPDPSKPSKRSFIEDLLFNKVTLADAGFIKQYGDCLGDIAARDLICAQKFNGLTVLPPLLTDEMIAQYTSALLAGTITSGWTFGAGAALQIPFAMQMAYRFNGIGVTQCVLYENQKLIANQFNSAIGKIQDSLSSTASALGKLQDVVNQNAQALNTLVKQLSSNFGAISSVLNDILSRLDKVEAEVQIDRLITGRLQSLQTYVTQQLIRAAEIRASANLAATKMSECVLGQSKRVDFCGKGYHLMSFPQSAPHGVVFLHVTYVPAQEKNFTTAPAICHDGKAHFPREGVFVSNGTHWFVTQRNFYEPQIITTDNTFVCGNCDVVIGIVNNTVYDPLQPELDSFKEELDKYFKNHTSPDVDLGDISGINASVVNIQKEIDRLNEVAKNLNESLIDLQELGKYEQYIKGGGSGGGQIYEGKLTAEGLRFGIVASRFNHALVDRLVEGAIDAIVRHGGREEDITLVRVPGSWEIPVAAGELARKEDIDAVIAIGVLIRGATPHFDYIASEVSKGLADLSLELRKPITFGVITADTLEQAIERAGTKHGNKGWEAALSAIEMANLFKSLR

SEQ ID NO: 13612 - protein, 1371 aa, Artificial Sequence
  SARS-CoV-2/England/20102000506/2020__EPI_ISL_415147 spike protein (1-1211)(N914C_S1123C) LumSynth construct
MFVFLVLLPLVSSQCVNLTTRTQLPPAYTNSFTRGVYYPDKVFRSSVLHSTQDLFLPFFSNVTWFHAIHVSGTNGTKRFDNPVLPFNDGVYFASTEKSNIIRGWIFGTTLDSKTQSLLIVNNATNVVIKVCEFQFCNDPFLGVYYHKNNKSWMESEFRVYSSANNCTFEYVSQPFLMDLEGKQGNFKNLREFVFKNIDGYFKIYSKHTPINLVRDLPQGFSALEPLVDLPIGINITRFQTLLALHRSYLTPGDSSSGWTAGAAAYYVGYLQPRTFLLKYNENGTITDAVDCALDPLSETKCTLKSFTVEKGIYQTSNFRVQPTESIVRFPNITNLCPFGEVFNATRFASVYAWNRKRISNCVADYSVLYNSASFSTFKCYGVSPTKLNDLCFTNVYADSFVIRGDEVRQIAPGQTGKIADYNYKLPDDFTGCVIAWNSNNLDSKVGGNYNYLYRLFRKSNLKPFERDISTEIYQAGSTPCNGVEGFNCYFPLQSYGFQPTNGVGYQPYRVVVLSFELLHAPATVCGPKKSTNLVKNKCVNFNFNGLTGTGVLTESNKKFLPFQQFGRDIADTTDAVRDPQTLEILDITPCSFGGVSVITPGTNTSNQVAVLYQGVNCTEVPVAIHADQLTPTWRVYSTGSNVFQTRAGCLIGAEHVNNSYECDIPIGAGICASYQTQTNSPRRARSVASQSIIAYTMSLGAENSVAYSNNSIAIPTNFTISVTTEILPVSMTKTSVDCTMYICGDSTECSNLLLQYGSFCTQLNRALTGIAVEQDKNTQEVFAQVKQIYKTPPIKDFGGFNFSQILPDPSKPSKRSFIEDLLFNKVTLADAGFIKQYGYCLGDIAARDLICAQKFNGLTVLPPLLTDEMIAQYTSALLAGTITSGWTFGAGAALQIPFAMQMAYRFNGIGVTQCVLYENQKLIANQFNSAIGKIQDSLSSTASALGKLQDVVNQNAQALNTLVKQLSSNFGAISSVLNDILSRLDKVEAEVQIDRLITGRLQSLQTYVTQQLIRAAEIRASANLAATKMSECVLGQSKRVDFCGKGYHLMSFPQSAPHGVVFLHVTYVPAQEKNFTTAPAICHDGKAHFPREGVFVSNGTHWFVTQRNFYEPQIITTDNTFVCGNCDVVIGIVNNTVYDPLQPELDSFKEELDKYFKNHTSPDVDLGDISGINASVVNIQKEIDRLNEVAKNLNESLIDLQELGKYEQYIKGGGSGGGQIYEGKLTAEGLRFGIVASRFNHALVDRLVEGAIDAIVRHGGREEDITLVRVPGSWEIPVAAGELARKEDIDAVIAIGVLIRGATPHFDYIASEVSKGLADLSLELRKPITFGVITADTLEQAIERAGTKHGNKGWEAALSAIEMANLFKSLR

SEQ ID NO: 13613 - protein, 1371 aa, Artificial Sequence
  SARS-CoV-2/Belgium/VAG-03013/2020__EPI_ISL_415155 spike protein (1-1211)(N914C_S1123C) LumSynth construct
MFVFLVLLPLVSSQCVNLTTRTQLPPAYTNSFTRGVYYPDKVFRSSVLHSTQDLFLPFFSNVTWFHAIHVSGTNGTKRFDNPVLPFNDGVYFASTEKSNIIRGWIFGTTLDSKTQSLLIVNNATNVVIKVCEFQFCNDPFLGVYYHKNNKSWMESEFRVYSSANNCTFEYVSQPFLMDLEGKQGNFKNLREFVFKNIDGYFKIYSKHTPINLVRDLPQGFSALEPLVDLPIGINITRFQTLLALHRSYLTPGDSSSGWTAGAAAYYVGYLQPRTFLLKYNENGTITDAVDCALDPLSETKCTLKSFTVEKGIYQTSNFRVQPTESIVRFPNITNLCPFGEVFNATRFASVYAWNRKRISNCVADYSVLYNSASFSTFKCYGVSPTKLNDLCFTNVYADSFVIRGDEVRQIAPGQTGKIADYNYKLPDDFTGCVIAWNSNNLDSKVGGNYNYLYRLFRKSNLKPFERDISTEIYQAGSTPCNGVEGFNCYFPLQSYGFQPTNGVGYQPYRVVVLSFELLHAPATVCGPKKSTNLVKNKCVNFNFNGLTGTGVLTESNKKFLPFQQFGRDIADTTDAVRDPQTLEILDITPCSFGGVSVITPGTNTSNQVAVLYQGVNCTEVPVAIHADQLTPTWRVYSTGSNVFQTRAGCLIGAEHVNNSYECDIPIGAGICASYQTQTNSPRRARSVASQSIIAYTMSLGAENSVAYSNNSIAIPTNFTISVTTEILPVSMTKTSVDCTMYICGDSTECSNLLLQYGSFCTQLNRALTGIAVEQDKNTQEVFAQVKQIYKTPPIKDFGGFNFSQILPDPSKPSKRSFIEDLLFNKVTLADAGFIKQYGDCLGDIAARDLICAQKFNGLTVLPPLLTDEMIAQYTSALLAGTITSGWTFGAGAALQIPFAMQMAYRFNGIGVTQCVLYENQKLIANQFNSAIGKIQDSLSSTATALGKLQDVVNQNAQALNTLVKQLSSNFGAISSVLNDILSRLDKVEAEVQIDRLITGRLQSLQTYVTQQLIRAAEIRASANLAATKMSECVLGQSKRVDFCGKGYHLMSFPQSAPHGVVFLHVTYVPAQEKNFTTAPAICHDGKAHFPREGVFVSNGTHWFVTQRNFYEPQIITTDNTFVCGNCDVVIGIVNNTVYDPLQPELDSFKEELDKYFKNHTSPDVDLGDISGINASVVNIQKEIDRLNEVAKNLNESLIDLQELGKYEQYIKGGGSGGGQIYEGKLTAEGLRFGIVASRFNHALVDRLVEGAIDAIVRHGGREEDITLVRVPGSWEIPVAAGELARKEDIDAVIAIGVLIRGATPHFDYIASEVSKGLADLSLELRKPITFGVITADTLEQAIERAGTKHGNKGWEAALSAIEMANLFKSLR

SEQ ID NO: 13614 - protein, 1371 aa, Artificial Sequence
  SARS-CoV-2/Belgium/BC-03016/2020__EPI_ISL_415157 spike protein (1-1211)(N914C_S1123C) LumSynth construct
MFVFLVLLPLVSSQCVNLTTRTQLPPAYTNSFTRGVYYPDKVFRSSVLHSTQDLFLPFFSNVTWFHAIHVSGTNGTKRFDNPVLPFNDGVYFASTEKSNIIRGWIFGTTLDSKTQSLLIVNNATNVVIKVCEFQFCNDPFLGVYYHKNNKSWMESEFRVYSSANNCTFEYVSQPFLMDLEGKQGNFKNLREFVFKNIDGYFKIYSKHTPINLVRDLPQGFSALEPLVDLPIGINITRFQTLLALHRSYLTPGDSSSGWTAGAAAYYVGYLQPRTFLLKYNENGTITDAVDCALDPLSETKCTLKSFTVEKGIYQTSNFRVQPTESIVRFPNITNLCPFGEVFNATRFASVYAWNRKRISNCVADYSVLYNSASFSTFKCYGVSPTKLNDLCFTNVYADSFVIRGDEVRQIAPGQTGKIADYNYKLPDDFTGCVIAWNSNNLDSKVGGNYNYLYRLFRKSNLKPFERDISTEIYQAGSTPCNGVEGFNCYFPLQSYGFQPTNGVGYQPYRVVVLSFELLHAPATVCGPKKSTNLVKNKCVNFNFNGLTGTGVLTESNKKFLPFQQFGRDIADTTDAVRDPQTLEILDITPCSFGGVSVITPGTNTSNQVAVLYQGVNCTEVPVAIHADQLTPTWRVYSTGSNVFQTRAGCLIGAEHVNNSYECDIPIGAGICASYQTQTNSPRRARSVASQSIIAYTMSLGAENSVAYSNNSIAIPTNFTISVTTEILPVSMTKTSVDCTMYICGDSTECSNLLLQYGSFCTQLNRALTGIAVEQDKNTQEVFAQVKQIYKTPPIKDFGGFNFSQILPDPSKPSKRSFIEDLLFNKVTLADAGFIKQYGDCLGDIAARDLICAQKFNGLTVLPPLLTDEMIAQYTSALLAGTITSGWTFGAGAALQIPFAMQMAYRFNGIGVTQCVLYENQKLIANQFNSAIGKIQDSLSSTAPALGKLQDVVNQNAQALNTLVKQLSSNFGAISSVLNDILSRLDKVEAEVQIDRLITGRLQSLQTYVTQQLIRAAEIRASANLAATKMSECVLGQSKRVDFCGKGYHLMSFPQSAPHGVVFLHVTYVPAQEKNFTTAPAICHDGKAHFPREGVFVSNGTHWFVTQRNFYEPQIITTDNTFVCGNCDVVIGIVNNTVYDPLQPELDSFKEELDKYFKNHTSPDVDLGDISGINASVVNIQKEIDRLNEVAKNLNESLIDLQELGKYEQYIKGGGSGGGQIYEGKLTAEGLRFGIVASRFNHALVDRLVEGAIDAIVRHGGREEDITLVRVPGSWEIPVAAGELARKEDIDAVIAIGVLIRGATPHFDYIASEVSKGLADLSLELRKPITFGVITADTLEQAIERAGTKHGNKGWEAALSAIEMANLFKSLR

SEQ ID NO: 13615 - protein, 1371 aa, Artificial Sequence
  SARS-CoV-2/Germany/BavPat3/2020__EPI_ISL_414521 spike protein (1-1211)(N914C_S1123C) LumSynth construct
MFVFLVLLPLVSSQCVNLTTRTQLPPAYTNSFTRGVYYPDKVFRSSVLHSTQDLFLPFFSNVTWFHAIHVSGTNGTKRFDNPVLPFNDGVYFASTEKSNIIRGWIFGTTLDSKTQSLLIVNNATNVVIKVCEFQFCNDPFLGVYYHKNNKSWMESEFRVYSSANNCTFEYVSQPFLMDLEGKQGNFKNLREFVFKNIDGYFKIYSKHTPINLVRDLPQGFSALEPLVDLPIGINITRFQTLLALHRSYLTPGDSSSGWTAGAAAYYVGYLQPRTFLLKYNENGTITDAVDCALDPLSETKCTLKSFTVEKGIYQTSNFRVQPTESIVRFPNITNLCPFGEVFNATRFASVYAWNRKRISNCVADYSVLYNSASFSTFKCYGVSPTKLNDLCFTNVYADSFVIRGDEVRQIAPGQTGKIADYNYKLPDDFTGCVIAWNSNNLDSKVGGNYNYLYRLFRKSNLKPFERDISTEIYQAGSTPCNGVEGFNCYFPLQSYGFQPTNGVGYQPYRVVVLSFELLHAPATVCGPKKSTNLVKNKCVNFNFNGLTGTGVLTESNKKFLPFQQFGRDIADTTDAVRDPQTLEILDITPCSFGGVSVITPGTNTSNQVAVLYQDVNCTEVPVAIHADQLTPTWRVYSTGSNVFQTRAGCLIGAEHVNNSYECDIPIGAGICASYQTQTNSPRRARSVASQSIIAYTMSLGAENSVAYSNNSIAIPTNFTISVTTEILPVSMTKTSVDCTMYICGDSTECSNLLLQYGSFCTQLNRALTGIAVEQDKNTQQVFAQVKQIYKTPPIKDFGGFNFSQILPDPSKPSKRSFIEDLLFNKVTLADAGFIKQYGDCLGDIAARDLICAQKFNGLTVLPPLLTDEMIAQYTSALLAGTITSGWTFGAGAALQIPFAMQMAYRFNGIGVTQCVLYENQKLIANQFNSAIGKIQDSLSSTASALGKLQDVVNQNAQALNTLVKQLSSNFGAISSVLNDILSRLDKVEAEVQIDRLITGRLQSLQTYVTQQLIRAAEIRASANLAATKMSECVLGQSKRVDFCGKGYHLMSFPQSAPHGVVFLHVTYVPAQEKNFTTAPAICHDGKAHFPREGVFVSNGTHWFVTQRNFYEPQIITTDNTFVCGNCDVVIGIVNNTVYDPLQPELDSFKEELDKYFKNHTSPDVDLGDISGINASVVNIQKEIDRLNEVAKNLNESLIDLQELGKYEQYIKGGGSGGGQIYEGKLTAEGLRFGIVASRFNHALVDRLVEGAIDAIVRHGGREEDITLVRVPGSWEIPVAAGELARKEDIDAVIAIGVLIRGATPHFDYIASEVSKGLADLSLELRKPITFGVITADTLEQAIERAGTKHGNKGWEAALSAIEMANLFKSLR

SEQ ID NO: 13616 - protein, 1371 aa, Artificial Sequence
  SARS-CoV-2/France/HF1805/2020__EPI_ISL_414628 spike protein (1-1211)(N914C_S1123C) LumSynth construct
MFVFLVLLPLVSSQCVNLTTRTQLPPAYTNSFTRGVYYPDKVFRSSVLHSTQDLFLPFFSNVTWFHAIHVSGTNGTKRFDNPVLPFNDGVYFASTEKSNIIRGWIFGTTLDSKTQSLLIVNNATNVVIKVCEFQFCNDPFLGVYYHKNNKSWMESEFRVYSSANNCTFEYVSQPFLMDLEGKQGNFKNLREFVFKNIDGYFKIYSKHTPINLVRDLPQGFSALEPLVDLPIGINITRFQTLLALHRSYLTPGDSSSGWTAGAAAYYVGYLQPRTFLLKYNENGTITDAVDCALDPLSETKCTLKSFTVEKGIYQTSNFRVQPTESIVRFPNITNLCPFGEVFNATRFASVYAWNRKRISNCVADYSVLYNSASFSTFKCYGVSPTKLNDLCFTNVYADSFVIRGDEVRQIAPGQTGKIADYNYKLPDDFTGCVIAWNSNNLDSKVGGNYNYLYRLFRKSNLKPFERDISTEIYQAGSTPCNGVEGFNCYFPLQSYGFQPTNGVGYQPYRVVVLSFELLHAPATVCGPKKSTNLVKNKCVNFNFNGLTGTGVLTESNKKFLPFQQFGRDIADTTDAVRDPQTLEILDITPCSFGGVSVITPGTNTSNQVAVLYQGVNCTEVPVAIHADQLTPTWRVYSTGSNVFQTRAGCLIGAEHVNNSYECDIPIGAGICASYQTQTNSPRRARSVASQSIIAYTMSLGAENSVAYSNNSIAIPTNFTISVTTEILPVSMTKTSVDCTMYICGDSTECSNLLLQYGSFCTQLNRALTGIAVEQDKNTQEVFAQVKQIYKTPPIKDFGGFNFSQILPDPSKPSKRSFIEDLLFNKVTLADAGFIKQYGDCLGDIAARDLICAQKFNGLTVLPPLLTDEMIAQYTSALLAGTITSGWTFGAGAALQIPFAMQMAYRFNGIGVTQCVLYENQKLIANQFNSAIGKIQDSLSSTASALGKLQDVVNQNAQALNTLVKQLSSNFGAISSVLNDILSRLDKVEAEVQIDRLITGRLQSLQTYVTQQLIRAAEIRASANLAATKMSECVLGQSKRVDFCGKGYHLMSFPQSAPHGVVFLHVTYVPAQEKNFTTAPAICHDGKAHFPREGVFVSNGTHWFVTQRNFYEPQIITTDNTFVCGNCDVVIGVVNNTVYDPLQPELDSFKEELDKYFKNHTSPDVDLGDISGINASVVNIQKEIDRLNEVAKNLNESLIDLQELGKYEQYIKGGGSGGGQIYEGKLTAEGLRFGIVASRFNHALVDRLVEGAIDAIVRHGGREEDITLVRVPGSWEIPVAAGELARKEDIDAVIAIGVLIRGATPHFDYIASEVSKGLADLSLELRKPITFGVITADTLEQAIERAGTKHGNKGWEAALSAIEMANLFKSLR

SEQ ID NO: 13617 - protein, 1371 aa, Artificial Sequence
  SARS-CoV-2/Netherlands/ZuidHolland_9/2020__EPI_ISL_414445 spike protein (1-1211)(N914C_S1123C) LumSynth construct
MFVFLVLLPLVSSQCVNLTTRTQLPPAYTNSFTRGVYYPDKVFRSSVLHSTQDLFLPFFSNVTWFHAIHVSGTNGTKRFDNPVLPFNDGVYFASTEKSNIIRGWIFGTTLDSKTQSLLIVNNATNVVIKVCEFQFCNDPFLGVYYHKNNKSWMESEFRVYSSANNCTFEYVSQPFLMDLEGKQGNFKNLREFVFKNIDGYFKIYSKHTPINLVRDLPQGFSALEPLVDLPIGINITRFQTLLALHRSYLTPGDSSSGWTAGAAAYYVGYLQPRTFLLKYNENGTITDAVDCALDPLSETKCTLKSFTVEKGIYQTSNFRVQPTESIVRFPNITNLCPFGEVFNATRFASVYAWNRKRISNCVADYSVLYNSASFSTFKCYGVSPTKLNDLCFTNVYADSFVIRGDEVRQIAPGQTGKIADYNYKLPDDFTGCVIAWNSNNLDSKVGGNYNYLYRLFRKSNLKPFERDISTEIYQAGSTPCNGVEGFNCYFPLQSYGFQPTNGVGYQPYRVVVLSFELLHAPATVCGPKKSTNLVKNKCVNFNFNGLTGTGVLTESNKKFLPFQQFGRDIADTTDAVRDPQTLEILDITPCSFGGVSVITPGTNTSNQVAVLYQGVNCTEVPVAIHADQLTPTWRVYSTGSNVFQTRAGCLIGAEHVNNSYECDIPIGAGICASYQTQTNSPRRARSVASQSIIAYTMSLGAENSVAYSNNSIAIPTNFTISVTTEILPVSMTKTSVDCTMYICGDSTECSNLLLQYGSFCTQLNRALTGIAVEQDKNTQEVFAQVKQIYKTPPIKDFGGFNFSQILPDPSKPSKRSFIEDLLFNKVTLADAGFIKQYGDCLGDIAARDLICVQKFNGLTVLPPLLTDEMIAQYTSALLAGTITSGWTFGAGAALQIPFAMQMAYRFNGIGVTQCVLYENQKLIANQFNSAIGKIQDSLSSTASALGKLQDVVNQNAQALNTLVKQLSSNFGAISSVLNDILSRLDKVEAEVQIDRLITGRLQSLQTYVTQQLIRAAEIRASANLAATKMSECVLGQSKRVDFCGKGYHLMSFPQSAPHGVVFLHVTYVPAQEKNFTTAPAICHDGKAHFPREGVFVSNGTHWFVTQRNFYEPQIITTDNTFVCGNCDVVIGIVNNTVYDPLQPELDSFKEELDKYFKNHTSPDVDLGDISGINASVVNIQKEIDRLNEVAKNLNESLIDLQELGKYEQYIKGGGSGGGQIYEGKLTAEGLRFGIVASRFNHALVDRLVEGAIDAIVRHGGREEDITLVRVPGSWEIPVAAGELARKEDIDAVIAIGVLIRGATPHFDYIASEVSKGLADLSLELRKPITFGVITADTLEQAIERAGTKHGNKGWEAALSAIEMANLFKSLR

SEQ ID NO: 13618 - protein, 1371 aa, Artificial Sequence
  SARS-CoV-2/Finland/FIN03032020A/2020__EPI_ISL_413602 spike protein (1-1211)(N914C_S1123C) LumSynth construct
MFVFLVLLPLVSSQCVNLTTRTQLPPAYTNSFTRGVYYPDKVFRSSVLHSTQDLFLPFFSNVTWFHAIHVSGTNGTKRFDNPVLPFNDGVYFASTEKSNIIRGWIFGTTLDSKTQSLLIVNNATNVVIKVCEFQFCNDPFLGVYYHKNNKSWMESEFRVYSSANNCTFEYVSQPFLMDLEGKQGNFKNLREFVFKNIDGYFKIYSKHTPINLVRDLPQGFSALEPLVDLPIGINITRFQTLLALHRSYLTPGDSSSGWTAGAAAYYVGYLQPRTFLLKYNENGTITDAVDCALDPLSETKCTLKSFTVEKGIYQTSNFRVQPTESIVRFPNITNLCPFGEVFNATRFASVYAWNRKRISNCVADYSVLYNSASFSTFKCYGVSPTKLNDLCFTNVYADSFVIRGDEVRQIAPGQTGKIADYNYKLPDDFTGCVISWNSNNLDSKVGGNYNYLYRLFRKSNLKPFERDISTEIYQAGSTPCNGVEGFNCYFPLQSYGFQPTNGVGYQPYRVVVLSFELLHAPATVCGPKKSTNLVKNKCVNFNFNGLTGTGVLTESNKKFLPFQQFGRDIADTTDAVRDPQTLEILDITPCSFGGVSVITPGTNTSNQVAVLYQGVNCTEVPVAIHADQLTPTWRVYSTGSNVFQTRAGCLIGAEHVNNSYECDIPIGAGICASYQTQTNSPRRARSVASQSIIAYTMSLGAENSVAYSNNSIAIPTNFTISVTTEILPVSMTKTSVDCTMYICGDSTECSNLLLQYGSFCTQLNRALTGIAVEQDKNTQEVFAQVKQIYKTPPIKDFGGFNFSQILPDPSKPSKRSFIEDLLFNKVTLADAGFIKQYGDCLGDIAARDLICAQKFNGLTVLPPLLTDEMIAQYTSALLAGTITSGWTFGAGAALQIPFAMQMAYRFNGIGVTQCVLYENQKLIANQFNSAIGKIQDSLSSTASALGKLQDVVNQNAQALNTLVKQLSSNFGAISSVLNDILSRLDKVEAEVQIDRLITGRLQSLQTYVTQQLIRAAEIRASANLAATKMSECVLGQSKRVDFCGKGYHLMSFPQSAPHGVVFLHVTYVPAQEKNFTTAPAICHDGKAHFPREGVFVSNGTHWFVTQRNFYEPQIITTDNTFVCGNCDVVIGIVNNTVYDPLQPELDSFKEELDKYFKNHTSPDVDLGDISGINASVVNIQKEIDRLNEVAKNLNESLIDLQELGKYEQYIKGGGSGGGQIYEGKLTAEGLRFGIVASRFNHALVDRLVEGAIDAIVRHGGREEDITLVRVPGSWEIPVAAGELARKEDIDAVIAIGVLIRGATPHFDYIASEVSKGLADLSLELRKPITFGVITADTLEQAIERAGTKHGNKGWEAALSAIEMANLFKSLR

SEQ ID NO: 13619 - protein, 1371 aa, Artificial Sequence
  SARS-CoV-2/France/GE1977/2020__EPI_ISL_414632 spike protein (1-1211)(N914C_S1123C) LumSynth construct
MFVFLVLLPLVSSQCVNLTTRTQLPPAYTNSFTRGVYYPDKVFRSSVLHSTQDLFLPFFSNVTWFHAIHVSGTNGTKRFDNPVLPFNDGVYFASTEKSNIIRGWIFGTTLDSKTQSLLIVNNATNVVIKVCEFQFCNDPFLGVYYHKNNKSWMESEFRVYSSANNCTFEYVSQPFLMDLEGKQGNFKNLREFVFKNIDGYFKIYSKHTPINLVRDLPQGFSALEPLVDLPIGINITRFQTLLALHRSYLTPGDSSSGWTAGAAAYYVGYLQPRTFLLKYNENGTITDAVDCALDPLSETKCTLKSFTVEKGIYQTSNFRVQPTESIVRFPNITNLCPFGEVFNATRFASVYAWNRKRISNCVADYSVLYNSASFSTFKCYGVSPTKLNDLCFTNVYADSFVIRGDEVRQIAPGQTGKIADYNYKLPDDFTGCVIAWNSNNLDSKVGGNYNYLYRLFRKSNLKPFERDISTEIYQAGSTPCNGVEGFNCYFPLQSYGFQPTNGVGYQPYRVVVLSFELLHAPATVCGPKKSTNLVKNKCVNFNFNGLTGTGVLTESNKKFLPFQQFGRDIADTTDAVRDPQTLEILDITPCSFGGVSVITPGTNTSNQVAVLYQGVNCTEVPVAIHADQLTPTWRVYSTGSNVFQTRAGCLIGAEHVNNSYECDIPIGAGICASYQTQTNSPRRARSVASQSIIAYTMSLGAENSVAYSNNSIAIPTNFTISVTTEILPVSMTKTSVDCTMYICGDSTECSNLLLQYGSFCTQLNRALTGIAVEQDKNTQEVFAQVKQIYKTPPIKDFGGFNFSQILPDPSKPSKRSFIEDLLFNKVTLADAGFIKQYGDCLGDIAARDLICAQKFNGLTVLPPLLTDEMIAQYTSALLAGTITSGWTFGAGAALQIPFAMQMAYRFNGIGVTQCVLYENQKLIANQFNSAIGKIQDSLFSTASALGKLQDVVNQNAQALNTLVKQLSSNFGAISSVLNDILSRLDKVEAEVQIDRLITGRLQSLQTYVTQQLIRAAEIRASANLAATKMSECVLGQSKRVDFCGKGYHLMSFPQSAPHGVVFLHVTYVPAQEKNFTTAPAICHDGKAHFPREGVFVSNGTHWFVTQRNFYEPQIITTDNTFVCGNCDVVIGIVNNTVYDPLQPELDSFKEELDKYFKNHTSPDVDLGDISGINASVVNIQKEIDRLNEVAKNLNESLIDLQELGKYEQYIKGGGSGGGQIYEGKLTAEGLRFGIVASRFNHALVDRLVEGAIDAIVRHGGREEDITLVRVPGSWEIPVAAGELARKEDIDAVIAIGVLIRGATPHFDYIASEVSKGLADLSLELRKPITFGVITADTLEQAIERAGTKHGNKGWEAALSAIEMANLFKSLR

SEQ ID NO: 13620 - protein, 1371 aa, Artificial Sequence
  SARS-CoV-2/Finland/FIN-313/2020__EPI_ISL_414641 spike protein (1-1211)(N914C_S1123C) LumSynth construct
MFVFLVLLPLVSSQCVNLTTRTQLPPAYTNSFTRGVYYPDKVFRSSVLHSTQDLFLPFFSNVTWFHAIHVSGTNGTKRFDNPVLPFNDGVYFASTEKSNIIRGWIFGTTLDSKTQSLLIVNNATNVVIKVCEFQFCNDPFLGVYYHKNNKSWMESEFRVYSSANNCTFEYVSQPFLMDLEGKQGNFKNLREFVFKNIDGYFKIYSKHTPINLVRDLPQGFSALEPLVDLPIGINITRFKTLLALHRSYLTPGDSSSGWTAGAAAYYVGYLQPRTFLLKYNENGTITDAVDCALDPLSETKCTLKSFTVEKGIYQTSNFRVQPTESIVRFPNITNLCPFGEVFNATRFASVYAWNRKRISNCVADYSVLYNSASFSTFKCYGVSPTKLNDLCFTNVYADSFVIRGDEVRQIAPGQTGKIADYNYKLPDDFTGCVIAWNSNNLDSKVGGNYNYLYRLFRKSNLKPFERDISTEIYQAGSTPCNGVEGFNCYFPLQSYGFQPTNGVGYQPYRVVVLSFELLHAPATVCGPKKSTNLVKNKCVNFNFNGLTGTGVLTESNKKFLPFQQFGRDIADTTDAVRDPQTLEILDITPCSFGGVSVITPGTNTSNQVAVLYQGVNCTEVPVAIHADQLTPTWRVYSTGSNVFQTRAGCLIGAEHVNNSYECDIPIGAGICASYQTQTNSPRRARSVASQSIIAYTMSLGAENSVAYSNNSIAIPTNFTISVTTEILPVSMTKTSVDCTMYICGDSTECSNLLLQYGSFCTQLNRALTGIAVEQDKNTQEVFAQVKQIYKTPPIKDFGGFNFSQILPDPSKPSKRSFIEDLLFNKVTLADAGFIKQYGDCLGDIAARDLICAQKFNGLTVLPPLLTDEMIAQYTSALLAGTITSGWTFGAGAALQIPFAMQMAYRFNGIGVTQCVLYENQKLIANQFNSAIGKIQDSLSSTASALGKLQDVVNQNAQALNTLVKQLSSNFGAISSVLNDILSRLDKVEAEVQIDRLITGRLQSLQTYVTQQLIRAAEIRASANLAATKMSECVLGQSKRVDFCGKGYHLMSFPQSAPHGVVFLHVTYVPAQEKNFTTAPAICHDGKAHFPREGVFVSNGTHWFVTQRNFYEPQIITTDNTFVCGNCDVVIGIVNNTVYDPLQPELDSFKEELDKYFKNHTSPDVDLGDISGINASVVNIQKEIDRLNEVAKNLNESLIDLQELGKYEQYIKGGGSGGGQIYEGKLTAEGLRFGIVASRFNHALVDRLVEGAIDAIVRHGGREEDITLVRVPGSWEIPVAAGELARKEDIDAVIAIGVLIRGATPHFDYIASEVSKGLADLSLELRKPITFGVITADTLEQAIERAGTKHGNKGWEAALSAIEMANLFKSLR

SEQ ID NO: 13621 - protein, 1371 aa, Artificial Sequence
  SARS-CoV-2/Netherlands/ZuidHolland_2/2020__EPI_ISL_414556 spike protein (1-1211)(N914C_S1123C) LumSynth construct
MFVFLVLLPLVSSQCVNLTTRTQLPPAYTNSFTRGVYYPDKVFRSSVLHSTQDLFLPFFSNVTWFHAIHVSGTNGTKRFDNPVLPFNDGVYFASTEKSNIIRGWIFGTTLDSKTQSLLIVNNATNVVIKVCEFQFCNDPFLGVYYHKNNKSWMESEFRVYSSANNCTFEYVSQPFLMDLEGKQGNFKNLREFVFKNIDGYFKIYSKHTPINLVRDLPQGFSALEPLVDLPIGINITRFQTLLALHRSYLTPGDSSSGWTAGAAAYYVGYLQPRTFLLKYNENGTITDAVDCALDPLSETKCTLKSFTVEKGIYQTSNFRVQPTESIVRFPNITNLCPFGEVFNATRFASVYAWNRKRISNCVADYSVLYNSASFSTFKCYGVSPTKLNDLCFTNVYADSFVIRGDEVRQIAPGQTGKIADYNYKLPDDFTGCVIAWNSNNLDSKVGGNYNYLYRLFRKSNLKPFERDISTEIYQAGSTPCNGVEGFNCYFPLQSYGFQPTNGVGYQPYRVVVLSFELLHAPATVCGPKKSTNLVKNKCVNFNFNGLTGTGVLTESNKKFLPFQQFGRDIADTTDAVRDPQTLEILDITPCSFGGVSVITPGTNTSNQVAVLYQGVNCTEVPVAIHADQLTPTWRVYSTGSNVFQTRAGCLIGAEHVNNSYECDIPIGAGICASYQTQTNSPRRARSVASQSIIAYTMSLGAENSVAYSNNSIAIPTNFTISVTTEILPVSMTKTSVDCTMYICGDSTECSNLLLQYGSFCTQLNRALTGIALEQDKNTQEVFAQVKQIYKTPPIKDFGGFNFSQILPDPSKPSKRSFIEDLLFNKVTLADAGFIKQYGDCLGDIAARDLICAQKFNGLTVLPPLLTDEMIAQYTSALLAGTITSGWTFGAGAALQIPFAMQMAYRFNGIGVTQCVLYENQKLIANQFNSAIGKIQDSLSSTASALGKLQDVVNQNAQALNTLVKQLSSNFGAISSVLNDILSRLDKVEAEVQIDRLITGRLQSLQTYVTQQLIRAAEIRASANLAATKMSECVLGQSKRVDFCGKGYHLMSFPQSAPHGVVFLHVTYVPAQEKNFTTAPAICHDGKAHFPREGVFVSNGTHWFVTQRNFYEPQIITTDNTFVCGNCDVVIGIVNNTVYDPLQPELDSFKEELDKYFKNHTSPDVDLGDISGINASVVNIQKEIDRLNEVAKNLNESLIDLQELGKYEQYIKGGGSGGGQIYEGKLTAEGLRFGIVASRFNHALVDRLVEGAIDAIVRHGGREEDITLVRVPGSWEIPVAAGELARKEDIDAVIAIGVLIRGATPHFDYIASEVSKGLADLSLELRKPITFGVITADTLEQAIERAGTKHGNKGWEAALSAIEMANLFKSLR

SEQ ID NO: 13622 - protein, 1371 aa, Artificial Sequence
  SARS-CoV-2/USA/WA-UW31/2020__EPI_ISL_414618 spike protein (1-1211)(N914C_S1123C) LumSynth construct
MFVFLVLLPLVSSQCVNLTTRTQLPPAYTNSFTRGVYYPDKVFRSSVLHSTQDLFLPFFSNVTWFHAIHVSGTNGTKRFDNPVLPFNDGVYFASTEKSNIIRGWIFGTTLDSKTQSLLIVNNATNVVIKVCEFQFCNDPFLGVYYHKNNKSWMESEFRVYSSANNCTFEYVSQPFLMDLEGKQGNFKNLREFVFKNIDGYFKIYSKHTPINLVRDLPQGFSALEPLVDLPIGINITRFQTLLALHRSYLTPGDSSSGWTAGAAAYYVGYLQPRTFLLKYNENGTITDAVDCALDPLSETKCTLKSFTVEKGIYQTSNFRVQPTESIVRFPNITNLCPFGEVFNATRFASVYAWNRKRISNCVADYSVLYNSASFSTFKCYGVSPTKLNDLCFTNVYADSFVIRGDEVRQIAPGQTGKIADYNYKLPDDFTGCVIAWNSNNLDSKVGGNYNYLYRLFRKSNLKPFERDISTEIYQAGSTPCNGAEGFNCYFPLQSYGFQPTNGVGYQPYRVVVLSFELLHAPATVCGPKKSTNLVKNKCVNFNFNGLTGTGVLTESNKKFLPFQQFGRDIADTTDAVRDPQTLEILDITPCSFGGVSVITPGTNTSNQVAVLYQDVNCTEVPVAIHADQLTPTWRVYSTGSNVFQTRAGCLIGAEHVNNSYECDIPIGAGICASYQTQTNSPRRARSVASQSIIAYTMSLGAENSVAYSNNSIAIPTNFTISVTTEILPVSMTKTSVDCTMYICGDSTECSNLLLQYGSFCTQLNRALTGIAVEQDKNTQEVFAQVKQIYKTPPIKDFGGFNFSQILPDPSKPSKRSFIEDLLFNKVTLADAGFIKQYGDCLGDIAARDLICAQKFNGLTVLPPLLTDEMIAQYTSALLAGTITSGWTFGAGAALQIPFAMQMAYRFNGIGVTQCVLYENQKLIANQFNSAIGKIQDSLSSTASALGKLQDVVNQNAQALNTLVKQLSSNFGAISSVLNDILSRLDKVEAEVQIDRLITGRLQSLQTYVTQQLIRAAEIRASANLAATKMSECVLGQSKRVDFCGKGYHLMSFPQSAPHGVVFLHVTYVPAQEKNFTTAPAICHDGKAHFPREGVFVSNGTHWFVTQRNFYEPQIITTDNTFVCGNCDVVIGIVNNTVYDPLQPELDSFKEELDKYFKNHTSPDVDLGDISGINASVVNIQKEIDRLNEVAKNLNESLIDLQELGKYEQYIKGGGSGGGQIYEGKLTAEGLRFGIVASRFNHALVDRLVEGAIDAIVRHGGREEDITLVRVPGSWEIPVAAGELARKEDIDAVIAIGVLIRGATPHFDYIASEVSKGLADLSLELRKPITFGVITADTLEQAIERAGTKHGNKGWEAALSAIEMANLFKSLR

SEQ ID NO: 13623 - protein, 1371 aa, Artificial Sequence
  SARS-CoV-2/South Korea/SNU01/2020__EPI_ISL_411929 spike protein (1-1211)(N914C_S1123C) LumSynth construct
MFVFLVLLPLVSSQCVNLTTRTQLPPAYTNSFTRGVYYPDKVFRSSVLHSTQDLFLPFFSNVTWFHAIHVSGTNGTKRFDNPVLPFNDGVYFASTEKSNIIRGWIFGTTLDSKTQSLLIVNNATNVVIKVCEFQFCNDPFLGVYYHKNNKSWMESEFRVYSSANNCTFEYVSQPFLMDLEGKQGNFKNLREFVFKNIDGYFKIYSKHTPINLVRDLPQGFWALEPLVDLPIGINITRFQTLLALHRSYLTPGDSSSGWTAGAAAYYVGYLQPRTFLLKYNENGTITDAVDCALDPLSETKCTLKSFTVEKGIYQTSNFRVQPTESIVRFPNITNLCPFGEVFNATRFASVYAWNRKRISNCVADYSVLYNSASFSTFKCYGVSPTKLNDLCFTNVYADSFVIRGDEVRQIAPGQTGKIADYNYKLPDDFTGCVIAWNSNNLDSKVGGNYNYLYRLFRKSNLKPFERDISTEIYQAGSTPCNGVEGFNCYFPLQSYGFQPTNGVGYQPYRVVVLSFELLHAPATVCGPKKSTNLVKNKCVNFNFNGLTGTGVLTESNKKFLPFQQFGRDIADTTDAVRDPQTLEILDITPCSFGGVSVITPGTNTSNQVAVLYQDVNCTEVPVAIHADQLTPTWRVYSTGSNVFQTRAGCLIGAEHVNNSYECDIPIGAGICASYQTQTNSPRRARSVASQSIIAYTMSLGAENSVAYSNNSIAIPTNFTISVTTEILPVSMTKTSVDCTMYICGDSTECSNLLLQYGSFCTQLNRALTGIAVEQDKNTQEVFAQVKQIYKTPPIKDFGGFNFSQILPDPSKPSKRSFIEDLLFNKVTLADAGFIKQYGDCLGDIAARDLICAQKFNGLTVLPPLLTDEMIAQYTSALLAGTITSGWTFGAGAALQIPFAMQMAYRFNGIGVTQCVLYENQKLIANQFNSAIGKIQDSLSSTASALGKLQDVVNQNAQALNTLVKQLSSNFGAISSVLNDILSRLDKVEAEVQIDRLITGRLQSLQTYVTQQLIRAAEIRASANLAATKMSECVLGQSKRVDFCGKGYHLMSFPQSAPHGVVFLHVTYVPAQEKNFTTAPAICHDGKAHFPREGVFVSNGTHWFVTQRNFYEPQIITTDNTFVCGNCDVVIGIVNNTVYDPLQPELDSFKEELDKYFKNHTSPDVDLGDISGINASVVNIQKEIDRLNEVAKNLNESLIDLQELGKYEQYIKGGGSGGGQIYEGKLTAEGLRFGIVASRFNHALVDRLVEGAIDAIVRHGGREEDITLVRVPGSWEIPVAAGELARKEDIDAVIAIGVLIRGATPHFDYIASEVSKGLADLSLELRKPITFGVITADTLEQAIERAGTKHGNKGWEAALSAIEMANLFKSLR

SEQ ID NO: 13624 - protein, 1371 aa, Artificial Sequence
  SARS-CoV-2/China/WF0004/2020__EPI_ISL_413694 spike protein (1-1211)(N914C_S1123C) LumSynth construct
MFVFLVLLPLVSSQCVNLTTRTQLPPAYTNSFTRGVYYPDKVFRSSVLHSTQDLFLPFFSNVTWFHAIHVSGTNGTKRFDNPVLPFNDGVYFASTEKSNIIRGWIFGTTLDSKTQSLLIVNNATNVVIKVCEFQFCNDPFLGVYYHKNNKSWTESEFRVYSSANNCTFEYVSQPFLMDLEGKQGNFKNLREFVFKNIDGYFKIYSKHTPINLVRDLPQGFSALEPLVDLPIGINITRFQTLLALHRSYLTPGDSSSGWTAGAAAYYVGYLQPRTFLLKYNENGTITDAVDCALDPLSETKCTLKSFTVEKGIYQTSNFRVQPTESIVRFPNITNLCPFGEVFNATRFASVYAWNRKRISNCVADYSVLYNSASFSTFKCYGVSPTKLNDLCFTNVYADSFVIRGDEVRQIAPGQTGKIADYNYKLPDDFTGCVIAWNSNNLDSKVGGNYNYLYRLFRKSNLKPFERDISTEIYQAGSTPCNGVEGFNCYFPLQSYGFQPTNGVGYQPYRVVVLSFELLHAPATVCGPKKSTNLVKNKCVNFNFNGLTGTGVLTESNKKFLPFQQFGRDIADTTDAVRDPQTLEILDITPCSFGGVSVITPGTNTSNQVAVLYQDVNCTEVPVAIHADQLTPTWRVYSTGSNVFQTRAGCLIGAEHVNNSYECDIPIGAGICASYQTQTNSPRRARSVASQSIIAYTMSLGAENSVAYSNNSIAIPTNFTISVTTEILPVSMTKTSVDCTMYICGDSTECSNLLLQYGSFCTQLNRALTGIAVEQDKNTQEVFAQVKQIYKTPPIKDFGGFNFSQILPDPSKPSKRSFIEDLLFNKVTLADAGFIKQYGDCLGDIAARDLICAQKFNGLTVLPPLLTDEMIAQYTSALLAGTITSGWTFGAGAALQIPFAMQMAYRFNGIGVTQCVLYENQKLIANQFNSAIGKIQDSLSSTASALGKLQDVVNQNAQALNTLVKQLSSNFGAISSVLNDILSRLDKVEAEVQIDRLITGRLQSLQTYVTQQLIRAAEIRASANLAATKMSECVLGQSKRFDFCGKGYHLMSFPQSAPHGVVFLHVTYVPAQEKNFTTAPAICHDGKAHFPREGVFVSNGTHWFVTQRNFYEPQIITTDNTFVCGNCDVVIGIVNNTVYDPLQPELDSFKEELDKYFKNHTSPDVDLGDISGINASVVNIQKEIDRLNEVAKNLNESLIDLQELGKYEQYIKGGGSGGGQIYEGKLTAEGLRFGIVASRFNHALVDRLVEGAIDAIVRHGGREEDITLVRVPGSWEIPVAAGELARKEDIDAVIAIGVLIRGATPHFDYIASEVSKGLADLSLELRKPITFGVITADTLEQAIERAGTKHGNKGWEAALSAIEMANLFKSLR

SEQ ID NO: 13625 - protein, 1371 aa, Artificial Sequence
  SARS-CoV-2/China/WF0028/2020__EPI_ISL_413791 spike protein (1-1211)(N914C_S1123C) LumSynth construct
MFVFLVLLPLVSSQCVNLTTRTQLPPAYTNSFTRGVYYPDKVFRSSVLHSTQDLFLPFFSNVTWFHAIHVSGTNGTKRFDNPVLPFNDGVYFASTEKSNIIRGWIFGTTLDSKTQSLLIVNNATNVVIKVCEFQFCNDPFLGVYYHKNNKSWMESEFRVYSSANNCTFEYVSQPFLMDLEGKQGNFKNLREFVFKNIDGYFKIYSKHTPINLVRDLPQGFSALEPLVDLPIGINITRFQTLLALHRSYLTPGDSSSGWTAGAAAYYVGYLQPRTFLLKYNENGTITDAVDCALDPLSETKCTLKSFTVEKGIYQTSNFRVQPTESIVRFPNITNLCPFGEVFNATRFASVYAWNRKRISNCVADYSVLYNSASFSTFKCYGVSPTKLNDLCFTNVYADSFVIRGDEVRQIAPGQTGKIADYNYKLPDDFTGCVIAWNSNNLDSKVGGNYNYLYRLFRKSNLKPFERDISTEIYQAGSTPCNGVEGFNCYFPLQSYGFQPTNGVGYQPYRVVVLSFELLHAPATVCGPKKSTNLVKNKCVNFNFNGLTGTGVLTESNKKFLPFQQFGRDIADTTDAVRDPQTLEILDITPCSFGGVSVITPGTNTSNQVAVLYQDVNCTEVPVAIHADQLTPTWRVYSTGSNVFQTRAGCLIGAEHVNNSYECDIPIGAGICASYQTQTNSPRRARSVASQSIIAYTMSLGAENSVAYSNNSIAIPTNFTISVTTEILPVSMTKTSVDCTMYICGDSTECSNLLLQYGSFCTQLNRALTGIAVEQDKNTQEVFAQVKQIYKTPPIKDFGGFNFSQILPDPSKPSKRSFIEDLLFNKVTLADAGFIKQYGDCLGDIAARDLICAQKFNGLTVLPPLLTDEMIAQYTSALLAGTITSGWTFGAGAALQIPFAMQMAYRFNGIGVTQCVLYENQKLIANQFNSAIGKIQDSLSSTASALGKLQDVVNQNAQALNTLVKQLSSNFGAISSVLNDILSRLDKVEAEVQIDRLITGRLQSLQTYVTQQLIRAAEIRASANLAATKMSECVLGQSKRVDFCGKGYHLMSFPQSAPHGVVFLHVTYVPAQEKNFTTAPAICHDGKAHFPREGVFVSNGTHWFVTQRNFYEPQIITTDNTFVCGNCDVVIGIVNNTVYDPLQPELESFKEELDKYFKNHTSPDVDLGDISGINASVVNIQKEIDRLNEVAKNLNESLIDLQELGKYEQYIKGGGSGGGQIYEGKLTAEGLRFGIVASRFNHALVDRLVEGAIDAIVRHGGREEDITLVRVPGSWEIPVAAGELARKEDIDAVIAIGVLIRGATPHFDYIASEVSKGLADLSLELRKPITFGVITADTLEQAIERAGTKHGNKGWEAALSAIEMANLFKSLR

SEQ ID NO: 13626 - protein, 1371 aa, Artificial Sequence
  SARS-CoV-2/2019-nCoV/USA-CruiseA-18/2020__MT159716.1 spike protein (1-1211)(N914C_S1123C) LumSynth construct
MFVFLVLLPLVSSQCVNLTTRTQLPPAYTNSFTRGVYYPDKVFRSSVLHSTQDLFLPFFSNVTWFHAIHVSGTNGTKRFDNPVLPFNDGVYFASTEKSNIIRGWIFGTTLDSKTQSLLIVNNATNVVIKVCEFQFCNDPFLGVYYHKNNKSWMESELRVYSSANNCTFEYVSQPFLMDLEGKQGNFKNLREFVFKNIDGYFKIYSKHTPINLVRDLPQGFSALEPLVDLPIGINITRFQTLLALHRSYLTPGDSSSGWTAGAAAYYVGYLQPRTFLLKYNENGTITDAVDCALDPLSETKCTLKSFTVEKGIYQTSNFRVQPTESIVRFPNITNLCPFGEVFNATRFASVYAWNRKRISNCVADYSVLYNSASFSTFKCYGVSPTKLNDLCFTNVYADSFVIRGDEVRQIAPGQTGKIADYNYKLPDDFTGCVIAWNSNNLDSKVGGNYNYLYRLFRKSNLKPFERDISTEIYQAGSTPCNGVEGFNCYFPLQSYGFQPTNGVGYQPYRVVVLSFELLHAPATVCGPKKSTNLVKNKCVNFNFNGLTGTGVLTESNKKFLPFQQFGRDIADTTDAVRDPQTLEILDITPCSFGGVSVITPGTNTSNQVAVLYQDVNCTEVPVAIHADQLTPTWRVYSTGSNVFQTRAGCLIGAEHVNNSYECDIPIGAGICASYQTQTNSPRRARSVASQSIIAYTMSLGAENSVAYSNNSIAIPTNFTISVTTEILPVSMTKTSVDCTMYICGDSTECSNLLLQYGSFCTQLNRALTGIAVEQDKNTQEVFAQVKQIYKTPPIKDFGGFNFSQILPDPSKPSKRSFIEDLLFNKVTLADAGFIKQYGDCLGDIAARDLICAQKFNGLTVLPPLLTDEMIAQYTSALLAGTITSGWTFGAGAALQIPFAMQMAYRFNGIGVTQCVLYENQKLIANQFNSAIGKIQDSLSSTASALGKLQDVVNQNAQALNTLVKQLSSNFGAISSVLNDILSRLDKVEAEVQIDRLITGRLQSLQTYVTQQLIRAAEIRASANLAATKMSECVLGQSKRVDFCGKGYHLMSFPQSAPHGVVFLHVTYVPAQEKNFTTAPAICHDGKAHFPREGVFVSNGTHWFVTQRNFYEPQIITTDNTFVCGNCDVVIGIVNNTVYDPLQPELDSFKEELDKYFKNHTSPDVDLGDISGINASVVNIQKEIDRLNEVAKNLNESLIDLQELGKYEQYIKGGGSGGGQIYEGKLTAEGLRFGIVASRFNHALVDRLVEGAIDAIVRHGGREEDITLVRVPGSWEIPVAAGELARKEDIDAVIAIGVLIRGATPHFDYIASEVSKGLADLSLELRKPITFGVITADTLEQAIERAGTKHGNKGWEAALSAIEMANLFKSLR

SEQ ID NO: 13627 - protein, 1371 aa, Artificial Sequence
  SARS-CoV-2/SARS-CoV-2/Yunnan-01/human/2020/CHN__MT049951.1 spike protein (1-1211)(N914C_S1123C) LumSynth construct
MFVFLVLLPLVSSQCVNLTTRTQLPPANTNSFTRGVYYPDKVFRSSVLHSTQDLFLPFFSNVTWFHAIHVSGTNGTKRFDNPVLPFNDGVYFASTEKSNIIRGWIFGTTLDSKTQSLLIVNNATNVVIKVCEFQFCNDPFLGVYYHKNNKSWMESEFRVYSSANNCTFEYVSQPFLMDLEGKQGNFKNLREFVFKNIDGYFKIYSKHTPINLVRDLPQGFSALEPLVDLPIGINITRFQTLLALHRSYLTPGDSSSGWTAGAAAYYVGYLQPRTFLLKYNENGTITDAVDCALDPLSETKCTLKSFTVEKGIYQTSNFRVQPTESIVRFPNITNLCPFGEVFNATRFASVYAWNRKRISNCVADYSVLYNSASFSTFKCYGVSPTKLNDLCFTNVYADSFVIRGDEVRQIAPGQTGKIADYNYKLPDDFTGCVIAWNSNNLDSKVGGNYNYLYRLFRKSNLKPFERDISTEIYQAGSTPCNGVEGFNCYFPLQSYGFQPTNGVGYQPYRVVVLSFELLHAPATVCGPKKSTNLVKNKCVNFNFNGLTGTGVLTESNKKFLPFQQFGRDIADTTDAVRDPQTLEILDITPCSFGGVSVITPGTNTSNQVAVLYQDVNCTEVPVAIHADQLTPTWRVYSTGSNVFQTRAGCLIGAEHVNNSYECDIPIGAGICASYQTQTNSPRRARSVASQSIIAYTMSLGAENSVAYSNNSIAIPTNFTISVTTEILPVSMTKTSVDCTMYICGDSTECSNLLLQYGSFCTQLNRALTGIAVEQDKNTQEVFAQVKQIYKTPPIKDFGGFNFSQILPDPSKPSKRSFIEDLLFNKVTLADAGFIKQYGDCLGDIAARDLICAQKFNGLTVLPPLLTDEMIAQYTSALLAGTITSGWTFGAGAALQIPFAMQMAYRFNGIGVTQCVLYENQKLIANQFNSAIGKIQDSLSSTASALGKLQDVVNQNAQALNTLVKQLSSNFGAISSVLNDILSRLDKVEAEVQIDRLITGRLQSLQTYVTQQLIRAAEIRASANLAATKMSECVLGQSKRVDFCGKGYHLMSFPQSAPHGVVFLHVTYVPAQEKNFTTAPAICHDGKAHFPREGVFVSNGTHWFVTQRNFYEPQIITTDNTFVCGNCDVVIGIVNNTVYDPLQPELDSFKEELDKYFKNHTSPDVDLGDISGINASVVNIQKEIDRLNEVAKNLNESLIDLQELGKYEQYIKGGGSGGGQIYEGKLTAEGLRFGIVASRFNHALVDRLVEGAIDAIVRHGGREEDITLVRVPGSWEIPVAAGELARKEDIDAVIAIGVLIRGATPHFDYIASEVSKGLADLSLELRKPITFGVITADTLEQAIERAGTKHGNKGWEAALSAIEMANLFKSLR

SEQ ID NO: 13628 - protein, 1371 aa, Artificial Sequence
  SARS-CoV-2/USA/WA-UW292/2020__EPI_ISL_418077 spike protein (1-1211)(N914C_S1123C) LumSynth construct
MFVFLVLLPLVSSQCVNLTTRTQLPPAYTNSFTRGVYYPDKVFRSSVLHSTQDLFLPFFSNVTWFHAIHVSGTNGTKRFDNPVLPFNDGVYFASTEKSNIIRGWIFGTTLDSKTQSLLIVNNATNVVIKVCEFQFCNDPFLGVYYHKNNKSWMESEFRVYSSANNCTFEYVSQPFLMDLEGKQGNFKNLREFVFKNIDGYFKIYSKHTPINLVRDLPQGFSALEPLVDLPIGINITRFQTLLALHRSYLTPGDSSSGWTAGAAAYYVGYLQPRTFLLKYNENGTITDAVDCALDPLSETKCTLKSFTVEKGIYQTSNFRVQPTESIVRFPNITNLCPFGEVFNATRFASVYAWNRKRISNCVADYSVLYNSASFSTFKCYGVSPTKLNDLCFTNVYADSFVIRGDEVRQIAPGQTGKIADYNYKLPDDFTGCVIAWNSNNLDSKVGGNYNYLYRLFRKSNLKPFERDISTEIYQASSTPCNGVEGFNCYFPLQSYGFQPTNGVGYQPYRVVVLSFELLHAPATVCGPKKSTNLVKNKCVNFNFNGLTGTGVLTESNKKFLPFQQFGRDIADTTDAVRDPQTLEILDITPCSFGGVSVITPGTNTSNQVAVLYQDVNCTEVPVAIHADQLTPTWRVYSTGSNVFQTRAGCLIGAEHVNNSYECDIPIGAGICASYQTQTNSPRRARSVASQSIIAYTMSLGAENSVAYSNNSIAIPTNFTISVTTEILPVSMTKTSVDCTMYICGDSTECSNLLLQYGSFCTQLNRALTGIAVEQDKNTQEVFAQVKQIYKTPPIKDFGGFNFSQILPDPSKPSKRSFIEDLLFNKVTLADAGFIKQYGDCLGDIAARDLICAQKFNGLTVLPPLLTDEMIAQYTSALLAGTITSGWTFGAGAALQIPFAMQMAYRFNGIGVTQCVLYENQKLIANQFNSAIGKIQDSLSSTASALGKLQDVVNQNAQALNTLVKQLSSNFGAISSVLNDILSRLDKVEAEVQIDRLITGRLQSLQTYVTQQLIRAAEIRASANLAATKMSECVLGQSKRVDFCGKGYHLMSFPQSAPHGVVFLHVTYVPAQEKNFTTAPAICHDGKAHFPREGVFVSNGTHWFVTQRNFYEPQIITTDNTFVCGNCDVVIGIVNNTVYDPLQPELDSFKEELDKYFKNHTSPDVDLGDISGINASVVNIQKEIDRLNEVAKNLNESLIDLQELGKYEQYIKGGGSGGGQIYEGKLTAEGLRFGIVASRFNHALVDRLVEGAIDAIVRHGGREEDITLVRVPGSWEIPVAAGELARKEDIDAVIAIGVLIRGATPHFDYIASEVSKGLADLSLELRKPITFGVITADTLEQAIERAGTKHGNKGWEAALSAIEMANLFKSLR

SEQ ID NO: 13629 - protein, 1371 aa, Artificial Sequence
  SARS-CoV-2/Iceland/192/2020__EPI_ISL_417819 spike protein (1-1211)(N914C_S1123C) LumSynth construct
MFVFFVLLPLVSSQCVNLTTRTQLPPAYTNSFTRGVYYPDKVFRSSVLHSTQDLFLPFFSNVTWFHAIHVSGTNGTKRFDNPVLPFNDGVYFASTEKSNIIRGWIFGTTLDSKTQSLLIVNNATNVVIKVCEFQFCNDPFLGVYYHKNNKSWMESEFRVYSSANNCTFEYVSQPFLMDLEGKQGNFKNLREFVFKNIDGYFKIYSKHTPINLVRDLPQGFSALEPLVDLPIGINITRFQTLLALHRSYLTPGDSSSGWTAGAAAYYVGYLQPRTFLLKYNENGTITDAVDCALDPLSETKCTLKSFTVEKGIYQTSNFRVQPTESIVRFPNITNLCPFGEVFNATRFASVYAWNRKRISNCVADYSVLYNSASFSTFKCYGVSPTKLNDLCFTNVYADSFVIRGDEVRQIAPGQTGKIADYNYKLPDDFTGCVIAWNSNNLDSKVGGNYNYLYRLFRKSNLKPFERDISTEIYQAGSTPCNGVEGFNCYFPLQSYGFQPTNGVGYQPYRVVVLSFELLHAPATVCGPKKSTNLVKNKCVNFNFNGLTGTGVLTESNKKFLPFQQFGRDIADTTDAVRDPQTLEILDITPCSFGGVSVITPGTNTSNQVAVLYQGVNCTEVPVAIHADQLTPTWRVYSTGSNVFQTRAGCLIGAEHVNNSYECDIPIGAGICASYQTQTNSPRRARSVASQSIIAYTMSLGAENSVAYSNNSIAIPTNFTISVTTEILPVSMTKTSVDCTMYICGDSTECSNLLLQYGSFCTQLNRALTGIAVEQDKNTQEVFAQVKQIYKTPPIKDFGGFNFSQILPDPSKPSKRSFIEDLLFNKVTLADAGFIKQYGDCLGDIAARDLICAQKFNGLTVLPPLLTDEMIAQYTSALLAGTITSGWTFGAGAALQIPFAMQMAYRFNGIGVTQCVLYENQKLIANQFNSAIGKIQDSLSSTASALGKLQDVVNQNAQALNTLVKQLSSNFGAISSVLNDILSRLDKVEAEVQIDRLITGRLQSLQTYVTQQLIRAAEIRASANLAATKMSECVLGQSKRVDFCGKGYHLMSFPQSAPHGVVFLHVTYVPAQEKNFTTAPAICHDGKAHFPREGVFVSNGTHWFVTQRNFYEPQIITTDNTFVCGNCDVVIGIVNNTVYDPLQPELDSFKEELDKYFKNHTSPDVDLGDISGINASVVNIQKEIDRLNEVAKNLNESLIDLQELGKYEQYIKGGGSGGGQIYEGKLTAEGLRFGIVASRFNHALVDRLVEGAIDAIVRHGGREEDITLVRVPGSWEIPVAAGELARKEDIDAVIAIGVLIRGATPHFDYIASEVSKGLADLSLELRKPITFGVITADTLEQAIERAGTKHGNKGWEAALSAIEMANLFKSLR

SEQ ID NO: 13630 - protein, 1371 aa, Artificial Sequence
  SARS-CoV-2/Belgium/ULG-6939/2020__EPI_ISL_417020 spike protein (1-1211)(N914C_S1123C) LumSynth construct
MFVFLVLLPLVSSQCVNLTTRTQLPPAYTNSFTRGVYYPDKVFRSSVLHSTQDLFLPFFSNVTWFHAIHVSGTNGTKRFDNPVLPFNDGVYFASTEKSNIIRGWIFGTTLDSKTQSLLIVNNATNVVIKVCEFQFCNDPFLGVYYHKNNKSWMESEFRVYSSANNCTFEYVSQPFLMDLEGKQGNFKNLREFVFKNIDGYFKIYSKHTPINLVRDLPQGFSALEPLVDLPIGINITRFQTLLALHRSYLTPGDSSSGWTAGAAAYYVGYLQPRTFLLKYNENGTITDAVDCALDPLSETKCTLKSFTVEKGIYQTSNFRVQPTESIVRFPNITNLCPFGEVFNATRFASVYAWNRKRISNCVADYSVLYNSASFSTFKCYGVSPTKLNDLCFTNVYADSFVIRGDEVRQIAPGQTGKIADYNYKLPDDFTGCVIAWNSNNLDSKVGGNYNYLYRLFRKSNLKPFERDISTEIYQAGSTPCNGVEGFNCYFPLQSYGFQPTNGVGYQPYRVVVLSFELLHAPATVCGPKKSTNLVKNKCVNFNFNGLTGTGVLTESNKKFLPFQQFGRDIADTTDAVRDPQTLEILDITPCSFGGVSVITPGTNTSNQVAVLYQGVNCTEVPVAIHADQLTPTWRVYSTGSNVFQTRAGCLIGAEHVNNSYECDIPIGAGICASYQTQTNSPRRARSVASQSIIAYTMSLGAENSVVYSNNSIAIPTNFTISVTTEILPVSMTKTSVDCTMYICGDSTECSNLLLQYGSFCTQLNRALTGIAVEQDKNTQEVFAQVKQIYKTPPIKDFGGFNFSQILPDPSKPSKRSFIEDLLFNKVTLADAGFIKQYGDCLGDIAARDLICAQKFNGLTVLPPLLTDEMIAQYTSALLAGTITSGWTFGAGAALQIPFAMQMAYRFNGIGVTQCVLYENQKLIANQFNSAIGKIQDSLSSTASALGKLQDVVNQNAQALNTLVKQLSSNFGAISSVLNDILSRLDKVEAEVQIDRLITGRLQSLQTYVTQQLIRAAEIRASANLAATKMSECVLGQSKRVDFCGKGYHLMSFPQSAPHGVVFLHVTYVPAQEKNFTTAPAICHDGKAHFPREGVFVSNGTHWFVTQRNFYEPQIITTDNTFVCGNCDVVIGIVNNTVYDPLQPELDSFKEELDKYFKNHTSPDVDLGDISGINASVVNIQKEIDRLNEVAKNLNESLIDLQELGKYEQYIKGGGSGGGQIYEGKLTAEGLRFGIVASRFNHALVDRLVEGAIDAIVRHGGREEDITLVRVPGSWEIPVAAGELARKEDIDAVIAIGVLIRGATPHFDYIASEVSKGLADLSLELRKPITFGVITADTLEQAIERAGTKHGNKGWEAALSAIEMANLFKSLR

SEQ ID NO: 13631 - protein, 1371 aa, Artificial Sequence
  SARS-CoV-2/France/HF2496/2020__EPI_ISL_418231 spike protein (1-1211)(N914C_S1123C) LumSynth construct
MFVFLVLLPLVSSQCVNLTTRTQLPPAYTNSFTRGVYYPDKVFRSSVLHSTQDLFLPFFSNVTWFHAIHVSGTNGTKRFDNPVLPFNDGVYFASTEKSNIIRGWIFGTTLDSKTQSLLIVNNATNVVIKVCEFQFCNDPFLGVYYHKNNKSWMESEFRVYSSANNCTFEYVSQPFLMDLEGKQGNFKNLREFVFKNIDGYFKIYSKHTPINLVRDLPQGFSALEPLVDLPIGINITRFQTLLALHRSYLTPGDSSSGWTAGAAAYYVGYLQPRTFLLKYNENGTITDAVDCALDPLSETKCTLKSFTVEKGIYQTSNFRVQPTESIVRFPNITNLCPFGEVFNATRFASVYAWNRKRISNCVADYSVLYNSASFSTFKCYGVSPTKLNDLCFTNVYADSFVIRGDEVRQIAPGQTGKIADYNYKLPDDFTGCVIAWNSNNLDSKVGGNYNYLYRLFRKSNLKPFERDISTEIYQAGSTPCNGVEGFNCYFPLQSYGFQPTNGVGYQPYRVVVLSFELLHAPATVCGPKKSTNLVKNKCVNFNFNGLTGTGVLTESNKKFLPFQQFGRDIADTTDAVRDPQTLEILDITPCSFGGVSVITPGTNTSNQVAVLYQGVNCTEVPVAIHADQLTPTWRVYSTGSNVFQTRAGCLIGAEHVNNSYECDIPIGAGICASYQTQTNSPRRARSVASQSIIAYTMSLGAENSVAYSNNSIAIPTNFTISVTTEILPVSMTKTSVDCTMYICGDSTECSNLLLQYGSFCTQLNRALTGIAVEQDKNTQEVFAQVKQIYKTPPIKDFGGFNFSQILPDPSKPSKRSFIEDLLFNKVTLADAGFIKQYGDCLGDIVARDLICAQKFNGLTVLPPLLTDEMIAQYTSALLAGTITSGWTFGAGAALQIPFAMQMAYRFNGIGVTQCVLYENQKLIANQFNSAIGKIQDSLSSTASALGKLQDVVNQNAQALNTLVKQLSSNFGAISSVLNDILSRLDKVEAEVQIDRLITGRLQSLQTYVTQQLIRAAEIRASANLAATKMSECVLGQSKRVDFCGKGYHLMSFPQSAPHGVVFLHVTYVPAQEKNFTTAPAICHDGKAHFPREGVFVSNGTHWFVTQRNFYEPQIITTDNTFVCGNCDVVIGIVNNTVYDPLQPELDSFKEELDKYFKNHTSPDVDLGDISGINASVVNIQKEIDRLNEVAKNLNESLIDLQELGKYEQYIKGGGSGGGQIYEGKLTAEGLRFGIVASRFNHALVDRLVEGAIDAIVRHGGREEDITLVRVPGSWEIPVAAGELARKEDIDAVIAIGVLIRGATPHFDYIASEVSKGLADLSLELRKPITFGVITADTLEQAIERAGTKHGNKGWEAALSAIEMANLFKSLR

SEQ ID NO: 13632 - protein, 1371 aa, Artificial Sequence
  SARS-CoV-2/USA/WA-UW291/2020__EPI_ISL_418076 spike protein (1-1211)(N914C_S1123C) LumSynth construct
MFVFLVLLPLVSSQCVNLTTRTQLPPAYTNSFTRGVYYPDKVFRSSVLHSTQDLFLPFFSNVTWFHAIHVSGTNGTKRFDNPVLPFNDGVYFASTEKSNIIRGWIFGTTLDSKTQSLLIVNNATNVVIKVCEFQFCNDPFLGVYYHKNNKSWMESEFRVYSSANNCTFEYVSQPFLMDLEGKQGNFKNLREFVFKNIDGYFKIYSKHTPINLVRDLPQGFSALEPLVDLPIGINITRFQTLLALHRSYLTPGDSSSGWTAGAAAYYVGYLQPRTFLLKYNENGTITDAVDCALDPLSETKCTLKSFTVEKGIYQTSNFRVQPTESIVRFPNITNLCPFGEVFNATRFASVYAWNRKRISNCVADYSVLYNSASFSTFKCYGVSPTKLNDLCFTNVYADSFVIRGDEVRQIAPGQTGKIADYNYKLPDDFTGCVIAWNSNNLDSKVGGNYNYLYRLFRKSNLKPFERDISTEIYQAGSTPCNGVEGFNCYFPLQSYGFQPTNGVGYQPYRVVVLSFELLHAPATVCGPKKSTNLVKNKCVNFNFNGLTGTGVLTESNKKFLPFQQFGRDIADTTDAVRDPQTLEILDITPCSFGGVSVITPGTNTSNQVAVLYQGVNCTEVPVAIHADQLTPTWRVYSTGSNVFQTRAGCLIGAEHVNNSYECDIPIGAGICASYQTQTNSPRRARSVASQSIIAYTMSLGAENSVAYSNNSIAIPTNFTISVTTEILPVSMTKTSVDCTMYICGDSTECSNLLLQYGSFCTQLNRALTGIAVEQDKNTQEVFAQVKQIYKTPPIKDFGGFNFSQILPDPSKPSKRSFIEDLLFNKVTLADAGFIKQYGDCLGDIAARDLICAQKFNGLTVLPPLLTDEMIAQYTSALLAGTITSGWTFGAGAALQIPFAMQMAYRFNGIGVTQCVLYENQKLIANQFNSAIGKIQYSLSSTASALGKLQDVVNQNAQALNTLVKQLSSNFGAISSVLNDILSRLDKVEAEVQIDRLITGRLQSLQTYVTQQLIRAAEIRASANLAATKMSECVLGQSKRVDFCGKGYHLMSFPQSAPHGVVFLHVTYVPAQEKNFTTAPAICHDGKAHFPREGVFVSNGTHWFVTQRNFYEPQIITTDNTFVCGNCDVVIGIVNNTVYDPLQPELDSFKEELDKYFKNHTSPDVDLGDISGINASVVNIQKEIDRLNEVAKNLNESLIDLQELGKYEQYIKGGGSGGGQIYEGKLTAEGLRFGIVASRFNHALVDRLVEGAIDAIVRHGGREEDITLVRVPGSWEIPVAAGELARKEDIDAVIAIGVLIRGATPHFDYIASEVSKGLADLSLELRKPITFGVITADTLEQAIERAGTKHGNKGWEAALSAIEMANLFKSLR

SEQ ID NO: 13633 - protein, 1371 aa, Artificial Sequence; identical to SEQ ID NO: 13596
  SARS-CoV-2/Portugal/PT0034/2020__EPI_ISL_418019 spike protein (1-1211)(N914C_S1123C) LumSynth construct

SEQ ID NO: 13634 - protein, 1371 aa, Artificial Sequence
  SARS-CoV-2/Iceland/202/2020__EPI_ISL_417750 spike protein (1-1211)(N914C_S1123C) LumSynth construct
MFVFLVLLPLVSSQCVNLTTRTQLPPAYTNSFTRGVYYPDKVFRSSVLHSTQDLFLPFFSNVTWFHAIHVSGTNGTKRFDNPVLPFNDGVYFASTEKSNIIRGWIFGTTLDSKTQSLLIVNNATNVVIKVCEFQFCNDPFLGVYYHKNNKSWMESEFRVYSSANNCTFEYVSQPFLMDLEGKQGNFKNLREFVFKNIDGYFKIYSKHTPINLVRDLPQGFSALEPLVDLPIGINITRFQTLLALHRSYLTPGDSSSGWTAGAAAYYVGYLQPRTFLLKYNENGTITDAVDCALDPLSETKCTLKSFTVEKGIYQTSNFRVQPTESIVRFPNITNLCPFGEVFNATRFASVYAWNRKRISNCVADYSVLYNSASFSTFKCYGVSPTKLNDLCFTNVYADSFVIRGDEVRQIAPGQTGKIADYNYKLPDDFTGCVIAWNSNNLDSKVGGNYNYLYRLFRKSNLKPFERDISTEIYQAGSTPCNGVEGFNCYFPLQSYGFQPTNGVGYQPYRVVVLSFELLHAPATVCGPKKSTNLVKNKCVNFNFNGLTGTGVLTESNKKFLPFQQFGRDIADTTDAVRDPQTLEILDITPCSFGGVSVITPGTNTSNQVAVLYQDVNCTEVPVAIHADQLTPTWRVYSTGSNVFQTRAGCLIGAEHVNNSYECDIPIGAGICASYQTQTNSPRRARSVASQSIIAYTMSLGAENSVAYSNNSIAIPTNFTISVTTEILPVSMTKTSVDCTMYICGDSTECSNLLLQYGSFCTQLNRALTGIAVEQDKNTQEVFAQVKQIYKTPPIKDFGGFNFSQILPDPSKPSKRSFIEDLLFNKVTLADAGFIKQYGDCLGDIAARDLICAQKFNGLTVLPPLLTDEMIAQYTSALLAGTITSGWTFGAGAALQIPFAMQMAYRFNGIGVTQCVLYENQKLIANQFNSAIGKIQDSLSSTASALGKLQDVVNQNAQALNTLVKQLSSNFGAISSVLNDILSRLDKVEAEVQIDRLITGRLQSLQTYVTQQLIRAAEIRASANLAATKMSECVLGQSKRVDFCGKGYHLMSFPQSAPHGVVFLHVTYVPAQEKNFTTAPAICHDGKAHFPREGVFVSNGTHWFVTQRNFYEPQIITTDNTFVCGNCDVVIGIVNNTVYDPLQPELDSFKEELDKYFKNHTSPDVDLGDIPGINASVVNIQKEIDRLNEVAKNLNESLIDLQELGKYEQYIKGGGSGGGQIYEGKLTAEGLRFGIVASRFNHALVDRLVEGAIDAIVRHGGREEDITLVRVPGSWEIPVAAGELARKEDIDAVIAIGVLIRGATPHFDYIASEVSKGLADLSLELRKPITFGVITADTLEQAIERAGTKHGNKGWEAALSAIEMANLFKSLR

SEQ ID NO: 13635 - protein, 1371 aa, Artificial Sequence
  SARS-CoV-2/USA/WA-UW261/2020__EPI_ISL_418046 spike protein (1-1211)(N914C_S1123C) LumSynth construct
MFVFLVLLPLVSSQCVNLTTRTQLPPAYTNSFTRGVYYPDKVFRSSVLHSTQDLFLPFFSNVTWFHAIHVSGTNGTKRFDNPVLPFNDGVYFASTEKSNIIRGWIFGTTLDSKTQSLLIVNNATNVVIKVCEFQFCNDPFLGVYYHKNNKSWMESEFRVYSSANNCTFEYVSQPFLMDLEGKQGNFKNLREFVFKNIDGYFKIYSKHTPINLVRDLPQGFSALEPLVDLPIGINITRFQTLLALHRSYLTPGDSSSGWTAGAAAYYVGYLQPRTFLLKYNENGTITDAVDCALDPLSETKCTLKSFTVEKGIYQTSNFRVQPTESIVRFPNITNLCPFGEVFNATRFTSVYAWNRKRISNCVADYSVLYNSASFSTFKCYGVSPTKLNDLCFTNVYADSFVIRGDEVRQIAPGQTGKIADYNYKLPDDFTGCVIAWNSNNLDSKVGGNYNYLYRLFRKSNLKPFERDISTEIYQAGSTPCNGVEGFNCYFPLQSYGFQPTNGVGYQPYRVVVLSFELLHAPATVCGPKKSTNLVKNKCVNFNFNGLTGTGVLTESNKKFLPFQQFGRDIADTTDAVRDPQTLEILDITPCSFGGVSVITPGTNTSNQVAVLYQDVNCTEVPVAIHADQLTPTWRVYSTGSNVFQTRAGCLIGAEHVNNSYECDIPIGAGICASYQTQTNSPRRARSVASQSIIAYTMSLGAENSVAYSNNSIAIPTNFTISVTTEILPVSMTKTSVDCTMYICGDSTECSNLLLQYGSFCTQLNRALTGIAVEQDKNTQEVFAQVKQIYKTPPIKDFGGFNFSQILPDPSKPSKRSFIEDLLFNKVTLADAGFIKQYGDCLGDIAARDLICAQKFNGLTVLPPLLTDEMIAQYTSALLAGTITSGWTFGAGAALQIPFAMQMAYRFNGIGVTQCVLYENQKLIANQFNSAIGKIQDSLSSTASALGKLQDVVNQNAQALNTLVKQLSSNFGAISSVLNDILSRLDKVEAEVQIDRLITGRLQSLQTYVTQQLIRAAEIRASANLAATKMSECVLGQSKRVDFCGKGYHLMSFPQSAPHGVVFLHVTYVPAQEKNFTTAPAICHDGKAHFPREGVFVSNGTHWFVTQRNFYEPQIITTDNTFVCGNCDVVIGIVNNTVYDPLQPELDSFKEELDKYFKNHTSPDVDLGDISGINASVVNIQKEIDRLNEVAKNLNESLIDLQELGKYEQYIKGGGSGGGQIYEGKLTAEGLRFGIVASRFNHALVDRLVEGAIDAIVRHGGREEDITLVRVPGSWEIPVAAGELARKEDIDAVIAIGVLIRGATPHFDYIASEVSKGLADLSLELRKPITFGVITADTLEQAIERAGTKHGNKGWEAALSAIEMANLFKSLR

SEQ ID NO: 13636 - protein, 1371 aa, Artificial Sequence
  SARS-CoV-2/Portugal/PT0035/2020__EPI_ISL_418020 spike protein (1-1211)(N914C_S1123C) LumSynth construct
MFVFLVLLPLVSSQCVNLTTRTQLPPAYTNSFTRGVYYPDKVFRSSVLHSTQDLFLPFFSNVTWFHAIHVSGTNGTKRFDNPVLPFNDGVYFASTEKSNIIRGWIFGTTLDSKTQSLLIVNNATNVVIKVCEFQFCNDPFLGVYYHKNNKSWMESEFRVYSSANNCTFEYVSQPFLMDLEGKQGNFKNLREFVFKNIDGYFKIYSKHTPINLVRDLPQGFSALEPLVDLPIGINITRFQTLLALHRSYLTPGDSSSGWTAGAAAYYVGYLQPRTFLLKYNENGTITDAVDCALDPLSETKCTLKSFTVEKGIYQTSNFRVQPTESIVRFPNITNLCPFGEVFNATRFASVYAWNRKRISNCVADYSVLYNSASFSTFKCYGVSPTKLNDLCFTNVYADSFVIRGDEVRQIAPGQTGKIADYNYKLPDDFTGCVIAWNSNNLDSKVGGNYNYLYRLFRKSNLKPFERDISTEIYQAGSTPCNGVEGFNCYFPLQSYGFQPTNGVGYQPYRVVVLSFELLHAPATVCGPKKSTNLVKNKCVNFNFNGLTGTGVLTESNKKFLPFQQFGRDIADTTDAVRDPQTLEILDITPCSFGGVSVITPGTNTSNQVAVLYQDVNCTEVPVAIHADQLTPTWRVYSTGSNVFQTRAGCLIGAEHVNNSYECDIPIGAGICASYQTQTNSPRRARSVASQSIIAYTMSLGAENSVAYSNNSIAIPTNFTISVTTEILPVSMTKTSVDCTMYICGDSTECSNLLLQYGSFCTQLNRALTGIAVEQDKNTQEVFAQVKQIYKTPPIKDFGGFNFSQILPDPSKPSKRSFIEDLLFNKVTLADAGFIKQYGDCLGDISARDLICAQKFNGLTVLPPLLTDEMIAQYTSALLAGTITSGWTFGAGAALQIPFAMQMAYRFNGIGVTQCVLYENQKLIANQFNSAIGKIQDSLSSTASALGKLQDVVNQNAQALNTLVKQLSSNFGAISSVLNDILSRLDKVEAEVQIDRLITGRLQSLQTYVTQQLIRAAEIRASANLAATKMSECVLGQSKRVDFCGKGYHLMSFPQSAPHGVVFLHVTYVPAQEKNFTTAPAICHDGKAHFPREGVFVSNGTHWFVTQRNFYEPQIITTDNTFVCGNCDVVIGIVNNTVYDPLQPELDSFKEELDKYFKNHTSPDVDLGDISGINASVVNIQKEIDRLNEVAKNLNESLIDLQELGKYEQYIKGGGSGGGQIYEGKLTAEGLRFGIVASRFNHALVDRLVEGAIDAIVRHGGREEDITLVRVPGSWEIPVAAGELARKEDIDAVIAIGVLIRGATPHFDYIASEVSKGLADLSLELRKPITFGVITADTLEQAIERAGTKHGNKGWEAALSAIEMANLFKSLR

SEQ ID NO: 13637 - protein, 1371 aa, Artificial Sequence
  SARS-CoV-2/USA/NY-NYUMC7/2020__EPI_ISL_418192 spike protein (1-1211)(N914C_S1123C) LumSynth construct
MFVFLVLLPLVSSQCVNLTTRTQLPPAYTNSFTRGVYYPDKVFRSSVLHSTQDLFLPFFSNVTWFHAIHVSGTNGTKRFDNPVLPFNDGVYFASTEKSNIIRGWIFGTTLDSKTQSLLIVNNATNVVIKVCEFQFCNDPFLGVYHHKNNKSWMESEFRVYSSANNCTFEYVSQPFLMDLEGKQGNFKNLREFVFKNIDGYFKIYSKHTPINLVRDLPQGFSALEPLVDLPIGINITRFQTLLALHRSYLTPGDSSSGWTAGAAAYYVGYLQPRTFLLKYNENGTITDAVDCALDPLSETKCTLKSFTVEKGIYQTSNFRVQPTESIVRFPNITNLCPFGEVFNATRFASVYAWNRKRISNCVADYSVLYNSASFSTFKCYGVSPTKLNDLCFTNVYADSFVIRGDEVRQIAPGQTGKIADYNYKLPDDFTGCVIAWNSNNLDSKVGGNYNYLYRLFRKSNLKPFERDISTEIYQAGSTPCNGVEGFNCYFPLQSYGFQPTNGVGYQPYRVVVLSFELLHAPATVCGPKKSTNLVKNKCVNFNFNGLTGTGVLTESNKKFLPFQQFGRDIADTTDAVRDPQTLEILDITPCSFGGVSVITPGTNTSNQVAVLYQGVNCTEVPVAIHADQLTPTWRVYSTGSNVFQTRAGCLIGAEHVNNSYECDIPIGAGICASYQTQTNSPRRARSVASQSIIAYTMSLGAENSVAYSNNSIAIPTNFTISVTTEILPVSMTKTSVDCTMYICGDSTECSNLLLQYGSFCTQLNRALTGIAVEQDKNTQEVFAQVKQIYKTPPIKDFGGFNFSQILPDPSKPSKRSFIEDLLFNKVTLADAGFIKQYGDCLGDIAARDLICAQKFNGLTVLPPLLTDEMIAQYTSALLAGTITSGWTFGAGAALQIPFAMQMAYRFNGIGVTQCVLYENQKLIANQFNSAIGKIQDSLSSTASALGKLQDVVNQNAQALNTLVKQLSSNFGAISSVLNDILSRLDKVEAEVQIDRLITGRLQSLQTYVTQQLIRAAEIRASANLAATKMSECVLGQSKRVDFCGKGYHLMSFPQSAPHGVVFLHVTYVPAQEKNFTTAPAICHDGKAHFPREGVFVSNGTHWFVTQRNFYEPQIITTDNTFVCGNCDVVIGIVNNTVYDPLQPELDSFKEELDKYFKNHTSPDVDLGDISGINASVVNIQKEIDRLNEVAKNLNESLIDLQELGKYEQYIKGGGSGGGQIYEGKLTAEGLRFGIVASRFNHALVDRLVEGAIDAIVRHGGREEDITLVRVPGSWEIPVAAGELARKEDIDAVIAIGVLIRGATPHFDYIASEVSKGLADLSLELRKPITFGVITADTLEQAIERAGTKHGNKGWEAALSAIEMANLFKSLR

SEQ ID NO: 13638 - protein, 1371 aa, Artificial Sequence
  SARS-CoV-2/Iceland/189/2020__EPI_ISL_417709 spike protein (1-1211)(N914C_S1123C) LumSynth construct
MFVFLVLLPLVSSQCVNLTTRTQLPPAYTNSFTRGVYYPDKVFRSSVLHSTQDLFLPFFSNVTWFHAIHVSGTNGTKRFDNPVLPFNDGVYFASTEKSNIIRGWIFGTTLDSKTQSLLIVNNATNVVIKVCEFQFCNDPFLGVYYHKNNKSWMESEFRVYSSANNCTFEYVSQPFLMDLEGKQGNFKNLREFVFKNIDGYFKIYSKHTPINLVRDLPQGFSALEPLVDLPIGINITRFQTLLALHRSYLTPGDSSSGWTAGAAAYYVGYLQPRTFLLKYNENGTITDAVDCALDPLSETKCTLKSFTVEKGIYQTSNFRVQPTESIVRFPNITNLCPFGEVFNATRFASVYAWNRKRISNCVADYSVLYNSASFSTFKCYGVSPTKLNDLCFTNVYADSFVIRGDEVRQIAPGQTGKIADYNYKLPDDFTGCVIAWNSNNLDSKVGGNYNYLYRLFRKSNLKPFERDISTEIYQAGSTPCNGVEGFNCYFPLQSYGFQPTNGVGYQPYRVVVLSFELLHAPATVCGPKKSTNLVKNKCVNFNFNGLTGTGVLTESNKKFLPFQQFGRDIADTTDAVRDPQTLEILDITPCSFGGVSVITPGTNTSNQVAVLYQGVNCTEVPVAIHADQLTPTWRVYSTGSNVFQTRAGCLIGAEHVNNSYECDIPIGAGICASYQTQTNSPRRARSVASQSIIAYTMSLGAENSVAYSNNSIAIPTNFTISVTTEILPVSMTKTSVDCTMYICGDSTECSNLLLQYGSFCTQLNRALTGIAVEQDKNTQEVFAQVKQIYKTPPIKDFGGFNFSQILPDPSKPSKRSFIEDLLFNKVTLADAGFTKQYGDCLGDIAARDLICAQKFNGLTVLPPLLTDEMIAQYTSALLAGTITSGWTFGAGAALQIPFAMQMAYRFNGIGVTQCVLYENQKLIANQFNSAIGKIQDSLSSTASALGKLQDVVNQNAQALNTLVKQLSSNFGAISSVLNDILSRLDKVEAEVQIDRLITGRLQSLQTYVTQQLIRAAEIRASANLAATKMSECVLGQSKRVDFCGKGYHLMSFPQSAPHGVVFLHVTYVPAQEKNFTTAPAICHDGKAHFPREGVFVSNGTHWFVTQRNFYEPQIITTDNTFVCGNCDVVIGIVNNTVYDPLQPELDSFKEELDKYFKNHTSPDVDLGDISGINASVVNIQKEIDRLNEVAKNLNESLIDLQELGKYEQYIKGGGSGGGQIYEGKLTAEGLRFGIVASRFNHALVDRLVEGAIDAIVRHGGREEDITLVRVPGSWEIPVAAGELARKEDIDAVIAIGVLIRGATPHFDYIASEVSKGLADLSLELRKPITFGVITADTLEQAIERAGTKHGNKGWEAALSAIEMANLFKSLR

SEQ ID NO: 13639 - protein, 1371 aa, Artificial Sequence
  SARS-CoV-2/Australia/NSW56/2020__EPI_ISL_417408 spike protein (1-1211)(N914C_S1123C) LumSynth construct
MFVFLVLLPLVSSQCVNLTTRTQLPPAYTNSFTRGVYYPDKVFRSSVLHSTQDLFLPFFSNVTWFHAIHVSGTNGTKRFDNPVLPFNDGVYFASTEKSNIIRGWIFGTTLDSKTQSLLIVNNATNVVIKVCEFQFCNDPFLGVYYHKNNKSWMESEFRVYSSANNCTFEYVSQPFLMDLEGKQGNFKNLREFVFKNIDGYFKIYSKHTPINLVRDLPQGFSALEPLVDLPIGINITRFQTLLALHRSYLTPGDSSSGWTAGAAAYYVGYLQPRTFLLKYNENGTITDAVDCALDPLSETKCTLKSFTVEKGIYQTSNFRVQPTESIVRFPNITNLCPFGEVFNATRFASVYAWNRKRISNCVADYSVLYNSASFSTFKCYGVSPTKLNDLCFTNVYADSFVIRGDEVRQIAPGQTGKIADYNYKLPDDFTGCVIAWNSNNLDSKVGGNYNYLYRLFRKSNLKPFERDISTEIYQAGSTPCNGVEGFNCYFPLQSYGFQPTNGVGYQPYRVVVLSFELLHAPATVCGPKKSTNLVKNKCVNFNFNGLTGTGVLTESNKKFLPFQQFGRDIADTTDAVRDPQTLEILDITPCSFGGVSVITPGTNTSNQVAVLYQDVNCTEVPVAIHADQLTPTWRVYSTGSNVFQTRAGCLIGAEHVNNSYECDIPIGAGICASYQTQTNSPRRARSVASQSIIAYTMSLGAENSVAYSNNSIAIPTNFTISVTTEILPVSMTKTSVDCTMYICGDSTECSNLLLQYGSFCTQLNRALTGIAVEQDKNTQEVFAQVKQIYKTPPIKDFGGFNFSQILPDSSKPSKRSFIEDLLFNKVTLADAGFIKQYGDCLGDIAARDLICAQKFNGLTVLPPLLTDEMIAQYTSALLAGTITSGWTFGAGAALQIPFAMQMAYRFNGIGVTQCVLYENQKLIANQFNSAIGKIQDSLSSTASALGKLQDVVNQNAQALNTLVKQLSSNFGAISSVLNDILSRLDKVEAEVQIDRLITGRLQSLQTYVTQQLIRAAEIRASANLAATKMSECVLGQSKRVDFCGKGYHLMSFPQSAPHGVVFLHVTYVPAQEKNFTTAPAICHDGKAHFPREGVFVSNGTHWFVTQRNFYEPQIITTDNTFVCGNCDVVIGIVNNTVYDPLQPELDSFKEELDKYFKNHTSPDVDLGDISGINASVVNIQKEIDRLNEVAKNLNESLIDLQELGKYEQYIKGGGSGGGQIYEGKLTAEGLRFGIVASRFNHALVDRLVEGAIDAIVRHGGREEDITLVRVPGSWEIPVAAGELARKEDIDAVIAIGVLIRGATPHFDYIASEVSKGLADLSLELRKPITFGVITADTLEQAIERAGTKHGNKGWEAALSAIEMANLFKSLR

SEQ ID NO: 13640 - protein, 1371 aa, Artificial Sequence
  SARS-CoV-2/Iceland/280/2020__EPI_ISL_417608 spike protein (1-1211)(N914C_S1123C) LumSynth construct
MFVFLVLLPLVSSQCVNLTTRTQLPPAYTNSFTRGVYYPDKVFRSSVLHSTQDLFLPFFSNVTWFHAIHVSGTNGTKRFDNPVLPFNDGVYFASTEKSNIIRGWIFGTTLDSKTQSLLIVNNATNVVIKVCEFQFCNDPFLGVYYHKNNKSWMESEFRVYSSANNCTFEYVSQPFLMDLEGKQGNFKNLREFVFKNIDGYFKIYSKHTPINLVRDLPQGFSALEPLVDLPIGINITRFQTLLALHRSYLTPGDSSSGWTAGAAAYYVGYLQPRTFLLKYNENGTITDAVDCALDPLSETKCTLKSFTVEKGIYQTSNFRVQPTESIVRFPNITNLCPFGEVFNATRFASVYAWNRKRISNCVADYSVLYNSASFSTFKCYGVSPTKLNDLCFTNVYADSFVIRGDEVRQIAPGQTGKIADYNYKLPDDFTGCVIAWNSNNLDSKVGGNYNYLYRLFRKSNLKPFERDISTEIYQAGSTPCNGVEGFNCYFPLQSYGFQPTNGVGYQPYRVVVLSFELLHAPATVCGPKKSTNLVKNKCVNFNFNGLTGTGVLTESNKKFLPFQQFGRDIADTTDAVRDPQTLEILDITPCSFGGVSVITPGTNTSNQVAVLYQGVNCTEVPVAIHADQLTPTWRVYSTGSNVFQTRAGCLIGAEHVNNSYECDIPIGAGICASYHTQTNSPRRARSVASQSIIAYTMSLGAENSVAYSNNSIAIPTNFTISVTTEILPVSMTKTSVDCTMYICGDSTECSNLLLQYGSFCTQLNRALTGIAVEQDKNTQEVFAQVKQIYKTPPIKDFGGFNFSQILPDPSKPSKRSFIEDLLFNKVTLADAGFIKQYGDCLGDIAARDLICAQKFNGLTVLPPLLTDEMIAQYTSALLAGTITSGWTFGAGAALQIPFAMQMAYRFNGIGVTQCVLYENQKLIANQFNSAIGKIQDSLSSTASALGKLQDVVNQNAQALNTLVKQLSSNFGAISSVLNDILSRLDKVEAEVQIDRLITGRLQSLQTYVTQQLIRAAEIRASANLAATKMSECVLGQSKRVDFCGKGYHLMSFPQSAPHGVVFLHVTYVPAQEKNFTTAPAICHDGKAHFPREGVFVSNGTHWFVTQRNFYEPQIITTDNTFVCGNCDVVIGIVNNTVYDPLQPELDSFKEELDKYFKNHTSPDVDLGDISGINASVVNIQKEIDRLNEVAKNLNESLIDLQELGKYEQYIKGGGSGGGQIYEGKLTAEGLRFGIVASRFNHALVDRLVEGAIDAIVRHGGREEDITLVRVPGSWEIPVAAGELARKEDIDAVIAIGVLIRGATPHFDYIASEVSKGLADLSLELRKPITFGVITADTLEQAIERAGTKHGNKGWEAALSAIEMANLFKSLR

SEQ ID NO: 13641 - protein, 1371 aa, Artificial Sequence; identical to SEQ ID NO: 13596
  SARS-CoV-2/Iceland/247/2020__EPI_ISL_417575 spike protein (1-1211)(N914C_S1123C) LumSynth construct

SEQ ID NO: 13642 - protein, 1371 aa, Artificial Sequence
  SARS-CoV-2/Iceland/238/2020__EPI_ISL_417566 spike protein (1-1211)(N914C_S1123C) LumSynth construct
MFVFLVLLPLVSSQCVNLTTRTQLPPAYTNSFTRGVYYPDKVFRSSVLHSTQDLFLPFFSNVTWFHAIHVSGTNGTKRFDNPVLPFNDGVYFASTEKSNIIRGWIFGTTLDSKTQSLLIVNNATNVVIKVCEFQFCNDPFLGVYYHKNNKSWMESEFRVYSSANNCTFEYVSQPFLMDLEGKQGNFKNLREFVFKNIDGYFKIYSKHTPINLVRDLPQGFSALEPLVDLPIGINITRFQTLLALHRSYLTPGDSSSGWTAGAAAYYVGYLQPRTFLLKYNENGTITDAVDCALDPLSETKCTLKSFTVEKGIYQTSNFRVQPTESIVRFPNITNLCPFGEVFNATRFASVYAWNRKRISNCVADYSVLYNSASFSTFKCYGVSPTKLNDLCFTNVYADSFVIRGDEVRQIAPGQTGKIADYNYKLPDDFTGCVIAWNSNNLDSKVGGNYNYLYRLFRKSNLKPFERDISTEIYQAGSTPCNGVEGFNCYFPLQSYGFQPTNGVGYQPYRVVVLSFELLHAPATVCGPKKSTNLVKNKCVNFNFNGLTGTGVLTESNKKFLPFQQFGRDIADTTDAVRDPQTLEILDITPCSFGGVSVITPGTNTSNQVAVLYQGVNCTEVPVAIHADQLTPTWRVYSTGSNVFQTRAGCLIGAEHVNNSYECDIPIGAGICASYQTQTNSPRRARSVASQSIIAYTMSLGAENSVAYSNNSIAIPTNFTISVTTEILPVSMTKTSVDCTMYICGDSTECSNLLLQYGSFCTQLNRALTGIAVEQDKNTQEVFAQVKQIYKTPPIKDFGGFNFSQILPDPSKPSKRSFIEDLLFNKVTLADVGFIKQYGDCLGDIAARDLICAQKFNGLTVLPPLLTDEMIAQYTSALLAGTITSGWTFGAGAALQIPFAMQMAYRFNGIGVTQCVLYENQKLIANQFNSAIGKIQDSLSSTASALGKLQDVVNQNAQALNTLVKQLSSNFGAISSVLNDILSRLDKVEAEVQIDRLITGRLQSLQTYVTQQLIRAAEIRASANLAATKMSECVLGQSKRVDFCGKGYHLMSFPQSAPHGVVFLHVTYVPAQEKNFTTAPAICHDGKAHFPREGVFVSNGTHWFVTQRNFYEPQIITTDNTFVCGNCDVVIGIVNNTVYDPLQPELDSFKEELDKYFKNHTSPDVDLGDISGINASVVNIQKEIDRLNEVAKNLNESLIDLQELGKYEQYIKGGGSGGGQIYEGKLTAEGLRFGIVASRFNHALVDRLVEGAIDAIVRHGGREEDITLVRVPGSWEIPVAAGELARKEDIDAVIAIGVLIRGATPHFDYIASEVSKGLADLSLELRKPITFGVITADTLEQAIERAGTKHGNKGWEAALSAIEMANLFKSLR

SEQ ID NO: 13643 - protein, 1371 aa, Artificial Sequence
  SARS-CoV-2/Greece/16/2020__EPI_ISL_418265 spike protein (1-1211)(N914C_S1123C) LumSynth construct
MFVFLVLLPLVSSQCVNLTTRTQLPPAYTNSFTRGVYYPDKVFRSSVLHSTQDLFLPFFSNVTWFHAIHVSGTNGTKRFDNPVLPFNDGVYFASTEKSNIIRGWIFGTTLDSKTQSLLIVNNATNVVIKVCEFQFCNDPFLGVYYHKNNKSWMESEFRVYSSANNCTFEYVSQPFLMDLEGKQGNFKNLREFVFKNVDGYFKIYSKHTPINLVRDLPQGFSALEPLVDLPIGINITRFQTLLALHRSYLTPGDSSSGWTAGAAAYYVGYLQPRTFLLKYNENGTITDAVDCALDPLSETKCTLKSFTVEKGIYQTSNFRVQPTESIVRFPNITNLCPFGEVFNATRFASVYAWNRKRISNCVADYSVLYNSASFSTFKCYGVSPTKLNDLCFTNVYADSFVIRGDEVRQIAPGQTGKIADYNYKLPDDFTGCVIAWNSNNLDSKVGGNYNYLYRLFRKSNLKPFERDISTEIYQAGSTPCNGVEGFNCYFPLQSYGFQPTNGVGYQPYRVVVLSFELLHAPATVCGPKKSTNLVKNKCVNFNFNGLTGTGVLTESNKKFLPFQQFGRDIADTTDAVRDPQTLEILDITPCSFGGVSVITPGTNTSNQVAVLYQDVNCTEVPVAIHADQLTPTWRVYSTGSNVFQTRAGCLIGAEHVNNSYECDIPIGAGICASYQTQTNSPRRARSVASQSIIAYTMSLGAENSVAYSNNSIAIPTNFTISVTTEILPVSMTKTSVDCTMYICGDSTECSNLLLQYGSFCTQLNRALTGIAVEQDKNTQEVFAQVKQIYKTPPIKDFGGFNFSQILPDPSKPSKRSFIEDLLFNKVTLADAGFIKQYGDCLGDIAARDLICAQKFNGLTVLPPLLTDEMIAQYTSALLAGTITSGWTFGAGAALQIPFAMQMAYRFNGIGVTQCVLYENQKLIANQFNSAIGKIQDSLSSTASALGKLQDVVNQNAQALNTLVKQLSSNFGAISSVLNDILSRLDKVEAEVQIDRLITGRLQSLQTYVTQQLIRAAEIRASANLAATKMSECVLGQSKRVDFCGKGYHLMSFPQSAPHGVVFLHVTYVPAQEKNFTTAPAICHDGKAHFPREGVFVSNGTHWFVTQRNFYEPQIITTDNTFVCGNCDVVIGIVNNTVYDPLQPELDSFKEELDKYFKNHTSPDVDLGDISGINASVVNIQKEIDRLNEVAKNLNESLIDLQELGKYEQYIKGGGSGGGQIYEGKLTAEGLRFGIVASRFNHALVDRLVEGAIDAIVRHGGREEDITLVRVPGSWEIPVAAGELARKEDIDAVIAIGVLIRGATPHFDYIASEVSKGLADLSLELRKPITFGVITADTLEQAIERAGTKHGNKGWEAALSAIEMANLFKSLR

SEQ ID NO: 13644 - protein, 1371 aa, Artificial Sequence
  SARS-CoV-2/Iceland/319/2020__EPI_ISL_417648 spike protein (1-1211)(N914C_S1123C) LumSynth construct
MFVFLVLLPLVSSQCVNLTTRTQLPPAYTNSFTRGVYYPDKVFRSSVLHSTQDLFLPFFSNVTWFHAIHVSGTNGTKRFDNPVLPFNDGVYFASTEKSNIIRGWIFGTTLDSKTQSLLIVNNATNVVIKVCEFQFCNDPFLGVYYHKNNKSWMESEFRVYSSANNCTFEYVSQPFLIDLEGKQGNFKNLREFVFKNIDGYFKIYSKHTPINLVRDLPQGFSALEPLVDLPIGINITRFQTLLALHRSYLTPGDSSSGWTAGAAAYYVGYLQPRTFLLKYNENGTITDAVDCALDPLSETKCTLKSFTVEKGIYQTSNFRVQPTESIVRFPNITNLCPFGEVFNATRFASVYAWNRKRISNCVADYSVLYNSASFSTFKCYGVSPTKLNDLCFTNVYADSFVIRGDEVRQIAPGQTGKIADYNYKLPDDFTGCVIAWNSNNLDSKVGGNYNYLYRLFRKSNLKPFERDISTEIYQAGSTPCNGVEGFNCYFPLQSYGFQPTNGVGYQPYRVVVLSFELLHAPATVCGPKKSTNLVKNKCVNFNFNGLTGTGVLTESNKKFLPFQQFGRDIADTTDAVRDPQTLEILDITPCSFGGVSVITPGTNTSNQVAVLYQGVNCTEVPVAIHADQLTPTWRVYSTGSNVFQTRAGCLIGAEHVNNSYECDIPIGAGICASYQTQTNSPRRARSVASQSIIAYTMSLGAENSVAYSNNSIAIPTNFTISVTTEILPVSMTKTSVDCTMYICGDSTECSNLLLQYGSFCTQLNRALTGIAVEQDKNTQEVFAQVKQIYKTPPIKDFGGFNFSQILPDPSKPSKRSFIEDLLFNKVTLADAGFIKQYGDCLGDIAARDLICAQKFNGLTVLPPLLTDEMIAQYTSALLAGTITSGWTFGAGAALQIPFAMQMAYRFNGIGVTQCVLYENQKLIANQFNSAIGKIQDSLSSTASALGKLQDVVNQNAQALNTLVKQLSSNFGAISSVLNDILSRLDKVEAEVQIDRLITGRLQSLQTYVTQQLIRAAEIRASANLAATKMSECVLGQSKRVDFCGKGYHLMSFPQSAPHGVVFLHVTYVPAQEKNFTTAPAICHDGKAHFPREGVFVSNGTHWFVTQRNFYEPQIITTDNTFVCGNCDVVIGIVNNTVYDPLQPELDSFKEELDKYFKNHTSPDVDLGDISGINASVVNIQKEIDRLNEVAKNLNESLIDLQELGKYEQYIKGGGSGGGQIYEGKLTAEGLRFGIVASRFNHALVDRLVEGAIDAIVRHGGREEDITLVRVPGSWEIPVAAGELARKEDIDAVIAIGVLIRGATPHFDYIASEVSKGLADLSLELRKPITFGVITADTLEQAIERAGTKHGNKGWEAALSAIEMANLFKSLR

SEQ ID NO: 13645 - protein, 1371 aa, Artificial Sequence
  SARS-CoV-2/Congo/94/2020__EPI_ISL_417947 spike protein (1-1211)(N914C_S1123C) LumSynth construct
MFVFLVLLPLVSSQCVNLTTRTQLPPAYTNSFTRGVYYPDKVFRSSVLHSTQDLFLPFFSNVTWFHAIHVSGTNGTKRFDNPVLPFNDGVYFASTEKSNIIRGWIFGTTLDSKTQSLLIVNNATNVVIKVCEFQFCNDPFLGVYYHKNNKSWMESEFRVYSSANNCTFEYVSQPFLMDLEGKQGNFKNLREFVFKNIDGYFKIYSKHTPINLVRDLPQGFSALEPLVDLPIGINITRFQTLLALHRSYLTPGDSSSGWTAGAAAYYVGYLQPRTFLLKYNENGTITDAVDCALDPLSETKCTLKSFTVEKGIYQTSNFRVQPTESIVRFPNITNLCPFGEVFNATRFASVYAWNRKRISNCVADYSVLYNSASFSTFKCYGVSPTKLNDLCFTNVYADSFVIRGDEVRQIAPGQTGKIADYNYKLPDDFTGCVIAWNSNNLDSKVGGNYNYLYRLFRKSNLKPFERDISTEIYQAGSTPCNGVEGFNCYFPLQSYGFQPTNGVGYQPYRVVVLSFELLHAPATVCGPKKSTNLVKNKCVNFNFNGLTGTGVLTESNKKFLPFQQFGRDIADTTDAVRDPQTLEILDITPCSFGGVSVITPGTNTSNQVAVLYQGVNCTEVPVAIHADQLTPTWRVYSTGSNVFQTRAGCLIGAEHVNNSYECDIPIGAGICASYQTQTNSPRRARSVASQSIIAYTMSLGAENSVAYSNNSIAIPTNFTISVTTEILPVSMTKTSVDCTMYICGDSTECSNLLLQYGSFCTQLNRALTGIAVEQDKNTQEVFAQVKQIYKTPPIKDFGGFNFSQILPDPSKPSKRSFIEDILFNKVTLADAGFIKQYGDCLGDIAARDLICAQKFNGLTVLPPLLTDEMIAQYTSALLAGTITSGWTFGAGAALQIPFAMQMAYRFNGIGVTQCVLYENQKLIANQFNSAIGKIQDSLSSTASALGKLQDVVNQNAQALNTLVKQLSSNFGAISSVLNDILSRLDKVEAEVQIDRLITGRLQSLQTYVTQQLIRAAEIRASANLAATKMSECVLGQSKRVDFCGKGYHLMSFPQSAPHGVVFLHVTYVPAQEKNFTTAPAICHDGKAHFPREGVFVSNGTHWFVTQRNFYEPQIITTDNTFVCGNCDVVIGIVNNTVYDPLQPELDSFKEELDKYFKNHTSPDVDLGDISGINASVVNIQKEIDRLNEVAKNLNESLIDLQELGKYEQYIKGGGSGGGQIYEGKLTAEGLRFGIVASRFNHALVDRLVEGAIDAIVRHGGREEDITLVRVPGSWEIPVAAGELARKEDIDAVIAIGVLIRGATPHFDYIASEVSKGLADLSLELRKPITFGVITADTLEQAIERAGTKHGNKGWEAALSAIEMANLFKSLR

SEQ ID NO: 13646 - protein, 1371 aa, Artificial Sequence
  SARS-CoV-2/Congo/158/2020__EPI_ISL_417950 spike protein (1-1211)(N914C_S1123C) LumSynth construct
MFVFLVLLPLVSSQCVNLTTRTQLPPAYTNSFTRGVYYPDKVFRSSVLHSTQDLFLPFFSNVTWFHAIHVSGTNGTKRFDNPVLPFNDGVYFASTEKSNIIRGWIFGTTLDSKTQSLLIVNNATNVVIKVCEFQFCNDPFLGVYYHKNNKSWMESEFRVYSSANNCTFEYVSQPFLMDLEGKQGNFKNLREFVFKNIDGYFKIYSKHTPINLVRDLPQGFSALEPLVDLPIGINITRFQTLLALHRSYLTPGDSSSGWTAGAAAYYVGYLQPRTFLLKYNENGTITDAVDCALDPLSETKCTLKSFTVEKGIYQTSNFRVQPTESIVRFPNITNLCPFGEVFNATRFASVYAWNRKRISNCVADYSVLYNSASFSTFKCYGVSPTKLNDLCFTNVYADSFVIRGDEVRQIAPGQTGKIADYNYKLPDDFTGCVIAWNSNNLDSKVGGNYNYLYRLFRKSNLKPFERDISTEIYQAGSTPCNGVEGFNCYFPLQSYGFQPTNGVGYQPYRVVVLSFELLHAPATVCGPKKSTNLVKNKCVNFNFNGLTGTGVLTESNKKFLPFQQFGRDIADTTDAVRDPQTLEILDITPCSFGGVSVITPGTNTSNQVAVLYQDVNCTEVPVAIHADQLTPTWRVYSTGSNVFQTRAGCLIGAEHVNNSYECDIPIGAGICASYQTQTNSPRRARSVASQSIIAYTMSLGAENSVAYSNNSIAIPTNFTISVTTEILPVSMTKTSVDCTMYICGDSTECSNLLLQYGSFCTQLNRALTGIAVEQDKNTQEVFAQVKQIYKTPPIKDFGGFNFSQILPDPSKPSKRSFIEDLLFNKVTLADAGFIKQYGDCLGDIAARDLICAQKFNGLTVLPPLLTDEMIAQYTSALLAGTITSGWTFGAGAALQIPFAMQMAYRFNGIGVTQCVLYENQKLIANQFNSAIGKIQDSLSSTASALGKLQDVVNQNAQALNTLVKQLSSNFGAISSVLNDILSRLDKVEAEVQIDRLITGRLQSLQTYVTQQLIRAAEIRASANLAATKMSECVLGQSKRVDFCGKGYHLMSFPQSAPHGVVFLHVTYVPAQEKNFTTAPAICHDGKAHFPREGVFVSNGTHWFVTQRNFYEPQIITTDNTFLCGNCDVVIGIVNNTVYDPLQPELDSFKEELDKYFKNHTSPDVDLGDISGINASVVNIQKEIDRLNEVAKNLNESLIDLQELGKYEQYIKGGGSGGGQIYEGKLTAEGLRFGIVASRFNHALVDRLVEGAIDAIVRHGGREEDITLVRVPGSWEIPVAAGELARKEDIDAVIAIGVLIRGATPHFDYIASEVSKGLADLSLELRKPITFGVITADTLEQAIERAGTKHGNKGWEAALSAIEMANLFKSLR

SEQ ID NO: 13647 - protein, 1371 aa, Artificial Sequence
  SARS-CoV-2/USA/UT-00034/2020__EPI_ISL_417977 spike protein (1-1211)(N914C_S1123C) LumSynth construct
MFVFLVLLPLVSSQCVNLTTRTQLPPAYTNSFTRGVYYPDKVFRSSVLHSTQDLFLPFFSNVTWFHAIHVSGTNGTKRFDNPVLPFNDGVYFASTEKSNIIRGWIFGTTLDSKTQSLLIVNNATNVVIKVCEFQFCNDPFLGVYYYKNNKSWMESEFRVYSSANNCTFEYVSQPFLMDLEGKQGNFKNLREFVFKNIDGYFKIYSKHTPINLVRDLPQGFSALEPLVDLPIGINITRFQTLLALHRSYLTPGDSSSGWTAGAAAYYVGYLQPRTFLLKYNENGTITDAVDCALDPLSETKCTLKSFTVEKGIYQTSNFRVQPTESIVRFPNITNLCPFGEVFNATRFASVYAWNRKRISNCVADYSVLYNSASFSTFKCYGVSPTKLNDLCFTNVYADSFVIRGDEVRQIAPGQTGKIADYNYKLPDDFTGCVIAWNSNNLDSKVGGNYNYLYRLFRKSNLKPFERDISTEIYQAGSTPCNGVEGFNCYFPLQSYGFQPTNGVGYQPYRVVVLSFELLHAPATVCGPKKSTNLVKNKCVNFNFNGLTGTGVLTESNKKFLPFQQFGRDIADTTDAVRDPQTLEILDITPCSFGGVSVITPGTNTSNQVAVLYQGVNCTEVPVAIHADQLTPTWRVYSTGSNVFQTRAGCLIGAEHVNNSYECDIPIGAGICASYQTQTNSPRRARSVASQSIIAYTMSLGAENSVAYSNNSIAIPTNFTISVTTEILPVSMTKTSVDCTMYICGDSTECSNLLLQYGSFCTQLNRALTGIAVEQDKNTQEVFAQVKQIYKTPPIKDFGGFNFSQILPDPSKPSKRSFIEDLLFNKVTLADAGFIKQYGDCLGDIAARDLICAQKFNGLTVLPPLLTDEMIAQYTSALLAGTITSGWTFGAGAALQIPFAMQMAYRFNGIGVTQCVLYENQKLIANQFNSAIGKIQDSLSSTASALGKLQDVVNQNAQALNTLVKQLSSNFGAISSVLNDILSRLDKVEAEVQIDRLITGRLQSLQTYVTQQLIRAAEIRASANLAATKMSECVLGQSKRVDFCGKGYHLMSFPQSAPHGVVFLHVTYVPAQEKNFTTAPAICHDGKAHFPREGVFVSNGTHWFVTQRNFYEPQIITTDNTFVCGNCDVVIGIVNNTVYDPLQPELDSFKEELDKYFKNHTSPDVDLGDISGINASVVNIQKEIDRLNEVAKNLNESLIDLQELGKYEQYIKGGGSGGGQIYEGKLTAEGLRFGIVASRFNHALVDRLVEGAIDAIVRHGGREEDITLVRVPGSWEIPVAAGELARKEDIDAVIAIGVLIRGATPHFDYIASEVSKGLADLSLELRKPITFGVITADTLEQAIERAGTKHGNKGWEAALSAIEMANLFKSLR

SEQ ID NO: 13648 - protein, 1371 aa, Artificial Sequence
  SARS-CoV-2/USA/UT-00033/2020__EPI_ISL_417976 spike protein (1-1211)(N914C_S1123C) LumSynth construct
MFVFLVLLPLVSSQCVNLTTRTQLPPAYTNSFTRGVYYPDKVFRSSVLHSTQDLFLPFFSNVTWFHAIHVSGTNGTKRFDNPVLPFNDGVYFASTEKSNIIRGWIFGTTLDSKTQSLLIVNNATNVVIKVCEFQFCNDPFLGVYYHKNNKSWMESEFRVYSSANNCTFEYVSQPFLMDLEGKQGNFKNLREFVFKNIDGYFKIYSKHTPINLVRDLPQGFSALEPLVDLPIGINITRFQTLLALHRSYLTPGDSSSGLTAGAAAYYVGYLQPRTFLLKYNENGTITDAVDCALDPLSETKCTLKSFTVEKGIYQTSNFRVQPTESIVRFPNITNLCPFGEVFNATRFASVYAWNRKRISNCVADYSVLYNSASFSTFKCYGVSPTKLNDLCFTNVYADSFVIRGDEVRQIAPGQTGKIADYNYKLPDDFTGCVIAWNSNNLDSKVGGNYNYLYRLFRKSNLKPFERDISTEIYQAGSTPCNGVEGFNCYFPLQSYGFQPTNGVGYQPYRVVVLSFELLHAPATVCGPKKSTNLVKNKCVNFNFNGLTGTGVLTESNKKFLPFQQFGRDIADTTDAVRDPQTLEILDITPCSFGGVSVITPGTNTSNQVAVLYQGVNCTEVPVAIHADQLTPTWRVYSTGSNVFQTRAGCLIGAEHVNNSYECDIPIGAGICASYQTQTNSPRRARSVASQSIIAYTMSLGAENSVAYSNNSIAIPTNFTISVTTEILPVSMTKTSVDCTMYICGDSTECSNLLLQYGSFCTQLNRALTGIAVEQDKNTQEVFAQVKQIYKTPPIKDFGGFNFSQILPDPSKPSKRSFIEDLLFNKVTLADAGFIKQYGDCLGDIAARDLICAQKFNGLTVLPPLLTDEMIAQYTSALLAGTITSGWTFGAGAALQIPFAMQMAYRFNGIGVTQCVLYENQKLIANQFNSAIGKIQDSLSSTASALGKLQDVVNQNAQALNTLVKQLSSNFGAISSVLNDILSRLDKVEAEVQIDRLITGRLQSLQTYVTQQLIRAAEIRASANLAATKMSECVLGQSKRVDFCGKGYHLMSFPQSAPHGVVFLHVTYVPAQEKNFTTAPAICHDGKAHFPREGVFVSNGTHWFVTQRNFYEPQIITTDNTFVCGNCDVVIGIVNNTVYDPLQPELDSFKEELDKYFKNHTSPDVDLGDISGINASVVNIQKEIDRLNEVAKNLNESLIDLQELGKYEQYIKGGGSGGGQIYEGKLTAEGLRFGIVASRFNHALVDRLVEGAIDAIVRHGGREEDITLVRVPGSWEIPVAAGELARKEDIDAVIAIGVLIRGATPHFDYIASEVSKGLADLSLELRKPITFGVITADTLEQAIERAGTKHGNKGWEAALSAIEMANLFKSLR

SEQ ID NO: 13649 - protein, 1371 aa, Artificial Sequence
  SARS-CoV-2/USA/WI-13/2020__EPI_ISL_417516 spike protein (1-1211)(N914C_S1123C) LumSynth construct
MFVFLVLLPLVSSQCVNLTTRTQLPPAYTNSFTRGVYYPDKVFRSSVLHSTQDLFLPFFSNVTWFHAIHVSGTNGTKRFDNPVLPFNDGVYFASTEKSNIIRGWIFGTTLDSKTQSLLIVNNATNVVIKVCEFQFCNDPFLGVYYHKNNKSWMESEFRVYSSANNCTFEYVSQPFLMDLEGKQGNFKNLREFVFKNIDGYFKIYSKHTPINLVRDLPQGFSALEPLVDLPIGINITRFQTLLALHRSYLTPGDSSSGWTAGAAAYYVGYLQPRTFLLKYNENGTITDAVDCALDPLSETKCTLKSFTVEKGIYQTSNFRVLPTESIVRFPNITNLCPFGEVFNATRFASVYAWNRKRISNCVADYSVLYNSASFSTFKCYGVSPTKLNDLCFTNVYADSFVIRGDEVRQIAPGQTGKIADYNYKLPDDFTGCVIAWNSNNLDSKVGGNYNYLYRLFRKSNLKPFERDISTEIYQAGSTPCNGVEGFNCYFPLQSYGFQPTNGVGYQPYRVVVLSFELLHAPATVCGPKKSTNLVKNKCVNFNFNGLTGTGVLTESNKKFLPFQQFGRDIADTTDAVRDPQTLEILDITPCSFGGVSVITPGTNTSNQVAVLYQGVNCTEVPVAIHADQLTPTWRVYSTGSNVFQTRAGCLIGAEHVNNSYECDIPIGAGICASYQTQTNSPRRARSVASQSIIAYTMSLGAENSVAYSNNSIAIPTNFTISVTTEILPVSMTKTSVDCTMYICGDSTECSNLLLQYGSFCTQLNRALTGIAVEQDKNTQEVFAQVKQIYKTPPIKDFGGFNFSQILPDPSKPSKRSFIEDLLFNKVTLADAGFIKQYGDCLGDIAARDLICAQKFNGLTVLPPLLTDEMIAQYTSALLAGTITSGWTFGAGAALQIPFAMQMAYRFNGIGVTQCVLYENQKLIANQFNSAIGKIQDSLSSTASALGKLQDVVNQNAQALNTLVKQLSSNFGAISSVLNDILSRLDKVEAEVQIDRLITGRLQSLQTYVTQQLIRAAEIRASANLAATKMSECVLGQSKRVDFCGKGYHLMSFPQSAPHGVVFLHVTYVPAQEKNFTTAPAICHDGKAHFPREGVFVSNGTHWFVTQRNFYEPQIITTDNTFVCGNCDVVIGIVNNTVYDPLQPELDSFKEELDKYFKNHTSPDVDLGDISGINASVVNIQKEIDRLNEVAKNLNESLIDLQELGKYEQYIKGGGSGGGQIYEGKLTAEGLRFGIVASRFNHALVDRLVEGAIDAIVRHGGREEDITLVRVPGSWEIPVAAGELARKEDIDAVIAIGVLIRGATPHFDYIASEVSKGLADLSLELRKPITFGVITADTLEQAIERAGTKHGNKGWEAALSAIEMANLFKSLR

SEQ ID NO: 13650 - protein, 1370 aa, Artificial Sequence
  SARS-CoV-2/India/1-27/2020__EPI_ISL_413522 spike protein (1-1210)(N913C_S1122C) LumSynth construct
MFVFLVLLPLVSSQCVNLTTRTQLPPAYTNSFTRGVYYPDKVFRSSVLHSTQDLFLPFFSNVTWFHAIHVSGTNGTKRFDNPVLPFNDGVYFASTEKSNIIRGWIFGTTLDSKTQSLLIVNNATNVVIKVCEFQFCNDPFLGVYHKNNKSWMESEFRVYSSANNCTFEYVSQPFLMDLEGKQGNFKNLREFVFKNIDGYFKIYSKHTPINLVRDLPQGFSALEPLVDLPIGINITRFQTLLALHRSYLTPGDSSSGWTAGAAAYYVGYLQPRTFLLKYNENGTITDAVDCALDPLSETKCTLKSFTVEKGIYQTSNFRVQPTESIVRFPNITNLCPFGEVFNATRFASVYAWNRKRISNCVADYSVLYNSASFSTFKCYGVSPTKLNDLCFTNVYADSFVIRGDEVIQIAPGQTGKIADYNYKLPDDFTGCVIAWNSNNLDSKVGGNYNYLYRLFRKSNLKPFERDISTEIYQAGSTPCNGVEGFNCYFPLQSYGFQPTNGVGYQPYRVVVLSFELLHAPATVCGPKKSTNLVKNKCVNFNFNGLTGTGVLTESNKKFLPFQQFGRDIADTTDAVRDPQTLEILDITPCSFGGVSVITPGTNTSNQVAVLYQDVNCTEVPVAIHADQLTPTWRVYSTGSNVFQTRAGCLIGAEHVNNSYECDIPIGAGICASYQTQTNSPRRARSVASQSIIAYTMSLGAENSVAYSNNSIAIPTNFTISVTTEILPVSMTKTSVDCTMYICGDSTECSNLLLQYGSFCTQLNRALTGIAVEQDKNTQEVFAQVKQIYKTPPIKDFGGFNFSQILPDPSKPSKRSFIEDLLFNKVTLADAGFIKQYGDCLGDIAARDLICAQKFNGLTVLPPLLTDEMIAQYTSALLAGTITSGWTFGAGAALQIPFAMQMAYRFNGIGVTQCVLYENQKLIANQFNSAIGKIQDSLSSTASALGKLQDVVNQNAQALNTLVKQLSSNFGAISSVLNDILSRLDKVEAEVQIDRLITGRLQSLQTYVTQQLIRAAEIRASANLAATKMSECVLGQSKRVDFCGKGYHLMSFPQSAPHGVVFLHVTYVPAQEKNFTTAPAICHDGKAHFPREGVFVSNGTHWFVTQRNFYEPQIITTDNTFVCGNCDVVIGIVNNTVYDPLQPELDSFKEELDKYFKNHTSPDVDLGDISGINASVVNIQKEIDRLNEVAKNLNESLIDLQELGKYEQYIKGGGSGGGQIYEGKLTAEGLRFGIVASRFNHALVDRLVEGAIDAIVRHGGREEDITLVRVPGSWEIPVAAGELARKEDIDAVIAIGVLIRGATPHFDYIASEVSKGLADLSLELRKPITFGVITADTLEQAIERAGTKHGNKGWEAALSAIEMANLFKSLR

SEQ ID NO: 13651 - protein, 1365 aa, Artificial Sequence
  SARS-CoV-2/pangolin/Guangxi/P4L/2017__EPI_ISL_410538 spike protein (1-1205)(N908C_S1117C) LumSynth construct
MFVFLFVLPLVSSQCVNLTTRTGIPPGYTNSSTRGVYYPDKVFRSSILHLTQDLFLPFFSNVTWFNTINYQGGFKKFDNPVLPFNDGVYFASTEKSNIIRGWIFGTTLDARTQSLLIVNNATNVVIKVCEFQFCTDPFLGVYYHNNNKTWVENEFRVYSSANNCTFEYISQPFLMDLEGKQGNFKNLREFVFKNVDGYFKIYSKHTPIDLVRDLPRGFAALEPLVDLPIGINITRFQTLLALHRSYLTPGNLESGWTTGAAAYYVGYLQQRTFLLSYNQNGTITDAVDCSLDPLSETKCTLKSLTVEKGIYQTSNFRVQPTISIVRFPNITNLCPFGEVFNASKFASVYAWNRKRISNCVADYSVLYNSTSFSTFKCYGVSPTKLNDLCFTNVYADSFVVKGDEVRQIAPGQTGVIADYNYKLPDDFTGCVIAWNSVKQDALTGGNYGYLYRLFRKSKLKPFERDISTEIYQAGSTPCNGQVGLNCYYPLERYGFHPTTGVNYQPFRVVVLSFELLNGPATVCGPKLSTTLVKDKCVNFNFNGLTGTGVLTTSKKQFLPFQQFGRDISDTTDAVRDPQTLEILDITPCSFGGVSVITPGTNTSNQVAVLYQDVNCTEVPMAIHAEQLTPAWRVYSAGANVFQTRAGCLVGAEHVNNSYECDIPVGAGICASYHSMSSLRSVNQRSIIAYTMSLGAENSVAYSNNSIAIPTNFTISVTTEILPVSMTKTSVDCTMYICGDSIECSNLLLQYGSFCTQLNRALTGIAVEQDKNTQEVFAQVKQIYKTPPIKDFGGFNFSQILPDPSKPSKRSFIEDLLFNKVTLADAGFIKQYGDCLGDIAARDLICAQKFNGLTVLPPLLTDEMIAQYTSALLAGTITSGWTFGAGAALQIPFAMQMAYRFNGIGVTQCVLYENQKLIANQFNSAIGKIQDSLSSTASALGKLQDVVNQNAQALNTLVKQLSSNFGAISSVLNDILSRLDKVEAEVQIDRLITGRLQSLQTYVTQQLIRAAEIRASANLAATKMSECVLGQSKRVDFCGKGYHLMSFPQSAPHGVVFLHVTYVPAQEKNFTTAPAICHEGKAHFPREGVFVSNGTHWFITQRNFYEPQIITTDNTFVCGSCDVVIGIVNNTVYDPLQPELDSFKEELDKYFKNHTSPDVDLGDISGINASVVNIQKEIDRLNEVAKNLNESPIDLQELGKYEQYIKGGGSGGGQIYEGKLTAEGLRFGIVASRFNHALVDRLVEGAIDAIVRHGGREEDITLVRVPGSWEIPVAAGELARKEDIDAVIAIGVLIRGATPHFDYIASEVSKGLADLSLELRKPITFGVITADTLEQAIERAGTKHGNKGWEAALSAIEMANLFKSLR

SEQ ID NO: 13652 - protein, 1365 aa, Artificial Sequence
  SARS-CoV-2/pangolin/Guangxi/P5L/2017__EPI_ISL_410540 spike protein (1-1205)(N908C_S1117C) LumSynth construct
MFVFLFVLPLVSSQCVNLTTRTGIPPGYTNSSTRGVYYPDKVFRSSILHLTQDLFLPFFSNVTWFNTINYQGGFKKFDNPVLPFNDGVYFASTEKSNIIRGWIFGTTLDARTQSLLIVNNATNVVIKVCEFQFCTDPFLGVYYHNNNKTWVENEFRVYSSANNCTFEYISQPFLMDLEGKQGNFKNLREFVFKNVDGYFKIYSKHTPIDLVRDLPRGFAALEPLVDLPIGINITRFQTLLALHRSYLTPGKLESGWTTGAAAYYVGYLQQRTFLLSYNQNGTITDAVDCSLDPLSETKCTLKSLTVEKGIYQTSNFRVQPTISIVRFPNITNLCPFGEVFNASKFASVYAWNRKRISNCVADYSVLYNSTSFSTFKCYGVSPTKLNDLCFTNVYADSFVVKGDEVRQIAPGQTGVIADYNYKLPDDFTGCVIAWNSVKQDALTGGNYGYLYRLFRKSKLKPFERDISTEIYQAGSTPCNGQVGLNCYYPLERYGFHPTTGVNYQPFRVVVLSFELLNGPATVCGPKLSTTLVKDKCVNFNFNGLTGTGVLTTSKKQFLPFQQFGRDISDTTDAVRDPQTLEILDITPCSFGGVSVITPGTNTSNQVAVLYQDVNCTEVPMAIHAEQLTPAWRVYSAGANVFQTRAGCLVGAEHVNNSYECDIPVGAGICASYHSMSSFRSVNQRSIIAYTMSLGAENSVAYSNNSIAIPTNFTISVTTEILPVSMTKTSVDCTMYICGDSIECSNLLLQYGSFCTQLNRALTGIAVEQDKNTQEVFAQVKQIYKTPPIKDFGGFNFSQILPDPSKPSKRSFIEDLLFNKVTLADAGFIKQYGDCLGDIAARDLICAQKFNGLTVLPPLLTDEMIAQYTSALLAGTITSGWTFGAGAALQIPFAMQMAYRFNGIGVTQCVLYENQKLIANQFNSAIGKIQDSLSSTASALGKLQDVVNQNAQALNTLVKQLSSNFGAISSVLNDILSRLDKVEAEVQIDRLITGRLQSLQTYVTQQLIRAAEIRASANLAATKMSECVLGQSKRVDFCGKGYHLMSFPQSAPHGVVFLHVTYVPAQEKNFTTAPAICHEGKAHFPREGVFVSNGTHWFITQRNFYEPQIITTDNTFVCGSCDVVIGIVNNTVYDPLQPELDSFKEELDKYFKNHTSPDVDLGDISGINASVVNIQKEIDRLNEVAKNLNESLIDLQELGKYEQYIKGGGSGGGQIYEGKLTAEGLRFGIVASRFNHALVDRLVEGAIDAIVRHGGREEDITLVRVPGSWEIPVAAGELARKEDIDAVIAIGVLIRGATPHFDYIASEVSKGLADLSLELRKPITFGVITADTLEQAIERAGTKHGNKGWEAALSAIEMANLFKSLR

SEQ ID NO: 13653 - protein, 1365 aa, Artificial Sequence
  SARS-CoV-2/pangolin/Guangxi/P5E/2017__EPI_ISL_410541 spike protein (1-1205)(N908C_S1117C) LumSynth construct
MFVFLFVLPLVSSQCVNLTTRTGIPPGYTNSSTRGVYYPDKVFRSSILHLTQDLFLPFFSNVTWFNTITYQGGSKKFDNPVLPFNDGVYFASTEKSNIIRGWIFGTTLDARTQSLLIVNNATNVVIKVCEFQFCTDPFLGVYYHNNNKTWVENEFRVYSSANNCTFEYISQPFLMDLEGKQGNFKNLREFVFKNVDGYFKIYSKHTPIDLVRDLPRGFAALEPLVDLPIGINITRFQTLLALHRSYLTPGKLESGWTTGAAAYYVGYLQQRTFLLSYNQNGTITDAVDCSLDPLSETKCTLKSLTVEKGIYQTSNFRVQPTISIVRFPNITNLCPFGEVFNASKFASVYAWNRKRISNCVADYSVLYNSTSFSTFKCYGVSPTKLNDLCFTNVYADSFVVKGDEVRQIAPGQTGVIADYNYKLPDDFTGCVIAWNSVKQDALTGDNYGYLYRLFRKSKLKPFERDISTEIYQAGSTPCNGQVGLNCYYPLERYGFHPTTGVNYQPFRVVVLSFELLNGPATVCGPKLSTTLVKDKCVNFNFNGLTGTGVLTTSKKQFLPFQQFGRDISDTTDAVRDPQTLEILDITPCSFGGVSVITPGTNTSNQVAVLYQDVNCTEVPMAIHAEQLTPAWRVYSAGANVFQTRAGCLVGAEHVNNSYECDIPVGAGICASYHSMSSFRSVNQRSIIAYTMSLGAENSVAYSNNSIAIPTNFTISVTTEILPVSMTKTSVDCTMYICGDSIECSNLLLQYGSFCTQLNRALTGIAVEQDKNTQEVFAQVKQIYKTPPIKDFGGFNFSQILPDPSKPSKRSFIEDLLFNKVTLADAGFIKQYGDCLGDIAARDLICAQKFNGLTVLPPLLTDEMIAQYTSALLAGTITSGWTFGAGAALQIPFAMQMAYRFNGIGVTQCVLYENQKLIANQFNSAIGKIQDSLSSTASALGKLQDVVNQNAQALNTLVKQLSSNFGAISSVLNDILSRLDKVEAEVQIDRLITGRLQSLQTYVTQQLIRAAEIRASANLAATKMSECVLGQSKRVDFCGKGYHLMSFPQSAPHGVVFLHVTYVPAQEKNFTTAPAICHEGKAHFPREGVFVSNGTHWFITQRNFYEPQIITTDNTFVCGSCDVVIGIVNNTVYDPLQPELDSFKEELDKYFKNHTSPDVDLGDISGINASVVNIQKEIDRLNEVAKNLNESLIDLQELGKYEQYIKGGGSGGGQIYEGKLTAEGLRFGIVASRFNHALVDRLVEGAIDAIVRHGGREEDITLVRVPGSWEIPVAAGELARKEDIDAVIAIGVLIRGATPHFDYIASEVSKGLADLSLELRKPITFGVITADTLEQAIERAGTKHGNKGWEAALSAIEMANLFKSLR

SEQ ID NO: 13654 - protein, 1363 aa, Artificial Sequence
  SARS-CoV-2/pangolin/Guangxi/P1E/2017__EPI_ISL_410539 spike protein (1-1203)(N906C_S1115C) LumSynth construct
MFVFLFVLPLVSSQCVNLTTRTGIQPGYTNSSTRGVYYPDKVFRSSILHLTQDLFLPFFSNVTWFNTINYQGGFKKFDNPVLPFNDGVYFASTEKSNIIRGWIFGTTLDARTQSLLIVNNATNVVIKVCEFQFCTDPFLGVYYHNNNKTWVENEFRVYSSANNCTFEYISQPFLMDLEGKQGNFKNLREFVFKNVDGYFKIYSKHTPIDLVRDLPRGFAALEPLVDLPIGINITRFQTLLALHRSYLTPGKLESGWTTGAAAYYVGYLQQRTFLLSYNQNGTITDAVDCSLDPLSETKCTLKSLTVEKGIYQTSNFRVQPTISIVRFPNITNLCPFGEVFNASKFASVYAWNRKRISNCVADYSVLYNSTSFSTFKCYGVSPTKLNDLCFTNVYADSFVVKGDEVRQIAPGQTGVIADYNYKLPDDFTGCVIAWNSVKQDALTGGNYLYRLFRKSKLKPFERDISTEIYQAGSTPCNGQVGLNCYYPLERYGFHPTTGVNYQPFRVVVLSFELLNGPATVCGPKLSTTLVKDKCVNFNFNGLTGTGVLTTSKKQFLPFQQFGRDISDTTDAVRDPQTLEILDITPCSFGGVSVITPGTNTSNQVAVLYQDVNCTEVPMAIHAEQLTPAWRVYSAGANVFQTRAGCLVGAEHVNNSYECDIPVGAGICASYHSMSSLRSVNQRSIIAYTMSLGAENSVAYSNNSIAIPTNFTISVTTEILPVSMTKTSVDCTMYICGDSIECSNLLLQYGSFCTQLNRALTGIAVEQDKNTQEVFAQVKQIYKTPPIKDFGGFNFSQILPDPSKPSKRSFIEDLLFNKVTLADAGFIKQYGDCLGDIAARDLICAQKFNGLTVLPPLLTDEMIAQYTSALLAGTITSGWTFGAGAALQIPFAMQMAYRFNGIGVTQCVLYENQKLIANQFNSAIGKIQDSLSSTASALGKLQDVVNQNAQALNTLVKQLSSNFGAISSVLNDILSRLDKVEAEVQIDRLITGRLQSLQTYVTQQLIRAAEIRASANLAATKMSECVLGQSKRVDFCGKGYHLMSFPQSAPHGVVFLHVTYVPAQEKNFTTAPAICHEGKAHFPREGVFVSNGTHWFITQRNFYEPQIITTDNTFVCGSCDVVIGIVNNTVYDPLQPELDSFKEELDKYFKNHTSPDVDLGDISGINASVVNIQKEIDRLNEVAKNLNESLIDLQELGKYEQYIKGGGSGGGQIYEGKLTAEGLRFGIVASRFNHALVDRLVEGAIDAIVRHGGREEDITLVRVPGSWEIPVAAGELARKEDIDAVIAIGVLIRGATPHFDYIASEVSKGLADLSLELRKPITFGVITADTLEQAIERAGTKHGNKGWEAALSAIEMANLFKSLR

SEQ ID NO: 13655 - protein, 1379 aa, Artificial Sequence
  SARS-CoV-2/Wuhan/WIV05/2019__EPI_ISL_402128 spike protein (1-1211)(N914C_S1123C) Ferritin construct
MFVFLVLLPLVSSQCVNLTTRTQLPPAYTNSFTRGVYYPDKVFRSSVLHSTQDLFLPFFSNVTWFHAIHVSGTNGTKRFDNPVLPFNDGVYFASTEKSNIIRGWIFGTTLDSKTQSLLIVNNATNVVIKVCEFQFCNDPFLGVYYHKNNKSWMESEFRVYSSANNCTFEYVSQPFLMDLEGKQGNFKNLREFVFKNIDGYFKIYSKHTPINLVRDLPQGFSALEPLVDLPIGINITRFQTLLALHRSYLTPGDSSSGWTAGAAAYYVGYLQPRTFLLKYNENGTITDAVDCALDPLSETKCTLKSFTVEKGIYQTSNFRVQPTESIVRFPNITNLCPFGEVFNATRFASVYAWNRKRISNCVADYSVLYNSASFSTFKCYGVSPTKLNDLCFTNVYADSFVIRGDEVRQIAPGQTGKIADYNYKLPDDFTGCVIAWNSNNLDSKVGGNYNYLYRLFRKSNLKPFERDISTEIYQAGSTPCNGVEGFNCYFPLQSYGFQPTNGVGYQPYRVVVLSFELLHAPATVCGPKKSTNLVKNKCVNFNFNGLTGTGVLTESNKKFLPFQQFGRDIADTTDAVRDPQTLEILDITPCSFGGVSVITPGTNTSNQVAVLYQDVNCTEVPVAIHADQLTPTWRVYSTGSNVFQTRAGCLIGAEHVNNSYECDIPIGAGICASYQTQTNSPRRARSVASQSIIAYTMSLGAENSVAYSNNSIAIPTNFTISVTTEILPVSMTKTSVDCTMYICGDSTECSNLLLQYGSFCTQLNRALTGIAVEQDKNTQEVFAQVKQIYKTPPIKDFGGFNFSQILPDPSKPSKRSFIEDLLFNKVTLADAGFIKQYGDCLGDIAARDLICAQKFNGLTVLPPLLTDEMIAQYTSALLAGTITSGWTFGAGAALQIPFAMQMAYRFNGIGVTQCVLYENQKLIANQFNSAIGKIQDSLSSTASALGKLQDVVNQNAQALNTLVKQLSSNFGAISSVLNDILSRLDKVEAEVQIDRLITGRLQSLQTYVTQQLIRAAEIRASANLAATKMSECVLGQSKRVDFCGKGYHLMSFPQSAPHGVVFLHVTYVPAQEKNFTTAPAICHDGKAHFPREGVFVSNGTHWFVTQRNFYEPQIITTDNTFVCGNCDVVIGIVNNTVYDPLQPELDSFKEELDKYFKNHTSPDVDLGDISGINASVVNIQKEIDRLNEVAKNLNESLIDLQELGKYEQYIKGGGGSDIIKLLNEQVNKEMQSSNLYMSMSSWCYTHSLDGAGLFLFDHAAEEYEHAKKLIIFLNENNVPVQLTSISAPEHKFEGLTQIFQKAYEHEQHISESINNIVDHAIKSKDHATFNFLQWYVAEQHEEEVLFKDILDKIELIGNENHGLYLADQYVKGIAKSRKS

SEQ ID NO: 13656 - protein, 1375 aa, Artificial Sequence
  SARS-CoV-2/bat/Yunnan/RaTG13/2013__EPI_ISL_402131 spike protein (1-1207)(N910C_S1119C) Ferritin construct
MFVFLVLLPLVSSQCVNLTTRTQLPPAYTNSSTRGVYYPDKVFRSSVLHLTQDLFLPFFSNVTWFHAIHVSGTNGIKRFDNPVLPFNDGVYFASTEKSNIIRGWIFGTTLDSKTQSLLIVNNATNVVIKVCEFQFCNDPFLGVYYHKNNKSWMESEFRVYSSANNCTFEYVSQPFLMDLEGKQGNFKNLREFVFKNIDGYFKIYSKHTPINLVRDLPPGFSALEPLVDLPIGINITRFQTLLALHRSYLTPGDSSSGWTAGAAAYYVGYLQPRTFLLKYNENGTITDAVDCALDPLSETKCTLKSFTVEKGIYQTSNFRVQPTDSIVRFPNITNLCPFGEVFNATTFASVYAWNRKRISNCVADYSVLYNSTSFSTFKCYGVSPTKLNDLCFTNVYADSFVITGDEVRQIAPGQTGKIADYNYKLPDDFTGCVIAWNSKHIDAKEGGNFNYLYRLFRKANLKPFERDISTEIYQAGSKPCNGQTGLNCYYPLYRYGFYPTDGVGHQPYRVVVLSFELLNAPATVCGPKKSTNLVKNKCVNFNFNGLTGTGVLTESNKKFLPFQQFGRDIADTTDAVRDPQTLEILDITPCSFGGVSVITPGTNASNQVAVLYQDVNCTEVPVAIHADQLTPTWRVYSTGSNVFQTRAGCLIGAEHVNNSYECDIPIGAGICASYQTQTNSRSVASQSIIAYTMSLGAENSVAYSNNSIAIPTNFTISVTTEILPVSMTKTSVDCTMYICGDSTECSNLLLQYGSFCTQLNRALTGIAVEQDKNTQEVFAQVKQIYKTPPIKDFGGFNFSQILPDPSKPSKRSFIEDLLFNKVTLADAGFIKQYGDCLGDIAARDLICAQKFNGLTVLPPLLTDEMIAQYTSALLAGTITSGWTFGAGAALQIPFAMQMAYRFNGIGVTQCVLYENQKLIANQFNSAIGKIQDSLSSTASALGKLQDVVNQNAQALNTLVKQLSSNFGAISSVLNDILSRLDKVEAEVQIDRLITGRLQSLQTYVTQQLIRAAEIRASANLAATKMSECVLGQSKRVDFCGKGYHLMSFPQSAPHGVVFLHVTYVPAQEKNFTTAPAICHDGKAHFPREGVFVSNGTHWFVTQRNFYEPQIITTDNTFVCGSCDVVIGIVNNTVYDPLQPELDSFKEELDKYFKNHTSPDVDLGDISGINASVVNIQKEIDRLNEVAKNLNESLIDLQELGKYEQYIKGGGGSDIIKLLNEQVNKEMQSSNLYMSMSSWCYTHSLDGAGLFLFDHAAEEYEHAKKLIIFLNENNVPVQLTSISAPEHKFEGLTQIFQKAYEHEQHISESINNIVDHAIKSKDHATFNFLQWYVAEQHEEEVLFKDILDKIELIGNENHGLYLADQYVKGIAKSRKS

SEQ ID NO: 13657 - protein, 1379 aa, Artificial Sequence
  SARS-CoV-2/Wuhan/HBCDC-HB-01/2019__EPI_ISL_402132 spike protein (1-1211)(N914C_S1123C) Ferritin construct
MFVFLVLLPLVSSQCVNLTTRTQLPPAYTNSITRGVYYPDKVFRSSVLHSTQDLFLPFFSNVTWFHAIHVSGTNGTKRFDNPVLPFNDGVYFASTEKSNIIRGWIFGTTLDSKTQSLLIVNNATNVVIKVCEFQFCNDPFLGVYYHKNNKSWMESEFRVYSSANNCTFEYVSQPFLMDLEGKQGNFKNLREFVFKNIDGYFKIYSKHTPINLVRDLPQGFSALEPLVDLPIGINITRFQTLLALHRSYLTPGDSSSGWTAGAAAYYVGYLQPRTFLLKYNENGTITDAVDCALDPLSETKCTLKSFTVEKGIYQTSNFRVQPTESIVRFPNITNLCPFGEVFNATRFASVYAWNRKRISNCVADYSVLYNSASFSTFKCYGVSPTKLNDLCFTNVYADSFVIRGDEVRQIAPGQTGKIADYNYKLPDDFTGCVIAWNSNNLDSKVGGNYNYLYRLFRKSNLKPFERDISTEIYQAGSTPCNGVEGFNCYFPLQSYGFQPTNGVGYQPYRVVVLSFELLHAPATVCGPKKSTNLVKNKCVNFNFNGLTGTGVLTESNKKFLPFQQFGRDIADTTDAVRDPQTLEILDITPCSFGGVSVITPGTNTSNQVAVLYQDVNCTEVPVAIHADQLTPTWRVYSTGSNVFQTRAGCLIGAEHVNNSYECDIPIGAGICASYQTQTNSPRRARSVASQSIIAYTMSLGAENSVAYSNNSIAIPTNFTISVTTEILPVSMTKTSVDCTMYICGDSTECSNLLLQYGSFCTQLNRALTGIAVEQDKNTQEVFAQVKQIYKTPPIKDFGGFNFSQILPDPSKPSKRSFIEDLLFNKVTLADAGFIKQYGDCLGDIAARDLICAQKFNGLTVLPPLLTDEMIAQYTSALLAGTITSGWTFGAGAALQIPFAMQMAYRFNGIGVTQCVLYENQKLIANQFNSAIGKIQDSLSSTASALGKLQDVVNQNAQALNTLVKQLSSNFGAISSVLNDILSRLDKVEAEVQIDRLITGRLQSLQTYVTQQLIRAAEIRASANLAATKMSECVLGQSKRVDFCGKGYHLMSFPQSAPHGVVFLHVTYVPAQEKNFTTAPAICHDGKAHFPREGVFVSNGTHWFVTQRNFYEPQIITTDNTFVCGNCDVVIGIVNNTVYDPLQPELDSFKEELDKYFKNHTSPDVDLGDISGINASVVNIQKEIDRLNEVAKNLNESLIDLQELGKYEQYIKGGGGSDIIKLLNEQVNKEMQSSNLYMSMSSWCYTHSLDGAGLFLFDHAAEEYEHAKKLIIFLNENNVPVQLTSISAPEHKFEGLTQIFQKAYEHEQHISESINNIVDHAIKSKDHATFNFLQWYVAEQHEEEVLFKDILDKIELIGNENHGLYLADQYVKGIAKSRKS

SEQ ID NO: 13658 - protein, 1379 aa, Artificial Sequence
  SARS-CoV-2/Guangdong/20SF028/2020__EPI_ISL_403936 spike protein (1-1211)(N914C_S1123C) Ferritin construct
MFVFLVLLPLVSSQCVNLTTRTQLPPAYTNSFTRGVYYPDKVFRSSVLYSTQDLFLPFFSNVTWFHAIHVSGTNGTKRFDNPVLPFNDGVYFASTEKSNIIRGWIFGTTLDSKTQSLLIVNNATNVVIKVCEFQFCNDPFLGVYYHKNNKSWMESEFRVYSSANNCTFEYVSQPFLMDLEGKQGNFKNLREFVFKNIDGYFKIYSKHTPINLVRDLPQGFSALEPLVDLPIGINITRFQTLLALHRSYLTPGDSSSGWTAGAAAYYVGYLQPRTFLLKYNENGTITDAVDCALDPLSETKCTLKSFTVEKGIYQTSNFRVQPTESIVRFPNITNLCPFGEVFNATRFASVYAWNRKRISNCVADYSVLYNSASFSTFKCYGVSPTKLNDLCFTNVYADSFVIRGDEVRQIAPGQTGKIADYNYKLPDDFTGCVIAWNSNNLDSKVGGNYNYLYRLFRKSNLKPFERDISTEIYQAGSTPCNGVEGFNCYFPLQSYGFQPTNGVGYQPYRVVVLSFELLHAPATVCGPKKSTNLVKNKCVNFNFNGLTGTGVLTESNKKFLPFQQFGRDIADTTDAVRDPQTLEILDITPCSFGGVSVITPGTNTSNQVAVLYQDVNCTEVPVAIHADQLTPTWRVYSTGSNVFQTRAGCLIGAEHVNNSYECDIPIGAGICASYQTQTNSPRRARSVASQSIIAYTMSLGAENSVAYSNNSIAIPTNFTISVTTEILPVSMTKTSVDCTMYICGDSTECSNLLLQYGSFCTQLNRALTGIAVEQDKNTQEVFAQVKQIYKTPPIKDFGGFNFSQILPDPSKPSKRSFIEDLLFNKVTLADAGFIKQYGDCLGDIAARDLICAQKFNGLTVLPPLLTDEMIAQYTSALLAGTITSGWTFGAGAALQIPFAMQMAYRFNGIGVTQCVLYENQKLIANQFNSAIGKIQDSLSSTASALGKLQDVVNQNAQALNTLVKQLSSNFGAISSVLNDILSRLDKVEAEVQIDRLITGRLQSLQTYVTQQLIRAAEIRASANLAATKMSECVLGQSKRVDFCGKGYHLMSFPQSAPHGVVFLHVTYVPAQEKNFTTAPAICHDGKAHFPREGVFVSNGTHWFVTQRNFYEPQIITTDNTFVCGNCDVVIGIVNNTVYDPLQPELDSFKEELDKYFKNHTSPDVDLGDISGINASVVNIQKEIDRLNEVAKNLNESLIDLQELGKYEQYIKGGGGSDIIKLLNEQVNKEMQSSNLYMSMSSWCYTHSLDGAGLFLFDHAAEEYEHAKKLIIFLNENNVPVQLTSISAPEHKFEGLTQIFQKAYEHEQHISESINNIVDHAIKSKDHATFNFLQWYVAEQHEEEVLFKDILDKIELIGNENHGLYLADQYVKGIAKSRKS

SEQ ID NO: 13659 - protein, 1379 aa, Artificial Sequence
  SARS-CoV-2/Shenzhen/SZTH-001/2020__EPI_ISL_406592 spike protein (1-1211)(N914C_S1123C) Ferritin construct
MFVFLVLLPLVSSQCVNLTTRTQLPPAYTNSFTRGVYYPDKVFRSSVLHSTQDLFLPFFSNVTWFHAIHVSGTNGTKRFDNPVLPFNDGVYFASTEKSNIIRGWIFGTTLDSKTQSLLIVNNATNVVIKVCEFQFCNDPFLGVYYHKNNKSWMESEFRVYSSANNCTFEYVSQPFLMDLEGKQGNFKNLREFVFKNIDGYFKIYSKHTPINLVRDLPQGFSALEPLVDLPIGINITRFQTLLALHRSYLTPGDSSSGWTAGAAAYYVGYLQPRTFLLKYNENGTITDAVDCALDPLSETKCTLKSFTVEKGIYQTSNFRVQPTESIVRFPNITNLCPFGEVFNATRFASVYAWNRKRISNCVADYSVLYNSASFSTFKCYGVSPTKLNDLCFTNVYADSFVIRGDEVRQIAPGQTGKIADYNYKLPDDFTGCVIAWNSNNLDSKVGGNYNYLYRLFRKSNLKPFERDISTEIYQAGSTPCNGVEGFNCYFPLQSYGFQPTNGVGYQPYRVVVLSFELLHAPATVCGPKKSTNLVKNKCVNFNFNGLTGTGVLTESNKKFLPFQQFGRDIADTTDAVRDPQTLEILDITPCSFGGVSVITPGTNTSNQVAVLYQDVNCTEVPVAIHADQLTPTWRVYSTGSNVFQTRAGCLIGAEHVNNSYECDIPIGAGICASYQTQTNSPRRARSVASQSIIAYTMSLGAENSVAYSNNSIAIPTNFTISVTTEILPVSMTKTSVDCTMYICGDSTECSNLLLQYGSFCTQLNRALTGIAVEQDKNTQEVFAQVKQIYKTPPIKDFGGFNFSQILPDPSKPSKRSFIEDLLFNKVTLADAGFIKQYGDCLGDIAARDLICAQKFNGLTVLPPLLTDEMIAQYTSALLAGTITSGWTFGAGAALQIPFAMQMAYRFNGIGVTQCVLYENQKLIANQFNSAIGKIQDSLSSTASALGKLQDVVNQNAQALNTLVKQLSSNFGAISSVLNDILSRLDKVEAEVQIDRLITGRLQSLQTYVTQQLIRAAEIRASANLAATKMSECVLGQSKRVDFCGKGYHLMSFPQSAPHGVVFLHVTYVPAQEKNFTTAPAICHDGKAHFPREGVFVSNGTHWFVTQRNFYEPQIITTDNTFVCGNCDVLIGIVNNTVYDPLQPELDSFKEELDKYFKNHTSPDVDLGDISGINASVVNIQKEIDRLNEVAKNLNESLIDLQELGKYEQYIKGGGGSDIIKLLNEQVNKEMQSSNLYMSMSSWCYTHSLDGAGLFLFDHAAEEYEHAKKLIIFLNENNVPVQLTSISAPEHKFEGLTQIFQKAYEHEQHISESINNIVDHAIKSKDHATFNFLQWYVAEQHEEEVLFKDILDKIELIGNENHGLYLADQYVKGIAKSRKS

SEQ ID NO: 13660 - protein, 1379 aa, Artificial Sequence
  SARS-CoV-2/Shenzhen/SZTH-004/2020__EPI_ISL_406595 spike protein (1-1211)(N914C_S1123C) Ferritin construct
MFVFLVLLPLVSSQCVNLTTRTQLPPAYTNSFTRGVYYPDKVFRSSVLHSTQDLFLPFFSNVTWFHAIHVSGTNGTKRFDNPVLPFNDGVYFASTEKSNIIRGWIFGTTLDSKTQSLLIVNNATNVVIKVCEFQFCNDPFLGVYYHKNNKSWMESEFRVYSSANNCTFEYVSQPFLMDLEGKQGNFKNLREFVFKNIDGYFKIYSKHTPINLVRDLPQGFSALEPLVDLPIGINITRFQTLLALHRSYLTPGDSSSGWTAGAAAYYVGYLQPRTFLLKYNENGTITDAVDCALDPLSETKCTLKSFTVEKGIYQTSNFRVQPTESIVRFPNITNLCPFGEVFNATRFASVYAWDRKRISNCVAYYSVLYNSASFSTFKCYGVSPTKLNDLCFTNVYADSFVIRGDEVRQIAPGQTGKIADYNYKLPDDFTGCVIAWNSNNLDSKVGGNYNYLYRLFRKSNLKPFERDISTEIYQAGSTPCNGVEGFNCYFPLQSYGFQPTNGVGYQPYRVVVLSFELLHAPATVCGPKKSTNLVKNKCVNFNFNGLTGTGVLTESNKKFLPFQQFGRDIADTTDAVRDPQTLEILDITPCSFGGVSVITPGTNTSNQVAVLYQDVNCTEVPVAIHADQLTPTWRVYSTGSNVFQTRAGCLIGAEHVNNSYECDIPIGAGICASYQTQTNSPRRARSVASQSIIAYTMSLGAENSVAYSNNSIAIPTNFTISVTTEILPVSMTKTSVDCTMYICGDSTECSNLLLQYGSFCTQLNRALTGIAVEQDKNTQEVFAQVKQIYKTPPIKDFGGFNFSQILPDPSKPSKRSFIEDLLFNKVTLADAGFIKQYGDCLGDIAARDLICAQKFNGLTVLPPLLTDEMIAQYTSALLAGTITSGWTFGAGAALQIPFAMQMAYRFNGIGVTQCVLYENQKLIANQFNSAIGKIQDSLSSTASALGKLQDVVNQNAQALNTLVKQLSSNFGAISSVLNDILSRLDKVEAEVQIDRLITGRLQSLQTYVTQQLIRAAEIRASANLAATKMSECVLGQSKRVDFCGKGYHLMSFPQSAPHGVVFLHVTYVPAQEKNFTTAPAICHDGKAHFPREGVFVSNGTHWFVTQRNFYEPQIITTDNTFVCGNCDVVIGIVNNTVYDPLQPELDSFKEELDKYFKNHTSPDVDLGDISGINASVVNIQKEIDRLNEVAKNLNESLIDLQELGKYEQYIKGGGGSDIIKLLNEQVNKEMQSSNLYMSMSSWCYTHSLDGAGLFLFDHAAEEYEHAKKLIIFLNENNVPVQLTSISAPEHKFEGLTQIFQKAYEHEQHISESINNIVDHAIKSKDHATFNFLQWYVAEQHEEEVLFKDILDKIELIGNENHGLYLADQYVKGIAKSRKS

SEQ ID NO: 13661 - protein, 1379 aa, Artificial Sequence
  SARS-CoV-2/France/IDF0372/2020__EPI_ISL_406596 spike protein (1-1211)(N914C_S1123C) Ferritin construct
MFVFLVLLPLVSSQCVNLTTRTQLPPAYTNSFTRGVYYPDKVFRSSVLHSTQDLFLPFFSNVTWFHAIHVSGTNGTKRFDNPVLPFNDGVYFASTEKSNIIRGWIFGTTLDSKTQSLLIVNNATNVVIKVCEFQFCNDPFLGVYYHKNNKSWMESEFRVYSSANNCTFEYVSQPFLMDLEGKQGNFKNLREFVFKNIDGYFKIYSKHTPINLVRDLPQGFSALEPLVDLPIGINITRFQTLLALHRSYLTPGDSSSGWTAGAAAYYVGYLQPRTFLLKYNENGTITDAVDCALDPLSETKCTLKSFTVEKGIYQTSNFRVQPTESIVRFPNITNLCPFGEVFNATRFASVYAWNRKRISNCVADYSFLYNSASFSTFKCYGVSPTKLNDLCFTNVYADSFVIRGDEVRQIAPGQTGKIADYNYKLPDDFTGCVIAWNSNNLDSKVGGNYNYLYRLFRKSNLKPFERDISTEIYQAGSTPCNGVEGFNCYFPLQSYGFQPTNGVGYQPYRVVVLSFELLHAPATVCGPKKSTNLVKNKCVNFNFNGLTGTGVLTESNKKFLPFQQFGRDIADTTDAVRDPQTLEILDITPCSFGGVSVITPGTNTSNQVAVLYQDVNCTEVPVAIHADQLTPTWRVYSTGSNVFQTRAGCLIGAEHVNNSYECDIPIGAGICASYQTQTNSPRRARSVASQSIIAYTMSLGAENSVAYSNNSIAIPTNFTISVTTEILPVSMTKTSVDCTMYICGDSTECSNLLLQYGSFCTQLNRALTGIAVEQDKNTQEVFAQVKQIYKTPPIKDFGGFNFSQILPDPSKPSKRSFIEDLLFNKVTLADAGFIKQYGDCLGDIAARDLICAQKFNGLTVLPPLLTDEMIAQYTSALLAGTITSGWTFGAGAALQIPFAMQMAYRFNGIGVTQCVLYENQKLIANQFNSAIGKIQDSLSSTASALGKLQDVVNQNAQALNTLVKQLSSNFGAISSVLNDILSRLDKVEAEVQIDRLITGRLQSLQTYVTQQLIRAAEIRASANLAATKMSECVLGQSKRVDFCGKGYHLMSFPQSAPHGVVFLHVTYVPAQEKNFTTAPAICHDGKAHFPREGVFVSNGTHWFVTQRNFYEPQIITTDNTFVCGNCDVVIGIVNNTVYDPLQPELDSFKEELDKYFKNHTSPDVDLGDISGINASVVNIQKEIDRLNEVAKNLNESLIDLQELGKYEQYIKGGGGSDIIKLLNEQVNKEMQSSNLYMSMSSWCYTHSLDGAGLFLFDHAAEEYEHAKKLIIFLNENNVPVQLTSISAPEHKFEGLTQIFQKAYEHEQHISESINNIVDHAIKSKDHATFNFLQWYVAEQHEEEVLFKDILDKIELIGNENHGLYLADQYVKGIAKSRKS

SEQ ID NO: 13662 - protein, 1379 aa, Artificial Sequence
  SARS-CoV-2/Australia/VIC01/2020__EPI_ISL_406844 spike protein (1-1211)(N914C_S1123C) Ferritin construct
MFVFLVLLPLVSSQCVNLTTRTQLPPAYTNSFTRGVYYPDKVFRSSVLHSTQDLFLPFFSNVTWFHAIHVSGTNGTKRFDNPVLPFNDGVYFASTEKSNIIRGWIFGTTLDSKTQSLLIVNNATNVVIKVCEFQFCNDPFLGVYYHKNNKSWMESEFRVYSSANNCTFEYVSQPFLMDLEGKQGNFKNLREFVFKNIDGYFKIYSKHTPINLVRDLPQGFSALEPLVDLPIGINITRFQTLLALHRRYLTPGDSSSGWTAGAAAYYVGYLQPRTFLLKYNENGTITDAVDCALDPLSETKCTLKSFTVEKGIYQTSNFRVQPTESIVRFPNITNLCPFGEVFNATRFASVYAWNRKRISNCVADYSVLYNSASFSTFKCYGVSPTKLNDLCFTNVYADSFVIRGDEVRQIAPGQTGKIADYNYKLPDDFTGCVIAWNSNNLDSKVGGNYNYLYRLFRKSNLKPFERDISTEIYQAGSTPCNGVEGFNCYFPLQSYGFQPTNGVGYQPYRVVVLSFELLHAPATVCGPKKSTNLVKNKCVNFNFNGLTGTGVLTESNKKFLPFQQFGRDIADTTDAVRDPQTLEILDITPCSFGGVSVITPGTNTSNQVAVLYQDVNCTEVPVAIHADQLTPTWRVYSTGSNVFQTRAGCLIGAEHVNNSYECDIPIGAGICASYQTQTNSPRRARSVASQSIIAYTMSLGAENSVAYSNNSIAIPTNFTISVTTEILPVSMTKTSVDCTMYICGDSTECSNLLLQYGSFCTQLNRALTGIAVEQDKNTQEVFAQVKQIYKTPPIKDFGGFNFSQILPDPSKPSKRSFIEDLLFNKVTLADAGFIKQYGDCLGDIAARDLICAQKFNGLTVLPPLLTDEMIAQYTSALLAGTITSGWTFGAGAALQIPFAMQMAYRFNGIGVTQCVLYENQKLIANQFNSAIGKIQDSLSSTASALGKLQDVVNQNAQALNTLVKQLSSNFGAISSVLNDILSRLDKVEAEVQIDRLITGRLQSLQTYVTQQLIRAAEIRASANLAATKMSECVLGQSKRVDFCGKGYHLMSFPQSAPHGVVFLHVTYVPAQEKNFTTAPAICHDGKAHFPREGVFVSNGTHWFVTQRNFYEPQIITTDNTFVCGNCDVVIGIVNNTVYDPLQPELDSFKEELDKYFKNHTSPDVDLGDISGINASVVNIQKEIDRLNEVAKNLNESLIDLQELGKYEQYIKGGGGSDIIKLLNEQVNKEMQSSNLYMSMSSWCYTHSLDGAGLFLFDHAAEEYEHAKKLIIFLNENNVPVQLTSISAPEHKFEGLTQIFQKAYEHEQHISESINNIVDHAIKSKDHATFNFLQWYVAEQHEEEVLFKDILDKIELIGNENHGLYLADQYVKGIAKSRKS

SEQ ID NO: 13663 - protein, 1379 aa, Artificial Sequence
  SARS-CoV-2/Germany/BavPat1/2020__EPI_ISL_406862 spike protein (1-1211)(N914C_S1123C) Ferritin construct
MFVFLVLLPLVSSQCVNLTTRTQLPPAYTNSFTRGVYYPDKVFRSSVLHSTQDLFLPFFSNVTWFHAIHVSGTNGTKRFDNPVLPFNDGVYFASTEKSNIIRGWIFGTTLDSKTQSLLIVNNATNVVIKVCEFQFCNDPFLGVYYHKNNKSWMESEFRVYSSANNCTFEYVSQPFLMDLEGKQGNFKNLREFVFKNIDGYFKIYSKHTPINLVRDLPQGFSALEPLVDLPIGINITRFQTLLALHRSYLTPGDSSSGWTAGAAAYYVGYLQPRTFLLKYNENGTITDAVDCALDPLSETKCTLKSFTVEKGIYQTSNFRVQPTESIVRFPNITNLCPFGEVFNATRFASVYAWNRKRISNCVADYSVLYNSASFSTFKCYGVSPTKLNDLCFTNVYADSFVIRGDEVRQIAPGQTGKIADYNYKLPDDFTGCVIAWNSNNLDSKVGGNYNYLYRLFRKSNLKPFERDISTEIYQAGSTPCNGVEGFNCYFPLQSYGFQPTNGVGYQPYRVVVLSFELLHAPATVCGPKKSTNLVKNKCVNFNFNGLTGTGVLTESNKKFLPFQQFGRDIADTTDAVRDPQTLEILDITPCSFGGVSVITPGTNTSNQVAVLYQGVNCTEVPVAIHADQLTPTWRVYSTGSNVFQTRAGCLIGAEHVNNSYECDIPIGAGICASYQTQTNSPRRARSVASQSIIAYTMSLGAENSVAYSNNSIAIPTNFTISVTTEILPVSMTKTSVDCTMYICGDSTECSNLLLQYGSFCTQLNRALTGIAVEQDKNTQEVFAQVKQIYKTPPIKDFGGFNFSQILPDPSKPSKRSFIEDLLFNKVTLADAGFIKQYGDCLGDIAARDLICAQKFNGLTVLPPLLTDEMIAQYTSALLAGTITSGWTFGAGAALQIPFAMQMAYRFNGIGVTQCVLYENQKLIANQFNSAIGKIQDSLSSTASALGKLQDVVNQNAQALNTLVKQLSSNFGAISSVLNDILSRLDKVEAEVQIDRLITGRLQSLQTYVTQQLIRAAEIRASANLAATKMSECVLGQSKRVDFCGKGYHLMSFPQSAPHGVVFLHVTYVPAQEKNFTTAPAICHDGKAHFPREGVFVSNGTHWFVTQRNFYEPQIITTDNTFVCGNCDVVIGIVNNTVYDPLQPELDSFKEELDKYFKNHTSPDVDLGDISGINASVVNIQKEIDRLNEVAKNLNESLIDLQELGKYEQYIKGGGGSDIIKLLNEQVNKEMQSSNLYMSMSSWCYTHSLDGAGLFLFDHAAEEYEHAKKLIIFLNENNVPVQLTSISAPEHKFEGLTQIFQKAYEHEQHISESINNIVDHAIKSKDHATFNFLQWYVAEQHEEEVLFKDILDKIELIGNENHGLYLADQYVKGIAKSRKS

SEQ ID NO: 13664 - protein, 1379 aa, Artificial Sequence
  SARS-CoV-2/Wuhan/HBCDC-HB-02/2020__EPI_ISL_412978 spike protein (1-1211)(N914C_S1123C) Ferritin construct
MFVFLVLLPLVSSQCVNLTTRTQLPPAYTNSFTRGVYYPDKVFRSSVLHSTQDLFLPFFSNVTWFHAIHVSGTNGTKRFDNPVLPFNDGVYFASTEKSNIIRGWIFGTTLDSKTQSLLIVNNATNVVIKVCEFQFCNDPFLGVYYHKNNKSWMESEFRVYSSANNCTFEYVSQPFLMDLEGKQGNFKNLREFVFKNIDGYFKIYSKHTPINLVRDLPQGFSALEPLVDLPIGINITRFQTLLALHRSYLTPGDSSSGWTAGAAAYYVGYLQPRTFLLKYNENGTITDAVDCALDPLSETKCTLKSFTVEKGIYQTSNFRVQPTESIVRFPNITNLCPFGEVFNATRFASVYAWNRKRISNCVADYSVLYNSASFSTFKCYGVSPTKLNDLCFTNVYADSFVIRGDEVRQIAPGQTGKIADYNYKLPDDFTGCVIAWNSNNLDSKVGGNYNYLYRLFRKSNLKPFERDISTEIYQAGSTPCNGVEGFNCYFPLQSYGFQPTNGVGYQPYRVVVLSFELLHAPATVCGPKKSTNLVKNKCVNFNFNGLTGTGVLTESNKKFLPFQQFGRDIADTTDAVRDPQTLEILDITPCSFGGVSVITPGTNTSNQVAVLYQDVNCTEVPVAIHADQLTPTWRVYSTGSNVFQTRAGCLIGAEHVNNSYECDIPIGAGICASYQTQTNSPRRARSVASQSIIAYTMSLGAENSVAYSNNSIAIPTNFTISVTTEILPVSMTKTSVDCTMYICGDSTECSNFLLQYGSFCTQLNRALTGIAVEQDKNTQEVFAQVKQIYKTPPIKDFGGFNFSQILPDPSKPSKRSFIEDLLFNKVTLADAGFIKQYGDCLGDIAARDLICAQKFNGLTVLPPLLTDEMIAQYTSALLAGTITSGWTFGAGAALQIPFAMQMAYRFNGIGVTQCVLYENQKLIANQFNSAIGKIQDSLSSTASALGKLQDVVNQNAQALNTLVKQLSSNFGAISSVLNDILSRLDKVEAEVQIDRLITGRLQSLQTYVTQQLIRAAEIRASANLAATKMSECVLGQSKRVDFCGKGYHLMSFPQSAPHGVVFLHVTYVPAQEKNFTTAPAICHDGKAHFPREGVFVSNGTHWFVTQRNFYEPQIITTDNTFVCGNCDVVIGIVNNTVYDPLQPELDSFKEELDKYFKNHTSPDVDLGDISGINASVVNIQKEIDRLNEVAKNLNESLIDLQELGKYEQYIKGGGGSDIIKLLNEQVNKEMQSSNLYMSMSSWCYTHSLDGAGLFLFDHAAEEYEHAKKLIIFLNENNVPVQLTSISAPEHKFEGLTQIFQKAYEHEQHISESINNIVDHAIKSKDHATFNFLQWYVAEQHEEEVLFKDILDKIELIGNENHGLYLADQYVKGIAKSRKS

SEQ ID NO: 13665 - protein, 1379 aa, Artificial Sequence
  SARS-CoV-2/Australia/QLD02/2020__EPI_ISL_407896 spike protein (1-1211)(N914C_S1123C) Ferritin construct
MFVFLVLLPLVSSQCVNLTTRTQLPPAYTNSFTRGVYYPDKVFRSSVLHSTQDLFLPFFSNVTWFHAIHVSGTNGTKRFDNPVLPFNDGVYFASTEKSNIIRGWIFGTTLDSKTQSLLIVNNATNVVIKVCEFQFCNDPFLGVYYHKNNKSWMESEFRVYSSANNCTFEYVSQPFLMDLEGKQGNFKNLREFVFKNIDGYFKIYSKHTPINLVRDLPQGFSALEPLVDLPIGINITRFQTLLALHRSYLTPGDSSSGWTAGAAAYYVGYLQPRTFLLKYNENGTITDAVDCALDPLSETKCTLKSFTVEKGIYQTSNFRVQPTESIVRFPNITNLCPFGEVFNATRFASVYAWNRKRISNCVADYSVLYNSASFSTFKCYGVSPTKLNDLCFTNVYADSFVIRGDEVRQIAPGQTGKIADYNYKLPDDFTGCVIAWNSNNLDSKVGGNYNYLYRLFRKSNLKPFERDISTEIYQAGSTPCNGVEGFNCYFPLQSYGFQPTNGVGYQPYRVVVLSFELLHAPATVCGPKKSTNLVKNKCVNFNFNGLTGTGVLTESNKKFLPFQQFGRDIADTTDAVRDPQTLEILDITPCSFGGVSVITPGTNTSNQVAVLYQDVNCTEVPVAIHADQLTPTWRVYSTGSNVFQTRAGCLIGAEHVNNSYECDIPIGAGICASYQTQTNSPRRARSVASQSIIAYTMSLGAENSVAYSNNSIAIPTNFTISVTTEILPVSMTKTSVDCTMYICGDSTECSNLLLQYGSFCTQLNRALTGIAVEQDKNTQEVFAQVKQIYKTPPIKDFGGFNFSQILPDPSKPSKRSFIEDLLFNKVTLADAGFIKQYGDCLGDIAARDLICAQKFNGLTVLPPLLTDEMIAQYTSALLAGTITSGWTFGAGAALQIPFAMQMAYRFNGIGVTQCVLYENQKLIANQFNSAIGKIQDSLSSTASALGKLQDVVNQNAQALNTLVKQLSSNFGAISSVLNDILSRLDKVEAEVQIDRLITGRLQSLQTYVTQQLIRAAEIRASANLAATKMSECVLGQSKRVDFCGKGYHLMSFPQSAPHGVVFLHVTYVPAQEKNFTTAPAICHDGKAHFPREGVFVSNGTHWFVTQRNFYEPQIITTDNTFVCGNCDVVIGIVNNTVYDPLQLELDSFKEELDKYFKNHTSPDVDLGDISGINASVVNIQKEIDRLNEVAKNLNESLIDLQELGKYEQYIKGGGGSDIIKLLNEQVNKEMQSSNLYMSMSSWCYTHSLDGAGLFLFDHAAEEYEHAKKLIIFLNENNVPVQLTSISAPEHKFEGLTQIFQKAYEHEQHISESINNIVDHAIKSKDHATFNFLQWYVAEQHEEEVLFKDILDKIELIGNENHGLYLADQYVKGIAKSRKS

SEQ ID NO: 13666 - protein, 1379 aa, Artificial Sequence
  SARS-CoV-2/India/1-31/2020__EPI_ISL_413523 spike protein (1-1211)(N914C_S1123C) Ferritin construct
MFVFLVLLPLVSSQCVNLTTRTQLPPAYTNSFTRGVYYPDKVFRSSVLHSTQDLFLPFFSNVTWFHAIHVSGTNGTKRFDNPVLPFNDGVYFASTEKSNIIRGWIFGTTLDSKTQSLLIVNNATNVVIKVCEFQFCNDPFLGVYYHKNNKSWMESEFRVYSSANNCTFEYVSQPFLMDLEGKQGNFKNLREFVFKNIDGYFKIYSKHTPINLVRDLPQGFSALEPLVDLPIGINITRFQTLLALHRSYLTPGDSSSGWTAGAAAYYVGYLQPRTFLLKYNENGTITDAVDCALDPLSETKCTLKSFTVEKGIYQTSNFRVQPTESIVRFPNITNLCPFGEVFNATRFASVYAWNRKRISNCVADYSVLYNSASFSTFKCYGVSPTKLNDLCFTNVYADSFVIRGDEVRQIAPGQTGKIADYNYKLPDDFTGCVIAWNSNNLDSKVGGNYNYLYRLFRKSNLKPFERDISTEIYQAGSTPCNGVEGFNCYFPLQSYGFQPTNGVGYQPYRVVVLSFELLHAPATVCGPKKSTNLVKNKCVNFNFNGLTGTGVLTESNKKFLPFQQFGRDIADTTDAVRDPQTLEILDITPCSFGGVSVITPGTNTSNQVAVLYQDVNCTEVPVAIHADQLTPTWRVYSTGSNVFQTRAGCLIGAEHVNNSYECDIPIGAGICASYQTQTNSPRRARSVASQSIIAYTMSLGAENSVAYSNNSIAIPTNFTISVTTEILPVSMTKTSVDCTMYICGDSTECSNLLLQYGSFCTQLNRALTGIAVEQDKNTQEVFAQVKQIYKTPPIKDFGGFNFSQILPDPSKPSKRSFIEDLLFNKVTLADAGFIKQYGDCLGDIAARDLICAQKFNGLTVLPPLLTDEMIAQYTSALLAGTITSGWTFGAGAALQIPFAMQMAYRFNGIGVTQCVLYENQKLIANQFNSVIGKIQDSLSSTASALGKLQDVVNQNAQALNTLVKQLSSNFGAISSVLNDILSRLDKVEAEVQIDRLITGRLQSLQTYVTQQLIRAAEIRASANLAATKMSECVLGQSKRVDFCGKGYHLMSFPQSAPHGVVFLHVTYVPAQEKNFTTAPAICHDGKAHFPREGVFVSNGTHWFVTQRNFYEPQIITTDNTFVCGNCDVVIGIVNNTVYDPLQPELDSFKEELDKYFKNHTSPDVDLGDISGINASVVNIQKEIDRLNEVAKNLNESLIDLQELGKYEQYIKGGGGSDIIKLLNEQVNKEMQSSNLYMSMSSWCYTHSLDGAGLFLFDHAAEEYEHAKKLIIFLNENNVPVQLTSISAPEHKFEGLTQIFQKAYEHEQHISESINNIVDHAIKSKDHATFNFLQWYVAEQHEEEVLFKDILDKIELIGNENHGLYLADQYVKGIAKSRKS

SEQ ID NO: 13667 - protein, 1379 aa, Artificial Sequence
  SARS-CoV-2/Guangdong/GD2020087-P0008/2020__EPI_ISL_413863 spike protein (1-1211)(N914C_S1123C) Ferritin construct
MFVFLVLLPLVSSQCVNLTTRTQLPPAYTNSFTRGVYYPDKVFRSSVLHSTQDLFLPFFSNVTWFHAIHVSGTNGTKRFDNPVLPFNDGVYFASTEKSNIIRGWIFGTTLDSKTQSLLIVNNATNVVIKVCEFQFCNDPFLGVYYHKNNKSWMESEFRVYSSANNCTFEYVSQPFLMDLEGKQGNFKNLREFVFKNIDGYFKIYSKHTPINLVRDLPQGFSALEPLVDLPIGINITRFQTLLALHRSYLTPGDSSSGWTAGAAAYYVGYLQPRTFLLKYNENGTITDAVDCALDPLSETKCTLKSFTVEKGIYQTSNFRVQPTESIVRFPNITNLCPFGEVFNATRFASVYAWNRKRISNCVADYSVLYNSASFSTFKCYGVSPTKLNDLCFTNVYADSFVIRGDEVREIAPGQTGKIADYNYKLPDDFTGCVIAWNSNNLDSKVGGNYNYLYRLFRKSNLKPFERDISTEIYQAGSTPCNGVEGFNCYFPLQSYGFQPTNGVGYQPYRVVVLSFELLHAPATVCGPKKSTNLVKNKCVNFNFNGLTGTGVLTESNKKFLPFQQFGRDIADTTDAVRDPQTLEILDITPCSFGGVSVITPGTNTSNQVAVLYQDVNCTEVPVAIHADQLTPTWRVYSTGSNVFQTRAGCLIGAEHVNNSYECDIPIGAGICASYQTQTNSPRRARSVASQSIIAYTMSLGAENSVAYSNNSIAIPTNFTISVTTEILPVSMTKTSVDCTMYICGDSTECSNLLLQYGSFCTQLNRALTGIAVEQDKNTQEVFAQVKQIYKTPPIKDFGGFNFSQILPDPSKPSKRSFIEDLLFNKVTLADAGFIKQYGDCLGDIAARDLICAQKFNGLTVLPPLLTDEMIAQYTSALLAGTITSGWTFGAGAALQIPFAMQMAYRFNGIGVTQCVLYENQKLIANQFNSAIGKIQDSLSSTASALGKLQDVVNQNAQALNTLVKQLSSNFGAISSVLNDILSRLDKVEAEVQIDRLITGRLQSLQTYVTQQLIRAAEIRASANLAATKMSECVLGQSKRVDFCGKGYHLMSFPQSAPHGVVFLHVTYVPAQEKNFTTAPAICHDGKAHFPREGVFVSNGTHWFVTQRNFYEPQIITTDNTFVCGNCDVVIGIVNNTVYDPLQPELDSFKEELDKYFKNHTSPDVDLGDISGINASVVNIQKEIDRLNEVAKNLNESLIDLQELGKYEQYIKGGGGSDIIKLLNEQVNKEMQSSNLYMSMSSWCYTHSLDGAGLFLFDHAAEEYEHAKKLIIFLNENNVPVQLTSISAPEHKFEGLTQIFQKAYEHEQHISESINNIVDHAIKSKDHATFNFLQWYVAEQHEEEVLFKDILDKIELIGNENHGLYLADQYVKGIAKSRKS

SEQ ID NO: 13668 - protein, 1379 aa, Artificial Sequence
  SARS-CoV-2/Sweden/01/2020__EPI_ISL_411951 spike protein (1-1211)(N914C_S1123C) Ferritin construct
MFVFLVLLPLVSSQCVNLTTRTQLPPAYTNSFTRGVYYPDKVFRSSVLHSTQDLFLPFFSNVTWFHAIHVSGTNGTKRFDNPVLPFNDGVYFASTEKSNIIRGWIFGTTLDSKTQSLLIVNNATNVVIKVCEFQFCNDPFLGVYYHKNNKSWMESEFRVYSSANNCTFEYVSQPFLMDLEGKQGNFKNLREFVFKNIDGYFKIYSKHTPINLVRDLPQGFSALEPLVDLPIGINITRFQTLLALHRSYLTPGDSSSGWTAGAAAYYVGYLQPRTFLLKYNENGTITDAVDCALDPLSETKCTLKSFTVEKGIYQTSNFRVQPTESIVRFPNITNLCPFGEVFNATRFASVYAWNRKRISNCVADYSVLYNSASFSTFKCYGVSPTKLNDLCFTNVYADSFVIRGDEVRQIAPGQTGKIADYNYKLPDDFTGCVIAWNSNNLDSKVGGNYNYLYRLFRKSNLKPFERDISTEIYQAGSTPCNGVEGFNCYFPLQSYGFQPTNGVGYQPYRVVVLSFELLHAPATVCGPKKSTNLVKNKCVNFNFNGLTGTGVLTESNKKFLPFQQFGRDIADTTDAVRDPQTLEILDITPCSFGGVSVITPGTNTSNQVAVLYQDVNCTEVPVAIHADQLTPTWRVYSTGSNVFQTRAGCLIGAEHVNNSYECDIPIGAGICASYQTQTNSPRRARSVASQSIIAYTMSLGAENSVAYSNNSIAIPTNFTISVTTEILPVSMTKTSVDCTMYICGDSTECSNLLLQYGSFCTQLNRALTGIAVEQDKNTQEVFAQVKQIYKTPPIKDCGGFNFSQILPDPSKPSKRSFIEDLLFNKVTLADAGFIKQYGDCLGDIAARDLICAQKFNGLTVLPPLLTDEMIAQYTSALLAGTITSGWTFGAGAALQIPFAMQMAYRFNGIGVTQCVLYENQKLIANQFNSAIGKIQDSLSSTASALGKLQDVVNQNAQALNTLVKQLSSNFGAISSVLNDILSRLDKVEAEVQIDRLITGRLQSLQTYVTQQLIRAAEIRASANLAATKMSECVLGQSKRVDFCGKGYHLMSFPQSAPHGVVFLHVTYVPAQEKNFTTAPAICHDGKAHFPREGVFVSNGTHWFVTQRNFYEPQIITTDNTFVCGNCDVVIGIVNNTVYDPLQPELDSFKEELDKYFKNHTSPDVDLGDISGINASVVNIQKEIDRLNEVAKNLNESLIDLQELGKYEQYIKGGGGSDIIKLLNEQVNKEMQSSNLYMSMSSWCYTHSLDGAGLFLFDHAAEEYEHAKKLIIFLNENNVPVQLTSISAPEHKFEGLTQIFQKAYEHEQHISESINNIVDHAIKSKDHATFNFLQWYVAEQHEEEVLFKDILDKIELIGNENHGLYLADQYVKGIAKSRKS

SEQ ID NO: 13669 - protein, 1379 aa, Artificial Sequence
  SARS-CoV-2/Tianmen/HBCDC-HB-07/2020__EPI_ISL_412983 spike protein (1-1211)(N914C_S1123C) Ferritin construct
MFVFLVLLPLVSSQCVNLTTRTQLPPAYTNSFTRGVYYPDKVFRSSVLHSTQDLFLPFFSNVTWFHAIHVSGTNGTKRFDNPVLPFNDGVYFASTEKSNIIRGWIFGTTLDSKTQSLLIVNNATNVVIKVCEFQFCNDPFLGVYYHKNNKSWMESEFRVYSSANNCTFEYVSQPFLMDLEGKQGNFKNLREFVFKNIDGYFKIYSKHTPINLVRDLPQGFSALEPLVDLPIGINITRFQTLLALHRSYLTPGDSSSGWTAGAAAYYVGYLQPRTFLLKYNENGTITDAVDCALDPLSETKCTLKSFTVEKGIYQTSNFRVQPTESIVRFPNITNLCPFGEVFNATRFASVYAWNRKRISNCVADYSVLYNSASFSTFKCYGVSPTKLNDLCFTNVYADSFVIRGDEVRQIAPGQTGKIADYNYKLPDDFTGCVIAWNSNNLDSKVGGNYNYLYRLFRKSNLKPFERDISTEIYQAGSTPCNGVEGFNCYFPLQSYGFQPTNGVGYQPYRVVVLSFELLHAPATVCGPKKSTNLVKNKCVNFNFNGLTGTGVLTESNKKFLPFQQFGRDIADTTDAVRDPQTLEILDITPCSFGGVSVITPGTNTSNQVAVLYQDLNCTEVPVAIHADQLTPTWRVYSTGSNVFQTRAGCLIGAEHVNNSYECDIPIGAGICASYQTQTNSPRRARSVASQSIIAYTMSLGAENSVAYSNNSIAIPTNFTISVTTEILPVSMTKTSVDCTMYICGDSTECSNLLLQYGSFCTQLNRALTGIAVEQDKNTQEVFAQVKQIYKTPPIKDFGGFNFSQILPDPSKPSKRSFIEDLLFNKVTLADAGFIKQYGDCLGDIAARDLICAQKFNGLTVLPPLLTDEMIAQYTSALLAGTITSGWTFGAGAALQIPFAMQMAYRFNGIGVTQCVLYENQKLIANQFNSAIGKIQDSLSSTASALGKLQDVVNQNAQALNTLVKQLSSNFGAISSVLNDILSRLDKVEAEVQIDRLITGRLQSLQTYVTQQLIRAAEIRASANLAATKMSECVLGQSKRVDFCGKGYHLMSFPQSAPHGVVFLHVTYVPAQEKNFTTAPAICHDGKAHFPREGVFVSNGTHWFVTQRNFYEPQIITTDNTFVCGNCDVVIGIVNNTVYDPLQPELDSFKEELDKYFKNHTSPDVDLGDISGINASVVNIQKEIDRLNEVAKNLNESLIDLQELGKYEQYIKGGGGSDIIKLLNEQVNKEMQSSNLYMSMSSWCYTHSLDGAGLFLFDHAAEEYEHAKKLIIFLNENNVPVQLTSISAPEHKFEGLTQIFQKAYEHEQHISESINNIVDHAIKSKDHATFNFLQWYVAEQHEEEVLFKDILDKIELIGNENHGLYLADQYVKGIAKSRKS

SEQ ID NO: 13670 - protein, 1379 aa, Artificial Sequence
  SARS-CoV-2/Hong Kong/case42_VM20002493/2020__EPI_ISL_414527 spike protein (1-1211)(N914C_S1123C) Ferritin construct
MFVFLVLLPLVSSQCVNLTTRTQLPPAYTNSFTRGVYYPDKVFRSSVLHSTQDLFLPFFSNVTWFHAIHVSGTNGTKRFDNPVLPFNDGVYFASTEKSNIIRGWIFGTTLDSKTQSLLIVNNATNVVIKVCEFQFCNDPFLGVYYHKNNKSWMESEFRVYSSANNCTFEYVSQPFLMDLEGKQGNFKNLREFVFKNIDGYFKIYSKHTPINLVRDLPQGFSALEPLVDLPIGINITRFQTLLALHRSYLTPGDSSSGWTAGAAAYYVGYLQPRTFLLKYNENGTITDAVDCALDPLSETKCTLKSFTVEKGIYQTSNFRVQPTESIVRFPNITNLCPFGEVFNATRFASVYAWNRKRISNCVADYSVLYNSASFSTFKCYGVSPTKLNDLCFTNVYADSFVIRGDEVRQIAPGQTGKIADYNYKLPDDFTGCVIAWNSNNLDSKVGGNYNYLYRLFRKSNLKPFERDISTEIYQAGSTPCNGVEGFNCYFPLQSYGFQPTNGVGYQPYRVVVLSFELLHAPATVCGPKKSTNLVKNKCVNFNFNGLTGTGVLTESNKKFLPFQQFGRDIADTTDAVRDPQTLEILDITPCSFGGVSVITPGTNTSNQVAVLYQDVNCTEVPVAIHADQLTPTWRVYSTGSNVFQTRAGCLIGAEHVNNSYECDIPIGAGICASYQTQTNSPRRARSVASQSIIAYTMSLGAENSVAYSNNSIAIPTNFAISVTTEILPVSMTKTSVDCTMYICGDSTECSNLLLQYGSFCTQLNRALTGIAVEQDKNTQEVFAQVKQIYKTPPIKDFGGFNFSQILPDPSKPSKRSFIEDLLFNKVTLADAGFIKQYGDCLGDIAARDLICAQKFNGLTVLPPLLTDEMIAQYTSALLAGTITSGWTFGAGAALQIPFAMQMAYRFNGIGVTQCVLYENQKLIANQFNSAIGKIQDSLSSTASALGKLQDVVNQNAQALNTLVKQLSSNFGAISSVLNDILSRLDKVEAEVQIDRLITGRLQSLQTYVTQQLIRAAEIRASANLAATKMSECVLGQSKRVDFCGKGYHLMSFPQSAPHGVVFLHVTYVPAQEKNFTTAPAICHDGKAHFPREGVFVSNGTHWFVTQRNFYEPQIITTDNTFVCGNCDVVIGIVNNTVYDPLQPELDSFKEELDKYFKNHTSPDVDLGDISGINASVVNIQKEIDRLNEVAKNLNESLIDLQELGKYEQYIKGGGGSDIIKLLNEQVNKEMQSSNLYMSMSSWCYTHSLDGAGLFLFDHAAEEYEHAKKLIIFLNENNVPVQLTSISAPEHKFEGLTQIFQKAYEHEQHISESINNIVDHAIKSKDHATFNFLQWYVAEQHEEEVLFKDILDKIELIGNENHGLYLADQYVKGIAKSRKS

SEQ ID NO: 13671 - protein, 1379 aa, Artificial Sequence
  SARS-CoV-2/USA/CruiseA-23/2020__EPI_ISL_414482 spike protein (1-1211)(N914C_S1123C) Ferritin construct
MFVFLVLLPLVSSQCVNLTTRTQLPPAYTNSFTRGVYYPDKVFRSSVLHSTQDLFLPFFSNVTWFHAIHVSGTNGTKRFDNPVLPFNDGVYFASTEKSNIIRGWIFGTTLDSKTQSLLIVNNATNVVIKVCEFQFCNDPFLGVYYHKNNKSWMESEFRVYSSANNCTFEYVSQPFLMDLEVKQGNFKNLREFVFKNIDGYFKIYSKHTPINLVRDLPQGFSALEPLVDLPIGINITRFQTLLALHRSYLTPGDSSSGWTAGAAAYYVGYLQPRTFLLKYNENGTITDAVDCALDPLSETKCTLKSFTVEKGIYQTSNFRVQPTESIVRFPNITNLCPFGEVFNATRFASVYAWNRKRISNCVADYSVLYNSASFSTFKCYGVSPTKLNDLCFTNVYADSFVIRGDEVRQIAPGQTGKIADYNYKLPDDFTGCVIAWNSNNLDSKVGGNYNYLYRLFRKSNLKPFERDISTEIYQAGSTPCNGVEGFNCYFPLQSYGFQPTNGVGYQPYRVVVLSFELLHAPATVCGPKKSTNLVKNKCVNFNFNGLTGTGVLTESNKKFLPFQQFGRDIADTTDAVRDPQTLEILDITPCSFGGVSVITPGTNTSNQVAVLYQDVNCTEVPVAIHADQLTPTWRVYSTGSNVFQTRAGCLIGAEHVNNSYECDIPIGAGICASYQTQTNSPRRARSVASQSIIAYTMSLGAENSVAYSNNSIAIPTNFTISVTTEILPVSMTKTSVDCTMYICGDSTECSNLLLQYGSFCTQLNRALTGIAVEQDKNTQEVFAQVKQIYKTPPIKDFGGFNFSQILPDPSKPSKRSFIEDLLFNKVTLADAGFIKQYGDCLGDIAARDLICAQKFNGLTVLPPLLTDEMIAQYTSALLAGTITSGWTFGAGAALQIPFAMQMAYRFNGIGVTQCVLYENQKLIANQFNSAIGKIQDSLSSTASALGKLQDVVNQNAQALNTLVKQLSSNFGAISSVLNDILSRLDKVEAEVQIDRLITGRLQSLQTYVTQQLIRAAEIRASANLAATKMSECVLGQSKRVDFCGKGYHLMSFPQSAPHGVVFLHVTYVPAQEKNFTTAPAICHDGKAHFPREGVFVSNGTHWFVTQRNFYEPQIITTDNTFVCGNCDVVIGIVNNTVYDPLQPELDSFKEELDKYFKNHTSPDVDLGDISGINASVVNIQKEIDRLNEVAKNLNESLIDLQELGKYEQYIKGGGGSDIIKLLNEQVNKEMQSSNLYMSMSSWCYTHSLDGAGLFLFDHAAEEYEHAKKLIIFLNENNVPVQLTSISAPEHKFEGLTQIFQKAYEHEQHISESINNIVDHAIKSKDHATFNFLQWYVAEQHEEEVLFKDILDKIELIGNENHGLYLADQYVKGIAKSRKS

SEQ ID NO: 13672 - protein, 1379 aa, Artificial Sequence
  SARS-CoV-2/Hong Kong/case85_VM20002868/2020__EPI_ISL_414519 spike protein (1-1211)(N914C_S1123C) Ferritin construct
MFVFLVLVPLVSSQCVNLTTRTQLPPAYTNSFTRGVYYPDKVFRSSVLHSTQDLFLPFFSNVTWFHAIHVSGTNGTKRFDNPVLPFNDGVYFASTEKSNIIRGWIFGTTLDSKTQSLLIVNNATNVVIKVCEFQFCNDPFLGVYYHKNNKSWMESEFRVYSSANNCTFEYVSQPFLMDLEGKQGNFKNLREFVFKNIDGYFKIYSKHTPINLVRDLPQGFSALEPLVDLPIGINITRFQTLLALHRSYLTPGDSSSGWTAGAAAYYVGYLQPRTFLLKYNENGTITDAVDCALDPLSETKCTLKSFTVEKGIYQTSNFRVQPTESIVRFPNITNLCPFGEVFNATRFASVYAWNRKRISNCVADYSVLYNSASFSTFKCYGVSPTKLNDLCFTNVYADSFVIRGDEVRQIAPGQTGKIADYNYKLPDDFTGCVIAWNSNNLDSKVGGNYNYLYRLFRKSNLKPFERDISTEIYQAGSTPCNGVEGFNCYFPLQSYGFQPTNGVGYQPYRVVVLSFELLHAPATVCGPKKSTNLVKNKCVNFNFNGLTGTGVLTESNKKFLPFQQFGRDIADTTDAVRDPQTLEILDITPCSFGGVSVITPGTNTSNQVAVLYQDVNCTEVPVAIHADQLTPTWRVYSTGSNVFQTRAGCLIGAEHVNNSYECDIPIGAGICASYQTQTNSPRRARSVASQSIIAYTMSLGAENSVAYSNNSIAIPTNFTISVTTEILPVSMTKTSVDCTMYICGDSTECSNLLLQYGSFCTQLNRALTGIAVEQDKNTQEVFAQVKQIYKTPPIKDFGGFNFSQILPDPSKPSKRSFIEDLLFNKVTLADAGFIKQYGDCLGDIAARDLICAQKFNGLTVLPPLLTDEMIAQYTSALLAGTITSGWTFGAGAALQIPFAMQMAYRFNGIGVTQCVLYENQKLIANQFNSAIGKIQDSLSSTASALGKLQDVVNQNAQALNTLVKQLSSNFGAISSVLNDILSRLDKVEAEVQIDRLITGRLQSLQTYVTQQLIRAAEIRASANLAATKMSECVLGQSKRVDFCGKGYHLMSFPQSAPHGVVFLHVTYVPAQEKNFTTAPAICHDGKAHFPREGVFVSNGTHWFVTQRNFYEPQIITTDNTFVCGNCDVVIGIVNNTVYDPLQPELDSFKEELDKYFKNHTSPDVDLGDISGINASVVNIQKEIDRLNEVAKNLNESLIDLQELGKYEQYIKGGGGSDIIKLLNEQVNKEMQSSNLYMSMSSWCYTHSLDGAGLFLFDHAAEEYEHAKKLIIFLNENNVPVQLTSISAPEHKFEGLTQIFQKAYEHEQHISESINNIVDHAIKSKDHATFNFLQWYVAEQHEEEVLFKDILDKIELIGNENHGLYLADQYVKGIAKSRKS

SEQ ID NO: 13673 - protein, 1379 aa, Artificial Sequence; identical to SEQ ID NO: 13663
  SARS-CoV-2/England/200990660/2020__EPI_ISL_414523 spike protein (1-1211)(N914C_S1123C) Ferritin construct

SEQ ID NO: 13674 - protein, 1379 aa, Artificial Sequence
  SARS-CoV-2/Australia/NSW09/2020__EPI_ISL_413595 spike protein (1-1211)(N914C_S1123C) Ferritin construct
MFVFLVLLPLVSSQCVNLTTRTQLPPAYTNSFTRGVYYPDKVFRSSVLHSTQDLFLPFFSNVTWFHAIHVSGTNGTKRFDNPVLPFNDGVYFASTEKSNIIRGWIFGTTLDSKTQSLLIVNNATNVVIKVCEFQFCNDPFLGVYYHKNNKSWMESEFRVYSSANNCTFEYVSQPFLMDLEGKQGNFKNLREFVFKNIDGYFKIYSKHTPINLVRDLPQGFSALEPLVDLPIGINITRFQTLLALHRSYLTPGDSSSGWTAGAAAYYVGYLQPRTFLLKYNENGTITDAVDCALDPLSETKCTLKSFTVEKGIYQTSNFRVQPTESIVRFPNITNLCPFGEVFNATRFASVYAWNRKRISNCVADYSVLYNSASFSTFKCYGVSPTKLNDLCFTNVYADSFVIRGDEVRQIAPGQTGKIADYNYKLPDDFTGCVIAWNSNNLDSKVGGNYNYLYRLFRKSNLKPFERDISTEIYQAGSTPCNGVEGFNCYFPLQSYGFQPTNGVGYQPYRVVVLSFELLHAPATVCGPKKSTNLVKNKCVNFNFNGLTGTGVLTESNKKFLPFQQFGRDIADTTDAVRDPQTLEILDITPCSFGGVSVITPGTNTSNQVAVLYQDVNCTEVPVAIHADQLTPTWRVYSTGSNVFQTRAGCLIGAEHVNNSYECDIPIGAGICASYQTQTNSPRRARSVASQSIIAYTMSLGAENSVAYSNNSIAIPTNFTISVTTEILPVSMTKTSVDCTMYICGDSTECSNLLLQYGSFCTQLNRALTGIAVEQDKNTQEVFAQVKQIYKTPPIKDFGGFNFSQILPDPSKPSKRSFIEDLLFNKVTLADAGFIKQYGDCLGDIAARDLICAQKFNGLTVLPPLLTDEMIAQYTSALLAGTITSGWTFGAGAALQIPFAMQMAYRFNGIGVTQCVLYENQKLIANQFNSAIGKIQDSLSFTASALGKLQDVVNQNAQALNTLVKQLSSNFGAISSVLNDILSRLDKVEAEVQIDRLITGRLQSLQTYVTQQLIRAAEIRASANLAATKMSECVLGQSKRVDFCGKGYHLMSFPQSAPHGVVFLHVTYVPAQEKNFTTAPAICHDGKAHFPREGVFVSNGTHWFVTQRNFYEPQIITTDNTFVCGNCDVVIGIVNNTVYDPLQPELDSFKEELDKYFKNHTSPDVDLGDISGINASVVNIQKEIDRLNEVAKNLNESLIDLQELGKYEQYIKGGGGSDIIKLLNEQVNKEMQSSNLYMSMSSWCYTHSLDGAGLFLFDHAAEEYEHAKKLIIFLNENNVPVQLTSISAPEHKFEGLTQIFQKAYEHEQHISESINNIVDHAIKSKDHATFNFLQWYVAEQHEEEVLFKDILDKIELIGNENHGLYLADQYVKGIAKSRKS

SEQ ID NO: 13675 - protein, 1379 aa, Artificial Sequence; identical to SEQ ID NO: 13655
  SARS-CoV-2/Australia/NSW10/2020__EPI_ISL_413596 spike protein (1-1211)(N914C_S1123C) Ferritin construct

SEQ ID NO: 13676 - protein, 1379 aa, Artificial Sequence
  SARS-CoV-2/Switzerland/1000477797/2020__EPI_ISL_413023 spike protein (1-1211)(N914C_S1123C) Ferritin construct
MFVFLVLLPLVSSQCVNLTTRTQLPPAYTNSFTRGVYYPDKVFRSSVLHSTQDLFLPFFSNVTWFHAIHVSGTNGTKRFDNPVLPFNDGVYFASTEKSNIIRGWIFGTTLDSKTQSLLIVNNATNVVIKVCEFQFCNDPFLGVYYHKNNKSWMESEFRVYSSANNCTFEYVSQPFLMDLEGKQGNFKNLREFVFKNIDGYFNIYSKHTPINLVRDLPQGFSALEPLVDLPIGINITRFQTLLALHRSYLTPGDSSSGWTAGAAAYYVGYLQPRTFLLKYNENGTITDAVDCALDPLSETKCTLKSFTVEKGIYQTSNFRVQPTESIVRFPNITNLCPFGEVFNATRFASVYAWNRKRISNCVADYSVLYNSASFSTFKCYGVSPTKLNDLCFTNVYADSFVIRGDEVRQIAPGQTGKIADYNYKLPDDFTGCVIAWNSNNLDSKVGGNYNYLYRLFRKSNLKPFERDISTEIYQAGSTPCNGVEGFNCYFPLQSYGFQPTNGVGYQPYRVVVLSFELLHAPATVCGPKKSTNLVKNKCVNFNFNGLTGTGVLTESNKKFLPFQQFGRDIADTTDAVRDPQTLEILDITPCSFGGVSVITPGTNTSNQVAVLYQGVNCTEVPVAIHADQLTPTWRVYSTGSNVFQTRAGCLIGAEHVNNSYECDIPIGAGICASYQTQTNSPRRARSVASQSIIAYTMSLGAENSVAYSNNSIAIPTNFTISVTTEILPVSMTKTSVDCTMYICGDSTECSNLLLQYGSFCTQLNRALTGIAVEQDKNTQEVFAQVKQIYKTPPIKDFGGFNFSQILPDPSKPSKRSFIEDLLFNKVTLADAGFIKQYGDCLGDIAARDLICAQKFNGLTVLPPLLTDEMIAQYTSALLAGTITSGWTFGAGAALQIPFAMQMAYRFNGIGVTQCVLYENQKLIANQFNSAIGKIQDSLSSTASALGKLQDVVNQNAQALNTLVKQLSSNFGAISSVLNDILSRLDKVEAEVQIDRLITGRLQSLQTYVTQQLIRAAEIRASANLAATKMSECVLGQSKRVDFCGKGYHLMSFPQSAPHGVVFLHVTYVPAQEKNFTTAPAICHDGKAHFPREGVFVSNGTHWFVTQRNFYEPQIITTDNTFVCGNCDVVIGIVNNTVYDPLQPELDSFKEELDKYFKNHTSPDVDLGDISGINASVVNIQKEIDRLNEVAKNLNESLIDLQELGKYEQYIKGGGGSDIIKLLNEQVNKEMQSSNLYMSMSSWCYTHSLDGAGLFLFDHAAEEYEHAKKLIIFLNENNVPVQLTSISAPEHKFEGLTQIFQKAYEHEQHISESINNIVDHAIKSKDHATFNFLQWYVAEQHEEEVLFKDILDKIELIGNENHGLYLADQYVKGIAKSRKS

SEQ ID NO: 13677 - protein, 1379 aa, Artificial Sequence
  SARS-CoV-2/Belgium/BA-02291/2020__EPI_ISL_415159 spike protein (1-1211)(N914C_S1123C) Ferritin construct
MFVFLVLLPLVSSQCVNLTTRTQLPPAYTNSFTRGVYYPDKVFRSSVLHSTQDLFLPFFSNVTWFHAIHVSGTNGTKRFDNPVLPFNDGVYFASTEKSNIIRGWIFGTTLDSKTQSLLIVNNATNVVIKVCEFQFCNDPFLGVYYHKNNKSWMESEFRVYSSANNCTFEYVSQPFLMDLEGKQGNFKNLREFVFKNIDGYFKIYSKHTPINLVRDLPQGFSALEPLVDLPIGINITRFQTLLALHRSYLTPGDSSSGWTAGAAAYYVGYLQPRTFLLKYNENGTITDAVDCALDPLSETKCTLKSFTVEKGIYQTSNFRVQPTESIVRFPNITNLCPFGEVFNATRFASVYAWNRKRISNCVADYSVLYNSASFSTFKCYGVSPTKLNDLCFTNVYADSFVIRGDEVRQIAPGQTGKIADYNYKLPDDFTGCVIAWNSNNLDSKVGGNYNYLYRLFRRSNLKPFERDISTEIYQAGSTPCNGVEGFNCYFPLQSYGFQPTNGVGYQPYRVVVLSFELLPAPATVCGPKKSTNLVKNKCVNFNFNGLTGTGVLTESNKKFLPFQQFGRDIADTTDAVRDPQTLEILDITPCSFGGVSVITPGTNTSNQVAVLYQGVNCTEVPVAIHADQLTPTWRVYSTGSNVFQTRAGCLIGAEHVNNSYECDIPIGAGICASYQTQTNSPRRARSVASQSIIAYTMSLGAENSVAYSNNSIAIPTNFTISVTTEILPVSMTKTSVDCTMYICGDSTECSNLLLQYGSFCTQLNRALTGIAVEQDKNTQEVFAQVKQIYKTPPIKDFGGFNFSQILPDPSKPSKRSFIEDLLFNKVTLADAGFIKQYGDCLGDIAARDLICAQKFNGLTVLPPLLTDEMIAQYTSALLAGTITSGWTFGAGAALQIPFAMQMAYRFNGIGVTQCVLYENQKLIANQFNSAIGKIQDSLSSAAPALGKLQDVVNQNAQALNTLVKQLSSNFGAISSVLNDILSRLDKVEAEVQIDRLITGRLQSLQTYVTQQLIRAAEIRASANLAATKMSECVLGQSKRVDFCGKGYHLMSFPQSAPHGVVFLHVTYVPAQEKNFTTAPAICHDGKAHFPREGVFVSNGTHWFVTQRNFYEPQIITTDNTFVCGNCDVVIGIVNNTVYDPLQPELDSFKEELDKYFKNHTSPDVDLGDISGINASVVNIQKEIDRLNEVAKNLNESLIDLQELGKYEQYIKGGGGSDIIKLLNEQVNKEMQSSNLYMSMSSWCYTHSLDGAGLFLFDHAAEEYEHAKKLIIFLNENNVPVQLTSISAPEHKFEGLTQIFQKAYEHEQHISESINNIVDHAIKSKDHATFNFLQWYVAEQHEEEVLFKDILDKIELIGNENHGLYLADQYVKGIAKSRKS

SEQ ID NO: 13678 - protein, 1379 aa, Artificial Sequence
  SARS-CoV-2/USA/WA8-UW5/2020__EPI_ISL_413486 spike protein (1-1211)(N914C_S1123C) Ferritin construct
MFVFLVLLPLVSSQCVNLTTRTQLPPAYTNSFTRGVYYPDKVFRSSVLHSTQDLFLPFFSNVTWFHAIHVSGTNGTKRFDNPVLPFNDGVYFASTEKSNIIRGWIFGTTLDSKTQSLLIVNNATNVVIKVCEFQFCNDPFLGVYYHKNNKSWMESEFRVYSSANNCTFEYVSQPFLMDLEGKQGNFKNLREFVFKNIDGYFKIYSKHTPINLVRDLPQGFSALEPLVDLPIGINITRFQTLLALHRSYLTPGDSSSGWTAGAAAYYVGYLQPRTFLLKYNENGTITDAVDCALDPLSETKCTLKSFTVEKGIYQTSNFRVQPTESIVRFPNITNLCPFGEVFNATRFASVYAWNRKRISNCVADYSVLYNSASFSTFKCYGVSPTKLNDLCFTNVYADSFVIRGDEVRQIAPGQTGKIADYNYKLPDDFTGCVIAWNSNNLDSKVGGNYNYLYRLFRKSNLKPFERDISTEIYQAGSTPCNGVEGFNCYFPLQSYGFQPTNGVGYQPYRVVVLSFELLHAPATVCGPKKSTNLVKNKCVNFNFNGLTGTGVLTESNKKFLPFQQFGRDIADTTDAVRDPQTLEILDITPCSFGGVSVITPGTNTSNQVAVLYQDVNCTEVPVAIHADQLTPTWRVYSTGSNVFQTRAGCLIGAEYVNNSYECDIPIGAGICASYQTQTNSPRRARSVASQSIIAYTMSLGAENSVAYSNNSIAIPTNFTISVTTEILPVSMTKTSVDCTMYICGDSTECSNLLLQYGSFCTQLNRALTGIAVEQDKNTQEVFAQVKQIYKTPPIKDFGGFNFSQILPDPSKPSKRSFIEDLLFNKVTLADAGFIKQYGDCLGDIAARDLICAQKFNGLTVLPPLLTDEMIAQYTSALLAGTITSGWTFGAGAALQIPFAMQMAYRFNGIGVTQCVLYENQKLIANQFNSAIGKIQDSLSSTASALGKLQDVVNQNAQALNTLVKQLSSNFGAISSVLNDILSRLDKVEAEVQIDRLITGRLQSLQTYVTQQLIRAAEIRASANLAATKMSECVLGQSKRVDFCGKGYHLMSFPQSAPHGVVFLHVTYVPAQEKNFTTAPAICHDGKAHFPREGVFVSNGTHWFVTQRNFYEPQIITTDNTFVCGNCDVVIGIVNNTVYDPLQPELDSFKEELDKYFKNHTSPDVDLGDISGINASVVNIQKEIDRLNEVAKNLNESLIDLQELGKYEQYIKGGGGSDIIKLLNEQVNKEMQSSNLYMSMSSWCYTHSLDGAGLFLFDHAAEEYEHAKKLIIFLNENNVPVQLTSISAPEHKFEGLTQIFQKAYEHEQHISESINNIVDHAIKSKDHATFNFLQWYVAEQHEEEVLFKDILDKIELIGNENHGLYLADQYVKGIAKSRKS

SEQ ID NO: 13679 - protein, 1379 aa, Artificial Sequence
  SARS-CoV-2/England/20102000506/2020__EPI_ISL_415147 spike protein (1-1211)(N914C_S1123C) Ferritin construct
MFVFLVLLPLVSSQCVNLTTRTQLPPAYTNSFTRGVYYPDKVFRSSVLHSTQDLFLPFFSNVTWFHAIHVSGTNGTKRFDNPVLPFNDGVYFASTEKSNIIRGWIFGTTLDSKTQSLLIVNNATNVVIKVCEFQFCNDPFLGVYYHKNNKSWMESEFRVYSSANNCTFEYVSQPFLMDLEGKQGNFKNLREFVFKNIDGYFKIYSKHTPINLVRDLPQGFSALEPLVDLPIGINITRFQTLLALHRSYLTPGDSSSGWTAGAAAYYVGYLQPRTFLLKYNENGTITDAVDCALDPLSETKCTLKSFTVEKGIYQTSNFRVQPTESIVRFPNITNLCPFGEVFNATRFASVYAWNRKRISNCVADYSVLYNSASFSTFKCYGVSPTKLNDLCFTNVYADSFVIRGDEVRQIAPGQTGKIADYNYKLPDDFTGCVIAWNSNNLDSKVGGNYNYLYRLFRKSNLKPFERDISTEIYQAGSTPCNGVEGFNCYFPLQSYGFQPTNGVGYQPYRVVVLSFELLHAPATVCGPKKSTNLVKNKCVNFNFNGLTGTGVLTESNKKFLPFQQFGRDIADTTDAVRDPQTLEILDITPCSFGGVSVITPGTNTSNQVAVLYQGVNCTEVPVAIHADQLTPTWRVYSTGSNVFQTRAGCLIGAEHVNNSYECDIPIGAGICASYQTQTNSPRRARSVASQSIIAYTMSLGAENSVAYSNNSIAIPTNFTISVTTEILPVSMTKTSVDCTMYICGDSTECSNLLLQYGSFCTQLNRALTGIAVEQDKNTQEVFAQVKQIYKTPPIKDFGGFNFSQILPDPSKPSKRSFIEDLLFNKVTLADAGFIKQYGYCLGDIAARDLICAQKFNGLTVLPPLLTDEMIAQYTSALLAGTITSGWTFGAGAALQIPFAMQMAYRFNGIGVTQCVLYENQKLIANQFNSAIGKIQDSLSSTASALGKLQDVVNQNAQALNTLVKQLSSNFGAISSVLNDILSRLDKVEAEVQIDRLITGRLQSLQTYVTQQLIRAAEIRASANLAATKMSECVLGQSKRVDFCGKGYHLMSFPQSAPHGVVFLHVTYVPAQEKNFTTAPAICHDGKAHFPREGVFVSNGTHWFVTQRNFYEPQIITTDNTFVCGNCDVVIGIVNNTVYDPLQPELDSFKEELDKYFKNHTSPDVDLGDISGINASVVNIQKEIDRLNEVAKNLNESLIDLQELGKYEQYIKGGGGSDIIKLLNEQVNKEMQSSNLYMSMSSWCYTHSLDGAGLFLFDHAAEEYEHAKKLIIFLNENNVPVQLTSISAPEHKFEGLTQIFQKAYEHEQHISESINNIVDHAIKSKDHATFNFLQWYVAEQHEEEVLFKDILDKIELIGNENHGLYLADQYVKGIAKSRKS

SEQ ID NO: 13680 - protein, 1379 aa, Artificial Sequence
  SARS-CoV-2/Belgium/VAG-03013/2020__EPI_ISL_415155 spike protein (1-1211)(N914C_S1123C) Ferritin construct
MFVFLVLLPLVSSQCVNLTTRTQLPPAYTNSFTRGVYYPDKVFRSSVLHSTQDLFLPFFSNVTWFHAIHVSGTNGTKRFDNPVLPFNDGVYFASTEKSNIIRGWIFGTTLDSKTQSLLIVNNATNVVIKVCEFQFCNDPFLGVYYHKNNKSWMESEFRVYSSANNCTFEYVSQPFLMDLEGKQGNFKNLREFVFKNIDGYFKIYSKHTPINLVRDLPQGFSALEPLVDLPIGINITRFQTLLALHRSYLTPGDSSSGWTAGAAAYYVGYLQPRTFLLKYNENGTITDAVDCALDPLSETKCTLKSFTVEKGIYQTSNFRVQPTESIVRFPNITNLCPFGEVFNATRFASVYAWNRKRISNCVADYSVLYNSASFSTFKCYGVSPTKLNDLCFTNVYADSFVIRGDEVRQIAPGQTGKIADYNYKLPDDFTGCVIAWNSNNLDSKVGGNYNYLYRLFRKSNLKPFERDISTEIYQAGSTPCNGVEGFNCYFPLQSYGFQPTNGVGYQPYRVVVLSFELLHAPATVCGPKKSTNLVKNKCVNFNFNGLTGTGVLTESNKKFLPFQQFGRDIADTTDAVRDPQTLEILDITPCSFGGVSVITPGTNTSNQVAVLYQGVNCTEVPVAIHADQLTPTWRVYSTGSNVFQTRAGCLIGAEHVNNSYECDIPIGAGICASYQTQTNSPRRARSVASQSIIAYTMSLGAENSVAYSNNSIAIPTNFTISVTTEILPVSMTKTSVDCTMYICGDSTECSNLLLQYGSFCTQLNRALTGIAVEQDKNTQEVFAQVKQIYKTPPIKDFGGFNFSQILPDPSKPSKRSFIEDLLFNKVTLADAGFIKQYGDCLGDIAARDLICAQKFNGLTVLPPLLTDEMIAQYTSALLAGTITSGWTFGAGAALQIPFAMQMAYRFNGIGVTQCVLYENQKLIANQFNSAIGKIQDSLSSTATALGKLQDVVNQNAQALNTLVKQLSSNFGAISSVLNDILSRLDKVEAEVQIDRLITGRLQSLQTYVTQQLIRAAEIRASANLAATKMSECVLGQSKRVDFCGKGYHLMSFPQSAPHGVVFLHVTYVPAQEKNFTTAPAICHDGKAHFPREGVFVSNGTHWFVTQRNFYEPQIITTDNTFVCGNCDVVIGIVNNTVYDPLQPELDSFKEELDKYFKNHTSPDVDLGDISGINASVVNIQKEIDRLNEVAKNLNESLIDLQELGKYEQYIKGGGGSDIIKLLNEQVNKEMQSSNLYMSMSSWCYTHSLDGAGLFLFDHAAEEYEHAKKLIIFLNENNVPVQLTSISAPEHKFEGLTQIFQKAYEHEQHISESINNIVDHAIKSKDHATFNFLQWYVAEQHEEEVLFKDILDKIELIGNENHGLYLADQYVKGIAKSRKS

SEQ ID NO: 13681 - protein, 1379 aa, Artificial Sequence
  SARS-CoV-2/Belgium/BC-03016/2020__EPI_ISL_415157 spike protein (1-1211)(N914C_S1123C) Ferritin construct
MFVFLVLLPLVSSQCVNLTTRTQLPPAYTNSFTRGVYYPDKVFRSSVLHSTQDLFLPFFSNVTWFHAIHVSGTNGTKRFDNPVLPFNDGVYFASTEKSNIIRGWIFGTTLDSKTQSLLIVNNATNVVIKVCEFQFCNDPFLGVYYHKNNKSWMESEFRVYSSANNCTFEYVSQPFLMDLEGKQGNFKNLREFVFKNIDGYFKIYSKHTPINLVRDLPQGFSALEPLVDLPIGINITRFQTLLALHRSYLTPGDSSSGWTAGAAAYYVGYLQPRTFLLKYNENGTITDAVDCALDPLSETKCTLKSFTVEKGIYQTSNFRVQPTESIVRFPNITNLCPFGEVFNATRFASVYAWNRKRISNCVADYSVLYNSASFSTFKCYGVSPTKLNDLCFTNVYADSFVIRGDEVRQIAPGQTGKIADYNYKLPDDFTGCVIAWNSNNLDSKVGGNYNYLYRLFRKSNLKPFERDISTEIYQAGSTPCNGVEGFNCYFPLQSYGFQPTNGVGYQPYRVVVLSFELLHAPATVCGPKKSTNLVKNKCVNFNFNGLTGTGVLTESNKKFLPFQQFGRDIADTTDAVRDPQTLEILDITPCSFGGVSVITPGTNTSNQVAVLYQGVNCTEVPVAIHADQLTPTWRVYSTGSNVFQTRAGCLIGAEHVNNSYECDIPIGAGICASYQTQTNSPRRARSVASQSIIAYTMSLGAENSVAYSNNSIAIPTNFTISVTTEILPVSMTKTSVDCTMYICGDSTECSNLLLQYGSFCTQLNRALTGIAVEQDKNTQEVFAQVKQIYKTPPIKDFGGFNFSQILPDPSKPSKRSFIEDLLFNKVTLADAGFIKQYGDCLGDIAARDLICAQKFNGLTVLPPLLTDEMIAQYTSALLAGTITSGWTFGAGAALQIPFAMQMAYRFNGIGVTQCVLYENQKLIANQFNSAIGKIQDSLSSTAPALGKLQDVVNQNAQALNTLVKQLSSNFGAISSVLNDILSRLDKVEAEVQIDRLITGRLQSLQTYVTQQLIRAAEIRASANLAATKMSECVLGQSKRVDFCGKGYHLMSFPQSAPHGVVFLHVTYVPAQEKNFTTAPAICHDGKAHFPREGVFVSNGTHWFVTQRNFYEPQIITTDNTFVCGNCDVVIGIVNNTVYDPLQPELDSFKEELDKYFKNHTSPDVDLGDISGINASVVNIQKEIDRLNEVAKNLNESLIDLQELGKYEQYIKGGGGSDIIKLLNEQVNKEMQSSNLYMSMSSWCYTHSLDGAGLFLFDHAAEEYEHAKKLIIFLNENNVPVQLTSISAPEHKFEGLTQIFQKAYEHEQHISESINNIVDHAIKSKDHATFNFLQWYVAEQHEEEVLFKDILDKIELIGNENHGLYLADQYVKGIAKSRKS

SEQ ID NO: 13682 - protein, 1379 aa, Artificial Sequence
  SARS-CoV-2/Germany/BavPat3/2020__EPI_ISL_414521 spike protein (1-1211)(N914C_S1123C) Ferritin construct
MFVFLVLLPLVSSQCVNLTTRTQLPPAYTNSFTRGVYYPDKVFRSSVLHSTQDLFLPFFSNVTWFHAIHVSGTNGTKRFDNPVLPFNDGVYFASTEKSNIIRGWIFGTTLDSKTQSLLIVNNATNVVIKVCEFQFCNDPFLGVYYHKNNKSWMESEFRVYSSANNCTFEYVSQPFLMDLEGKQGNFKNLREFVFKNIDGYFKIYSKHTPINLVRDLPQGFSALEPLVDLPIGINITRFQTLLALHRSYLTPGDSSSGWTAGAAAYYVGYLQPRTFLLKYNENGTITDAVDCALDPLSETKCTLKSFTVEKGIYQTSNFRVQPTESIVRFPNITNLCPFGEVFNATRFASVYAWNRKRISNCVADYSVLYNSASFSTFKCYGVSPTKLNDLCFTNVYADSFVIRGDEVRQIAPGQTGKIADYNYKLPDDFTGCVIAWNSNNLDSKVGGNYNYLYRLFRKSNLKPFERDISTEIYQAGSTPCNGVEGFNCYFPLQSYGFQPTNGVGYQPYRVVVLSFELLHAPATVCGPKKSTNLVKNKCVNFNFNGLTGTGVLTESNKKFLPFQQFGRDIADTTDAVRDPQTLEILDITPCSFGGVSVITPGTNTSNQVAVLYQDVNCTEVPVAIHADQLTPTWRVYSTGSNVFQTRAGCLIGAEHVNNSYECDIPIGAGICASYQTQTNSPRRARSVASQSIIAYTMSLGAENSVAYSNNSIAIPTNFTISVTTEILPVSMTKTSVDCTMYICGDSTECSNLLLQYGSFCTQLNRALTGIAVEQDKNTQQVFAQVKQIYKTPPIKDFGGFNFSQILPDPSKPSKRSFIEDLLFNKVTLADAGFIKQYGDCLGDIAARDLICAQKFNGLTVLPPLLTDEMIAQYTSALLAGTITSGWTFGAGAALQIPFAMQMAYRFNGIGVTQCVLYENQKLIANQFNSAIGKIQDSLSSTASALGKLQDVVNQNAQALNTLVKQLSSNFGAISSVLNDILSRLDKVEAEVQIDRLITGRLQSLQTYVTQQLIRAAEIRASANLAATKMSECVLGQSKRVDFCGKGYHLMSFPQSAPHGVVFLHVTYVPAQEKNFTTAPAICHDGKAHFPREGVFVSNGTHWFVTQRNFYEPQIITTDNTFVCGNCDVVIGIVNNTVYDPLQPELDSFKEELDKYFKNHTSPDVDLGDISGINASVVNIQKEIDRLNEVAKNLNESLIDLQELGKYEQYIKGGGGSDIIKLLNEQVNKEMQSSNLYMSMSSWCYTHSLDGAGLFLFDHAAEEYEHAKKLIIFLNENNVPVQLTSISAPEHKFEGLTQIFQKAYEHEQHISESINNIVDHAIKSKDHATFNFLQWYVAEQHEEEVLFKDILDKIELIGNENHGLYLADQYVKGIAKSRKS

SEQ ID NO: 13683 - protein, 1379 aa, Artificial Sequence
  SARS-CoV-2/France/HF1805/2020__EPI_ISL_414628 spike protein (1-1211)(N914C_S1123C) Ferritin construct
MFVFLVLLPLVSSQCVNLTTRTQLPPAYTNSFTRGVYYPDKVFRSSVLHSTQDLFLPFFSNVTWFHAIHVSGTNGTKRFDNPVLPFNDGVYFASTEKSNIIRGWIFGTTLDSKTQSLLIVNNATNVVIKVCEFQFCNDPFLGVYYHKNNKSWMESEFRVYSSANNCTFEYVSQPFLMDLEGKQGNFKNLREFVFKNIDGYFKIYSKHTPINLVRDLPQGFSALEPLVDLPIGINITRFQTLLALHRSYLTPGDSSSGWTAGAAAYYVGYLQPRTFLLKYNENGTITDAVDCALDPLSETKCTLKSFTVEKGIYQTSNFRVQPTESIVRFPNITNLCPFGEVFNATRFASVYAWNRKRISNCVADYSVLYNSASFSTFKCYGVSPTKLNDLCFTNVYADSFVIRGDEVRQIAPGQTGKIADYNYKLPDDFTGCVIAWNSNNLDSKVGGNYNYLYRLFRKSNLKPFERDISTEIYQAGSTPCNGVEGFNCYFPLQSYGFQPTNGVGYQPYRVVVLSFELLHAPATVCGPKKSTNLVKNKCVNFNFNGLTGTGVLTESNKKFLPFQQFGRDIADTTDAVRDPQTLEILDITPCSFGGVSVITPGTNTSNQVAVLYQGVNCTEVPVAIHADQLTPTWRVYSTGSNVFQTRAGCLIGAEHVNNSYECDIPIGAGICASYQTQTNSPRRARSVASQSIIAYTMSLGAENSVAYSNNSIAIPTNFTISVTTEILPVSMTKTSVDCTMYICGDSTECSNLLLQYGSFCTQLNRALTGIAVEQDKNTQEVFAQVKQIYKTPPIKDFGGFNFSQILPDPSKPSKRSFIEDLLFNKVTLADAGFIKQYGDCLGDIAARDLICAQKFNGLTVLPPLLTDEMIAQYTSALLAGTITSGWTFGAGAALQIPFAMQMAYRFNGIGVTQCVLYENQKLIANQFNSAIGKIQDSLSSTASALGKLQDVVNQNAQALNTLVKQLSSNFGAISSVLNDILSRLDKVEAEVQIDRLITGRLQSLQTYVTQQLIRAAEIRASANLAATKMSECVLGQSKRVDFCGKGYHLMSFPQSAPHGVVFLHVTYVPAQEKNFTTAPAICHDGKAHFPREGVFVSNGTHWFVTQRNFYEPQIITTDNTFVCGNCDVVIGVVNNTVYDPLQPELDSFKEELDKYFKNHTSPDVDLGDISGINASVVNIQKEIDRLNEVAKNLNESLIDLQELGKYEQYIKGGGGSDIIKLLNEQVNKEMQSSNLYMSMSSWCYTHSLDGAGLFLFDHAAEEYEHAKKLIIFLNENNVPVQLTSISAPEHKFEGLTQIFQKAYEHEQHISESINNIVDHAIKSKDHATFNFLQWYVAEQHEEEVLFKDILDKIELIGNENHGLYLADQYVKGIAKSRKS

SEQ ID NO: 13684 - protein, 1379 aa, Artificial Sequence
  SARS-CoV-2/Netherlands/ZuidHolland_9/2020__EPI_ISL_414445 spike protein (1-1211)(N914C_S1123C) Ferritin construct
MFVFLVLLPLVSSQCVNLTTRTQLPPAYTNSFTRGVYYPDKVFRSSVLHSTQDLFLPFFSNVTWFHAIHVSGTNGTKRFDNPVLPFNDGVYFASTEKSNIIRGWIFGTTLDSKTQSLLIVNNATNVVIKVCEFQFCNDPFLGVYYHKNNKSWMESEFRVYSSANNCTFEYVSQPFLMDLEGKQGNFKNLREFVFKNIDGYFKIYSKHTPINLVRDLPQGFSALEPLVDLPIGINITRFQTLLALHRSYLTPGDSSSGWTAGAAAYYVGYLQPRTFLLKYNENGTITDAVDCALDPLSETKCTLKSFTVEKGIYQTSNFRVQPTESIVRFPNITNLCPFGEVFNATRFASVYAWNRKRISNCVADYSVLYNSASFSTFKCYGVSPTKLNDLCFTNVYADSFVIRGDEVRQIAPGQTGKIADYNYKLPDDFTGCVIAWNSNNLDSKVGGNYNYLYRLFRKSNLKPFERDISTEIYQAGSTPCNGVEGFNCYFPLQSYGFQPTNGVGYQPYRVVVLSFELLHAPATVCGPKKSTNLVKNKCVNFNFNGLTGTGVLTESNKKFLPFQQFGRDIADTTDAVRDPQTLEILDITPCSFGGVSVITPGTNTSNQVAVLYQGVNCTEVPVAIHADQLTPTWRVYSTGSNVFQTRAGCLIGAEHVNNSYECDIPIGAGICASYQTQTNSPRRARSVASQSIIAYTMSLGAENSVAYSNNSIAIPTNFTISVTTEILPVSMTKTSVDCTMYICGDSTECSNLLLQYGSFCTQLNRALTGIAVEQDKNTQEVFAQVKQIYKTPPIKDFGGFNFSQILPDPSKPSKRSFIEDLLFNKVTLADAGFIKQYGDCLGDIAARDLICVQKFNGLTVLPPLLTDEMIAQYTSALLAGTITSGWTFGAGAALQIPFAMQMAYRFNGIGVTQCVLYENQKLIANQFNSAIGKIQDSLSSTASALGKLQDVVNQNAQALNTLVKQLSSNFGAISSVLNDILSRLDKVEAEVQIDRLITGRLQSLQTYVTQQLIRAAEIRASANLAATKMSECVLGQSKRVDFCGKGYHLMSFPQSAPHGVVFLHVTYVPAQEKNFTTAPAICHDGKAHFPREGVFVSNGTHWFVTQRNFYEPQIITTDNTFVCGNCDVVIGIVNNTVYDPLQPELDSFKEELDKYFKNHTSPDVDLGDISGINASVVNIQKEIDRLNEVAKNLNESLIDLQELGKYEQYIKGGGGSDIIKLLNEQVNKEMQSSNLYMSMSSWCYTHSLDGAGLFLFDHAAEEYEHAKKLIIFLNENNVPVQLTSISAPEHKFEGLTQIFQKAYEHEQHISESINNIVDHAIKSKDHATFNFLQWYVAEQHEEEVLFKDILDKIELIGNENHGLYLADQYVKGIAKSRKS

SEQ ID NO: 13685 - protein, 1379 aa, Artificial Sequence
  SARS-CoV-2/Finland/FIN03032020A/2020__EPI_ISL_413602 spike protein (1-1211)(N914C_S1123C) Ferritin construct
MFVFLVLLPLVSSQCVNLTTRTQLPPAYTNSFTRGVYYPDKVFRSSVLHSTQDLFLPFFSNVTWFHAIHVSGTNGTKRFDNPVLPFNDGVYFASTEKSNIIRGWIFGTTLDSKTQSLLIVNNATNVVIKVCEFQFCNDPFLGVYYHKNNKSWMESEFRVYSSANNCTFEYVSQPFLMDLEGKQGNFKNLREFVFKNIDGYFKIYSKHTPINLVRDLPQGFSALEPLVDLPIGINITRFQTLLALHRSYLTPGDSSSGWTAGAAAYYVGYLQPRTFLLKYNENGTITDAVDCALDPLSETKCTLKSFTVEKGIYQTSNFRVQPTESIVRFPNITNLCPFGEVFNATRFASVYAWNRKRISNCVADYSVLYNSASFSTFKCYGVSPTKLNDLCFTNVYADSFVIRGDEVRQIAPGQTGKIADYNYKLPDDFTGCVISWNSNNLDSKVGGNYNYLYRLFRKSNLKPFERDISTEIYQAGSTPCNGVEGFNCYFPLQSYGFQPTNGVGYQPYRVVVLSFELLHAPATVCGPKKSTNLVKNKCVNFNFNGLTGTGVLTESNKKFLPFQQFGRDIADTTDAVRDPQTLEILDITPCSFGGVSVITPGTNTSNQVAVLYQGVNCTEVPVAIHADQLTPTWRVYSTGSNVFQTRAGCLIGAEHVNNSYECDIPIGAGICASYQTQTNSPRRARSVASQSIIAYTMSLGAENSVAYSNNSIAIPTNFTISVTTEILPVSMTKTSVDCTMYICGDSTECSNLLLQYGSFCTQLNRALTGIAVEQDKNTQEVFAQVKQIYKTPPIKDFGGFNFSQILPDPSKPSKRSFIEDLLFNKVTLADAGFIKQYGDCLGDIAARDLICAQKFNGLTVLPPLLTDEMIAQYTSALLAGTITSGWTFGAGAALQIPFAMQMAYRFNGIGVTQCVLYENQKLIANQFNSAIGKIQDSLSSTASALGKLQDVVNQNAQALNTLVKQLSSNFGAISSVLNDILSRLDKVEAEVQIDRLITGRLQSLQTYVTQQLIRAAEIRASANLAATKMSECVLGQSKRVDFCGKGYHLMSFPQSAPHGVVFLHVTYVPAQEKNFTTAPAICHDGKAHFPREGVFVSNGTHWFVTQRNFYEPQIITTDNTFVCGNCDVVIGIVNNTVYDPLQPELDSFKEELDKYFKNHTSPDVDLGDISGINASVVNIQKEIDRLNEVAKNLNESLIDLQELGKYEQYIKGGGGSDIIKLLNEQVNKEMQSSNLYMSMSSWCYTHSLDGAGLFLFDHAAEEYEHAKKLIIFLNENNVPVQLTSISAPEHKFEGLTQIFQKAYEHEQHISESINNIVDHAIKSKDHATFNFLQWYVAEQHEEEVLFKDILDKIELIGNENHGLYLADQYVKGIAKSRKS

SEQ ID NO: 13686 - protein, 1379 aa, Artificial Sequence
  SARS-CoV-2/France/GE1977/2020__EPI_ISL_414632 spike protein (1-1211)(N914C_S1123C) Ferritin construct
MFVFLVLLPLVSSQCVNLTTRTQLPPAYTNSFTRGVYYPDKVFRSSVLHSTQDLFLPFFSNVTWFHAIHVSGTNGTKRFDNPVLPFNDGVYFASTEKSNIIRGWIFGTTLDSKTQSLLIVNNATNVVIKVCEFQFCNDPFLGVYYHKNNKSWMESEFRVYSSANNCTFEYVSQPFLMDLEGKQGNFKNLREFVFKNIDGYFKIYSKHTPINLVRDLPQGFSALEPLVDLPIGINITRFQTLLALHRSYLTPGDSSSGWTAGAAAYYVGYLQPRTFLLKYNENGTITDAVDCALDPLSETKCTLKSFTVEKGIYQTSNFRVQPTESIVRFPNITNLCPFGEVFNATRFASVYAWNRKRISNCVADYSVLYNSASFSTFKCYGVSPTKLNDLCFTNVYADSFVIRGDEVRQIAPGQTGKIADYNYKLPDDFTGCVIAWNSNNLDSKVGGNYNYLYRLFRKSNLKPFERDISTEIYQAGSTPCNGVEGFNCYFPLQSYGFQPTNGVGYQPYRVVVLSFELLHAPATVCGPKKSTNLVKNKCVNFNFNGLTGTGVLTESNKKFLPFQQFGRDIADTTDAVRDPQTLEILDITPCSFGGVSVITPGTNTSNQVAVLYQGVNCTEVPVAIHADQLTPTWRVYSTGSNVFQTRAGCLIGAEHVNNSYECDIPIGAGICASYQTQTNSPRRARSVASQSIIAYTMSLGAENSVAYSNNSIAIPTNFTISVTTEILPVSMTKTSVDCTMYICGDSTECSNLLLQYGSFCTQLNRALTGIAVEQDKNTQEVFAQVKQIYKTPPIKDFGGFNFSQILPDPSKPSKRSFIEDLLFNKVTLADAGFIKQYGDCLGDIAARDLICAQKFNGLTVLPPLLTDEMIAQYTSALLAGTITSGWTFGAGAALQIPFAMQMAYRFNGIGVTQCVLYENQKLIANQFNSAIGKIQDSLFSTASALGKLQDVVNQNAQALNTLVKQLSSNFGAISSVLNDILSRLDKVEAEVQIDRLITGRLQSLQTYVTQQLIRAAEIRASANLAATKMSECVLGQSKRVDFCGKGYHLMSFPQSAPHGVVFLHVTYVPAQEKNFTTAPAICHDGKAHFPREGVFVSNGTHWFVTQRNFYEPQIITTDNTFVCGNCDVVIGIVNNTVYDPLQPELDSFKEELDKYFKNHTSPDVDLGDISGINASVVNIQKEIDRLNEVAKNLNESLIDLQELGKYEQYIKGGGGSDIIKLLNEQVNKEMQSSNLYMSMSSWCYTHSLDGAGLFLFDHAAEEYEHAKKLIIFLNENNVPVQLTSISAPEHKFEGLTQIFQKAYEHEQHISESINNIVDHAIKSKDHATFNFLQWYVAEQHEEEVLFKDILDKIELIGNENHGLYLADQYVKGIAKSRKS

SEQ ID NO: 13687 - protein, 1379 aa, Artificial Sequence
  SARS-CoV-2/Finland/FIN-313/2020__EPI_ISL_414641 spike protein (1-1211)(N914C_S1123C) Ferritin construct
MFVFLVLLPLVSSQCVNLTTRTQLPPAYTNSFTRGVYYPDKVFRSSVLHSTQDLFLPFFSNVTWFHAIHVSGTNGTKRFDNPVLPFNDGVYFASTEKSNIIRGWIFGTTLDSKTQSLLIVNNATNVVIKVCEFQFCNDPFLGVYYHKNNKSWMESEFRVYSSANNCTFEYVSQPFLMDLEGKQGNFKNLREFVFKNIDGYFKIYSKHTPINLVRDLPQGFSALEPLVDLPIGINITRFKTLLALHRSYLTPGDSSSGWTAGAAAYYVGYLQPRTFLLKYNENGTITDAVDCALDPLSETKCTLKSFTVEKGIYQTSNFRVQPTESIVRFPNITNLCPFGEVFNATRFASVYAWNRKRISNCVADYSVLYNSASFSTFKCYGVSPTKLNDLCFTNVYADSFVIRGDEVRQIAPGQTGKIADYNYKLPDDFTGCVIAWNSNNLDSKVGGNYNYLYRLFRKSNLKPFERDISTEIYQAGSTPCNGVEGFNCYFPLQSYGFQPTNGVGYQPYRVVVLSFELLHAPATVCGPKKSTNLVKNKCVNFNFNGLTGTGVLTESNKKFLPFQQFGRDIADTTDAVRDPQTLEILDITPCSFGGVSVITPGTNTSNQVAVLYQGVNCTEVPVAIHADQLTPTWRVYSTGSNVFQTRAGCLIGAEHVNNSYECDIPIGAGICASYQTQTNSPRRARSVASQSIIAYTMSLGAENSVAYSNNSIAIPTNFTISVTTEILPVSMTKTSVDCTMYICGDSTECSNLLLQYGSFCTQLNRALTGIAVEQDKNTQEVFAQVKQIYKTPPIKDFGGFNFSQILPDPSKPSKRSFIEDLLFNKVTLADAGFIKQYGDCLGDIAARDLICAQKFNGLTVLPPLLTDEMIAQYTSALLAGTITSGWTFGAGAALQIPFAMQMAYRFNGIGVTQCVLYENQKLIANQFNSAIGKIQDSLSSTASALGKLQDVVNQNAQALNTLVKQLSSNFGAISSVLNDILSRLDKVEAEVQIDRLITGRLQSLQTYVTQQLIRAAEIRASANLAATKMSECVLGQSKRVDFCGKGYHLMSFPQSAPHGVVFLHVTYVPAQEKNFTTAPAICHDGKAHFPREGVFVSNGTHWFVTQRNFYEPQIITTDNTFVCGNCDVVIGIVNNTVYDPLQPELDSFKEELDKYFKNHTSPDVDLGDISGINASVVNIQKEIDRLNEVAKNLNESLIDLQELGKYEQYIKGGGGSDIIKLLNEQVNKEMQSSNLYMSMSSWCYTHSLDGAGLFLFDHAAEEYEHAKKLIIFLNENNVPVQLTSISAPEHKFEGLTQIFQKAYEHEQHISESINNIVDHAIKSKDHATFNFLQWYVAEQHEEEVLFKDILDKIELIGNENHGLYLADQYVKGIAKSRKS

SEQ ID NO: 13688 - protein, 1379 aa, Artificial Sequence
  SARS-CoV-2/Netherlands/ZuidHolland_2/2020__EPI_ISL_414556 spike protein (1-1211)(N914C_S1123C) Ferritin construct
MFVFLVLLPLVSSQCVNLTTRTQLPPAYTNSFTRGVYYPDKVFRSSVLHSTQDLFLPFFSNVTWFHAIHVSGTNGTKRFDNPVLPFNDGVYFASTEKSNIIRGWIFGTTLDSKTQSLLIVNNATNVVIKVCEFQFCNDPFLGVYYHKNNKSWMESEFRVYSSANNCTFEYVSQPFLMDLEGKQGNFKNLREFVFKNIDGYFKIYSKHTPINLVRDLPQGFSALEPLVDLPIGINITRFQTLLALHRSYLTPGDSSSGWTAGAAAYYVGYLQPRTFLLKYNENGTITDAVDCALDPLSETKCTLKSFTVEKGIYQTSNFRVQPTESIVRFPNITNLCPFGEVFNATRFASVYAWNRKRISNCVADYSVLYNSASFSTFKCYGVSPTKLNDLCFTNVYADSFVIRGDEVRQIAPGQTGKIADYNYKLPDDFTGCVIAWNSNNLDSKVGGNYNYLYRLFRKSNLKPFERDISTEIYQAGSTPCNGVEGFNCYFPLQSYGFQPTNGVGYQPYRVVVLSFELLHAPATVCGPKKSTNLVKNKCVNFNFNGLTGTGVLTESNKKFLPFQQFGRDIADTTDAVRDPQTLEILDITPCSFGGVSVITPGTNTSNQVAVLYQGVNCTEVPVAIHADQLTPTWRVYSTGSNVFQTRAGCLIGAEHVNNSYECDIPIGAGICASYQTQTNSPRRARSVASQSIIAYTMSLGAENSVAYSNNSIAIPTNFTISVTTEILPVSMTKTSVDCTMYICGDSTECSNLLLQYGSFCTQLNRALTGIALEQDKNTQEVFAQVKQIYKTPPIKDFGGFNFSQILPDPSKPSKRSFIEDLLFNKVTLADAGFIKQYGDCLGDIAARDLICAQKFNGLTVLPPLLTDEMIAQYTSALLAGTITSGWTFGAGAALQIPFAMQMAYRFNGIGVTQCVLYENQKLIANQFNSAIGKIQDSLSSTASALGKLQDVVNQNAQALNTLVKQLSSNFGAISSVLNDILSRLDKVEAEVQIDRLITGRLQSLQTYVTQQLIRAAEIRASANLAATKMSECVLGQSKRVDFCGKGYHLMSFPQSAPHGVVFLHVTYVPAQEKNFTTAPAICHDGKAHFPREGVFVSNGTHWFVTQRNFYEPQIITTDNTFVCGNCDVVIGIVNNTVYDPLQPELDSFKEELDKYFKNHTSPDVDLGDISGINASVVNIQKEIDRLNEVAKNLNESLIDLQELGKYEQYIKGGGGSDIIKLLNEQVNKEMQSSNLYMSMSSWCYTHSLDGAGLFLFDHAAEEYEHAKKLIIFLNENNVPVQLTSISAPEHKFEGLTQIFQKAYEHEQHISESINNIVDHAIKSKDHATFNFLQWYVAEQHEEEVLFKDILDKIELIGNENHGLYLADQYVKGIAKSRKS

SEQ ID NO: 13689 - protein, 1379 aa, Artificial Sequence
  SARS-CoV-2/USA/WA-UW31/2020__EPI_ISL_414618 spike protein (1-1211)(N914C_S1123C) Ferritin construct
MFVFLVLLPLVSSQCVNLTTRTQLPPAYTNSFTRGVYYPDKVFRSSVLHSTQDLFLPFFSNVTWFHAIHVSGTNGTKRFDNPVLPFNDGVYFASTEKSNIIRGWIFGTTLDSKTQSLLIVNNATNVVIKVCEFQFCNDPFLGVYYHKNNKSWMESEFRVYSSANNCTFEYVSQPFLMDLEGKQGNFKNLREFVFKNIDGYFKIYSKHTPINLVRDLPQGFSALEPLVDLPIGINITRFQTLLALHRSYLTPGDSSSGWTAGAAAYYVGYLQPRTFLLKYNENGTITDAVDCALDPLSETKCTLKSFTVEKGIYQTSNFRVQPTESIVRFPNITNLCPFGEVFNATRFASVYAWNRKRISNCVADYSVLYNSASFSTFKCYGVSPTKLNDLCFTNVYADSFVIRGDEVRQIAPGQTGKIADYNYKLPDDFTGCVIAWNSNNLDSKVGGNYNYLYRLFRKSNLKPFERDISTEIYQAGSTPCNGAEGFNCYFPLQSYGFQPTNGVGYQPYRVVVLSFELLHAPATVCGPKKSTNLVKNKCVNFNFNGLTGTGVLTESNKKFLPFQQFGRDIADTTDAVRDPQTLEILDITPCSFGGVSVITPGTNTSNQVAVLYQDVNCTEVPVAIHADQLTPTWRVYSTGSNVFQTRAGCLIGAEHVNNSYECDIPIGAGICASYQTQTNSPRRARSVASQSIIAYTMSLGAENSVAYSNNSIAIPTNFTISVTTEILPVSMTKTSVDCTMYICGDSTECSNLLLQYGSFCTQLNRALTGIAVEQDKNTQEVFAQVKQIYKTPPIKDFGGFNFSQILPDPSKPSKRSFIEDLLFNKVTLADAGFIKQYGDCLGDIAARDLICAQKFNGLTVLPPLLTDEMIAQYTSALLAGTITSGWTFGAGAALQIPFAMQMAYRFNGIGVTQCVLYENQKLIANQFNSAIGKIQDSLSSTASALGKLQDVVNQNAQALNTLVKQLSSNFGAISSVLNDILSRLDKVEAEVQIDRLITGRLQSLQTYVTQQLIRAAEIRASANLAATKMSECVLGQSKRVDFCGKGYHLMSFPQSAPHGVVFLHVTYVPAQEKNFTTAPAICHDGKAHFPREGVFVSNGTHWFVTQRNFYEPQIITTDNTFVCGNCDVVIGIVNNTVYDPLQPELDSFKEELDKYFKNHTSPDVDLGDISGINASVVNIQKEIDRLNEVAKNLNESLIDLQELGKYEQYIKGGGGSDIIKLLNEQVNKEMQSSNLYMSMSSWCYTHSLDGAGLFLFDHAAEEYEHAKKLIIFLNENNVPVQLTSISAPEHKFEGLTQIFQKAYEHEQHISESINNIVDHAIKSKDHATFNFLQWYVAEQHEEEVLFKDILDKIELIGNENHGLYLADQYVKGIAKSRKS

SEQ ID NO: 13690 - protein, 1379 aa, Artificial Sequence
  SARS-CoV-2/South Korea/SNU01/2020__EPI_ISL_411929 spike protein (1-1211)(N914C_S1123C) Ferritin construct
MFVFLVLLPLVSSQCVNLTTRTQLPPAYTNSFTRGVYYPDKVFRSSVLHSTQDLFLPFFSNVTWFHAIHVSGTNGTKRFDNPVLPFNDGVYFASTEKSNIIRGWIFGTTLDSKTQSLLIVNNATNVVIKVCEFQFCNDPFLGVYYHKNNKSWMESEFRVYSSANNCTFEYVSQPFLMDLEGKQGNFKNLREFVFKNIDGYFKIYSKHTPINLVRDLPQGFWALEPLVDLPIGINITRFQTLLALHRSYLTPGDSSSGWTAGAAAYYVGYLQPRTFLLKYNENGTITDAVDCALDPLSETKCTLKSFTVEKGIYQTSNFRVQPTESIVRFPNITNLCPFGEVFNATRFASVYAWNRKRISNCVADYSVLYNSASFSTFKCYGVSPTKLNDLCFTNVYADSFVIRGDEVRQIAPGQTGKIADYNYKLPDDFTGCVIAWNSNNLDSKVGGNYNYLYRLFRKSNLKPFERDISTEIYQAGSTPCNGVEGFNCYFPLQSYGFQPTNGVGYQPYRVVVLSFELLHAPATVCGPKKSTNLVKNKCVNFNFNGLTGTGVLTESNKKFLPFQQFGRDIADTTDAVRDPQTLEILDITPCSFGGVSVITPGTNTSNQVAVLYQDVNCTEVPVAIHADQLTPTWRVYSTGSNVFQTRAGCLIGAEHVNNSYECDIPIGAGICASYQTQTNSPRRARSVASQSIIAYTMSLGAENSVAYSNNSIAIPTNFTISVTTEILPVSMTKTSVDCTMYICGDSTECSNLLLQYGSFCTQLNRALTGIAVEQDKNTQEVFAQVKQIYKTPPIKDFGGFNFSQILPDPSKPSKRSFIEDLLFNKVTLADAGFIKQYGDCLGDIAARDLICAQKFNGLTVLPPLLTDEMIAQYTSALLAGTITSGWTFGAGAALQIPFAMQMAYRFNGIGVTQCVLYENQKLIANQFNSAIGKIQDSLSSTASALGKLQDVVNQNAQALNTLVKQLSSNFGAISSVLNDILSRLDKVEAEVQIDRLITGRLQSLQTYVTQQLIRAAEIRASANLAATKMSECVLGQSKRVDFCGKGYHLMSFPQSAPHGVVFLHVTYVPAQEKNFTTAPAICHDGKAHFPREGVFVSNGTHWFVTQRNFYEPQIITTDNTFVCGNCDVVIGIVNNTVYDPLQPELDSFKEELDKYFKNHTSPDVDLGDISGINASVVNIQKEIDRLNEVAKNLNESLIDLQELGKYEQYIKGGGGSDIIKLLNEQVNKEMQSSNLYMSMSSWCYTHSLDGAGLFLFDHAAEEYEHAKKLIIFLNENNVPVQLTSISAPEHKFEGLTQIFQKAYEHEQHISESINNIVDHAIKSKDHATFNFLQWYVAEQHEEEVLFKDILDKIELIGNENHGLYLADQYVKGIAKSRKS

SEQ ID NO: 13691 - protein, 1379 aa, Artificial Sequence
  SARS-CoV-2/China/WF0004/2020__EPI_ISL_413694 spike protein (1-1211)(N914C_S1123C) Ferritin construct
MFVFLVLLPLVSSQCVNLTTRTQLPPAYTNSFTRGVYYPDKVFRSSVLHSTQDLFLPFFSNVTWFHAIHVSGTNGTKRFDNPVLPFNDGVYFASTEKSNIIRGWIFGTTLDSKTQSLLIVNNATNVVIKVCEFQFCNDPFLGVYYHKNNKSWTESEFRVYSSANNCTFEYVSQPFLMDLEGKQGNFKNLREFVFKNIDGYFKIYSKHTPINLVRDLPQGFSALEPLVDLPIGINITRFQTLLALHRSYLTPGDSSSGWTAGAAAYYVGYLQPRTFLLKYNENGTITDAVDCALDPLSETKCTLKSFTVEKGIYQTSNFRVQPTESIVRFPNITNLCPFGEVFNATRFASVYAWNRKRISNCVADYSVLYNSASFSTFKCYGVSPTKLNDLCFTNVYADSFVIRGDEVRQIAPGQTGKIADYNYKLPDDFTGCVIAWNSNNLDSKVGGNYNYLYRLFRKSNLKPFERDISTEIYQAGSTPCNGVEGFNCYFPLQSYGFQPTNGVGYQPYRVVVLSFELLHAPATVCGPKKSTNLVKNKCVNFNFNGLTGTGVLTESNKKFLPFQQFGRDIADTTDAVRDPQTLEILDITPCSFGGVSVITPGTNTSNQVAVLYQDVNCTEVPVAIHADQLTPTWRVYSTGSNVFQTRAGCLIGAEHVNNSYECDIPIGAGICASYQTQTNSPRRARSVASQSIIAYTMSLGAENSVAYSNNSIAIPTNFTISVTTEILPVSMTKTSVDCTMYICGDSTECSNLLLQYGSFCTQLNRALTGIAVEQDKNTQEVFAQVKQIYKTPPIKDFGGFNFSQILPDPSKPSKRSFIEDLLFNKVTLADAGFIKQYGDCLGDIAARDLICAQKFNGLTVLPPLLTDEMIAQYTSALLAGTITSGWTFGAGAALQIPFAMQMAYRFNGIGVTQCVLYENQKLIANQFNSAIGKIQDSLSSTASALGKLQDVVNQNAQALNTLVKQLSSNFGAISSVLNDILSRLDKVEAEVQIDRLITGRLQSLQTYVTQQLIRAAEIRASANLAATKMSECVLGQSKRFDFCGKGYHLMSFPQSAPHGVVFLHVTYVPAQEKNFTTAPAICHDGKAHFPREGVFVSNGTHWFVTQRNFYEPQIITTDNTFVCGNCDVVIGIVNNTVYDPLQPELDSFKEELDKYFKNHTSPDVDLGDISGINASVVNIQKEIDRLNEVAKNLNESLIDLQELGKYEQYIKGGGGSDIIKLLNEQVNKEMQSSNLYMSMSSWCYTHSLDGAGLFLFDHAAEEYEHAKKLIIFLNENNVPVQLTSISAPEHKFEGLTQIFQKAYEHEQHISESINNIVDHAIKSKDHATFNFLQWYVAEQHEEEVLFKDILDKIELIGNENHGLYLADQYVKGIAKSRKS

SEQ ID NO: 13692 - protein, 1379 aa, Artificial Sequence
  SARS-CoV-2/China/WF0028/2020__EPI_ISL_413791 spike protein (1-1211)(N914C_S1123C) Ferritin construct
MFVFLVLLPLVSSQCVNLTTRTQLPPAYTNSFTRGVYYPDKVFRSSVLHSTQDLFLPFFSNVTWFHAIHVSGTNGTKRFDNPVLPFNDGVYFASTEKSNIIRGWIFGTTLDSKTQSLLIVNNATNVVIKVCEFQFCNDPFLGVYYHKNNKSWMESEFRVYSSANNCTFEYVSQPFLMDLEGKQGNFKNLREFVFKNIDGYFKIYSKHTPINLVRDLPQGFSALEPLVDLPIGINITRFQTLLALHRSYLTPGDSSSGWTAGAAAYYVGYLQPRTFLLKYNENGTITDAVDCALDPLSETKCTLKSFTVEKGIYQTSNFRVQPTESIVRFPNITNLCPFGEVFNATRFASVYAWNRKRISNCVADYSVLYNSASFSTFKCYGVSPTKLNDLCFTNVYADSFVIRGDEVRQIAPGQTGKIADYNYKLPDDFTGCVIAWNSNNLDSKVGGNYNYLYRLFRKSNLKPFERDISTEIYQAGSTPCNGVEGFNCYFPLQSYGFQPTNGVGYQPYRVVVLSFELLHAPATVCGPKKSTNLVKNKCVNFNFNGLTGTGVLTESNKKFLPFQQFGRDIADTTDAVRDPQTLEILDITPCSFGGVSVITPGTNTSNQVAVLYQDVNCTEVPVAIHADQLTPTWRVYSTGSNVFQTRAGCLIGAEHVNNSYECDIPIGAGICASYQTQTNSPRRARSVASQSIIAYTMSLGAENSVAYSNNSIAIPTNFTISVTTEILPVSMTKTSVDCTMYICGDSTECSNLLLQYGSFCTQLNRALTGIAVEQDKNTQEVFAQVKQIYKTPPIKDFGGFNFSQILPDPSKPSKRSFIEDLLFNKVTLADAGFIKQYGDCLGDIAARDLICAQKFNGLTVLPPLLTDEMIAQYTSALLAGTITSGWTFGAGAALQIPFAMQMAYRFNGIGVTQCVLYENQKLIANQFNSAIGKIQDSLSSTASALGKLQDVVNQNAQALNTLVKQLSSNFGAISSVLNDILSRLDKVEAEVQIDRLITGRLQSLQTYVTQQLIRAAEIRASANLAATKMSECVLGQSKRVDFCGKGYHLMSFPQSAPHGVVFLHVTYVPAQEKNFTTAPAICHDGKAHFPREGVFVSNGTHWFVTQRNFYEPQIITTDNTFVCGNCDVVIGIVNNTVYDPLQPELESFKEELDKYFKNHTSPDVDLGDISGINASVVNIQKEIDRLNEVAKNLNESLIDLQELGKYEQYIKGGGGSDIIKLLNEQVNKEMQSSNLYMSMSSWCYTHSLDGAGLFLFDHAAEEYEHAKKLIIFLNENNVPVQLTSISAPEHKFEGLTQIFQKAYEHEQHISESINNIVDHAIKSKDHATFNFLQWYVAEQHEEEVLFKDILDKIELIGNENHGLYLADQYVKGIAKSRKS

SEQ ID NO: 13693 - protein, 1379 aa, Artificial Sequence
  SARS-CoV-2/2019-nCoV/USA-CruiseA-18/2020__MT159716.1 spike protein (1-1211)(N914C_S1123C) Ferritin construct
MFVFLVLLPLVSSQCVNLTTRTQLPPAYTNSFTRGVYYPDKVFRSSVLHSTQDLFLPFFSNVTWFHAIHVSGTNGTKRFDNPVLPFNDGVYFASTEKSNIIRGWIFGTTLDSKTQSLLIVNNATNVVIKVCEFQFCNDPFLGVYYHKNNKSWMESELRVYSSANNCTFEYVSQPFLMDLEGKQGNFKNLREFVFKNIDGYFKIYSKHTPINLVRDLPQGFSALEPLVDLPIGINITRFQTLLALHRSYLTPGDSSSGWTAGAAAYYVGYLQPRTFLLKYNENGTITDAVDCALDPLSETKCTLKSFTVEKGIYQTSNFRVQPTESIVRFPNITNLCPFGEVFNATRFASVYAWNRKRISNCVADYSVLYNSASFSTFKCYGVSPTKLNDLCFTNVYADSFVIRGDEVRQIAPGQTGKIADYNYKLPDDFTGCVIAWNSNNLDSKVGGNYNYLYRLFRKSNLKPFERDISTEIYQAGSTPCNGVEGFNCYFPLQSYGFQPTNGVGYQPYRVVVLSFELLHAPATVCGPKKSTNLVKNKCVNFNFNGLTGTGVLTESNKKFLPFQQFGRDIADTTDAVRDPQTLEILDITPCSFGGVSVITPGTNTSNQVAVLYQDVNCTEVPVAIHADQLTPTWRVYSTGSNVFQTRAGCLIGAEHVNNSYECDIPIGAGICASYQTQTNSPRRARSVASQSIIAYTMSLGAENSVAYSNNSIAIPTNFTISVTTEILPVSMTKTSVDCTMYICGDSTECSNLLLQYGSFCTQLNRALTGIAVEQDKNTQEVFAQVKQIYKTPPIKDFGGFNFSQILPDPSKPSKRSFIEDLLFNKVTLADAGFIKQYGDCLGDIAARDLICAQKFNGLTVLPPLLTDEMIAQYTSALLAGTITSGWTFGAGAALQIPFAMQMAYRFNGIGVTQCVLYENQKLIANQFNSAIGKIQDSLSSTASALGKLQDVVNQNAQALNTLVKQLSSNFGAISSVLNDILSRLDKVEAEVQIDRLITGRLQSLQTYVTQQLIRAAEIRASANLAATKMSECVLGQSKRVDFCGKGYHLMSFPQSAPHGVVFLHVTYVPAQEKNFTTAPAICHDGKAHFPREGVFVSNGTHWFVTQRNFYEPQIITTDNTFVCGNCDVVIGIVNNTVYDPLQPELDSFKEELDKYFKNHTSPDVDLGDISGINASVVNIQKEIDRLNEVAKNLNESLIDLQELGKYEQYIKGGGGSDIIKLLNEQVNKEMQSSNLYMSMSSWCYTHSLDGAGLFLFDHAAEEYEHAKKLIIFLNENNVPVQLTSISAPEHKFEGLTQIFQKAYEHEQHISESINNIVDHAIKSKDHATFNFLQWYVAEQHEEEVLFKDILDKIELIGNENHGLYLADQYVKGIAKSRKS

SEQ ID NO: 13694 - protein, 1379 aa, Artificial Sequence
  SARS-CoV-2/SARS-CoV-2/Yunnan-01/human/2020/CHN__MT049951.1 spike protein (1-1211)(N914C_S1123C) Ferritin construct
MFVFLVLLPLVSSQCVNLTTRTQLPPANTNSFTRGVYYPDKVFRSSVLHSTQDLFLPFFSNVTWFHAIHVSGTNGTKRFDNPVLPFNDGVYFASTEKSNIIRGWIFGTTLDSKTQSLLIVNNATNVVIKVCEFQFCNDPFLGVYYHKNNKSWMESEFRVYSSANNCTFEYVSQPFLMDLEGKQGNFKNLREFVFKNIDGYFKIYSKHTPINLVRDLPQGFSALEPLVDLPIGINITRFQTLLALHRSYLTPGDSSSGWTAGAAAYYVGYLQPRTFLLKYNENGTITDAVDCALDPLSETKCTLKSFTVEKGIYQTSNFRVQPTESIVRFPNITNLCPFGEVFNATRFASVYAWNRKRISNCVADYSVLYNSASFSTFKCYGVSPTKLNDLCFTNVYADSFVIRGDEVRQIAPGQTGKIADYNYKLPDDFTGCVIAWNSNNLDSKVGGNYNYLYRLFRKSNLKPFERDISTEIYQAGSTPCNGVEGFNCYFPLQSYGFQPTNGVGYQPYRVVVLSFELLHAPATVCGPKKSTNLVKNKCVNFNFNGLTGTGVLTESNKKFLPFQQFGRDIADTTDAVRDPQTLEILDITPCSFGGVSVITPGTNTSNQVAVLYQDVNCTEVPVAIHADQLTPTWRVYSTGSNVFQTRAGCLIGAEHVNNSYECDIPIGAGICASYQTQTNSPRRARSVASQSIIAYTMSLGAENSVAYSNNSIAIPTNFTISVTTEILPVSMTKTSVDCTMYICGDSTECSNLLLQYGSFCTQLNRALTGIAVEQDKNTQEVFAQVKQIYKTPPIKDFGGFNFSQILPDPSKPSKRSFIEDLLFNKVTLADAGFIKQYGDCLGDIAARDLICAQKFNGLTVLPPLLTDEMIAQYTSALLAGTITSGWTFGAGAALQIPFAMQMAYRFNGIGVTQCVLYENQKLIANQFNSAIGKIQDSLSSTASALGKLQDVVNQNAQALNTLVKQLSSNFGAISSVLNDILSRLDKVEAEVQIDRLITGRLQSLQTYVTQQLIRAAEIRASANLAATKMSECVLGQSKRVDFCGKGYHLMSFPQSAPHGVVFLHVTYVPAQEKNFTTAPAICHDGKAHFPREGVFVSNGTHWFVTQRNFYEPQIITTDNTFVCGNCDVVIGIVNNTVYDPLQPELDSFKEELDKYFKNHTSPDVDLGDISGINASVVNIQKEIDRLNEVAKNLNESLIDLQELGKYEQYIKGGGGSDIIKLLNEQVNKEMQSSNLYMSMSSWCYTHSLDGAGLFLFDHAAEEYEHAKKLIIFLNENNVPVQLTSISAPEHKFEGLTQIFQKAYEHEQHISESINNIVDHAIKSKDHATFNFLQWYVAEQHEEEVLFKDILDKIELIGNENHGLYLADQYVKGIAKSRKS

SEQ ID NO: 13695 - protein, 1379 aa, Artificial Sequence
  SARS-CoV-2/USA/WA-UW292/2020__EPI_ISL_418077 spike protein (1-1211)(N914C_S1123C) Ferritin construct
MFVFLVLLPLVSSQCVNLTTRTQLPPAYTNSFTRGVYYPDKVFRSSVLHSTQDLFLPFFSNVTWFHAIHVSGTNGTKRFDNPVLPFNDGVYFASTEKSNIIRGWIFGTTLDSKTQSLLIVNNATNVVIKVCEFQFCNDPFLGVYYHKNNKSWMESEFRVYSSANNCTFEYVSQPFLMDLEGKQGNFKNLREFVFKNIDGYFKIYSKHTPINLVRDLPQGFSALEPLVDLPIGINITRFQTLLALHRSYLTPGDSSSGWTAGAAAYYVGYLQPRTFLLKYNENGTITDAVDCALDPLSETKCTLKSFTVEKGIYQTSNFRVQPTESIVRFPNITNLCPFGEVFNATRFASVYAWNRKRISNCVADYSVLYNSASFSTFKCYGVSPTKLNDLCFTNVYADSFVIRGDEVRQIAPGQTGKIADYNYKLPDDFTGCVIAWNSNNLDSKVGGNYNYLYRLFRKSNLKPFERDISTEIYQASSTPCNGVEGFNCYFPLQSYGFQPTNGVGYQPYRVVVLSFELLHAPATVCGPKKSTNLVKNKCVNFNFNGLTGTGVLTESNKKFLPFQQFGRDIADTTDAVRDPQTLEILDITPCSFGGVSVITPGTNTSNQVAVLYQDVNCTEVPVAIHADQLTPTWRVYSTGSNVFQTRAGCLIGAEHVNNSYECDIPIGAGICASYQTQTNSPRRARSVASQSIIAYTMSLGAENSVAYSNNSIAIPTNFTISVTTEILPVSMTKTSVDCTMYICGDSTECSNLLLQYGSFCTQLNRALTGIAVEQDKNTQEVFAQVKQIYKTPPIKDFGGFNFSQILPDPSKPSKRSFIEDLLFNKVTLADAGFIKQYGDCLGDIAARDLICAQKFNGLTVLPPLLTDEMIAQYTSALLAGTITSGWTFGAGAALQIPFAMQMAYRFNGIGVTQCVLYENQKLIANQFNSAIGKIQDSLSSTASALGKLQDVVNQNAQALNTLVKQLSSNFGAISSVLNDILSRLDKVEAEVQIDRLITGRLQSLQTYVTQQLIRAAEIRASANLAATKMSECVLGQSKRVDFCGKGYHLMSFPQSAPHGVVFLHVTYVPAQEKNFTTAPAICHDGKAHFPREGVFVSNGTHWFVTQRNFYEPQIITTDNTFVCGNCDVVIGIVNNTVYDPLQPELDSFKEELDKYFKNHTSPDVDLGDISGINASVVNIQKEIDRLNEVAKNLNESLIDLQELGKYEQYIKGGGGSDIIKLLNEQVNKEMQSSNLYMSMSSWCYTHSLDGAGLFLFDHAAEEYEHAKKLIIFLNENNVPVQLTSISAPEHKFEGLTQIFQKAYEHEQHISESINNIVDHAIKSKDHATFNFLQWYVAEQHEEEVLFKDILDKIELIGNENHGLYLADQYVKGIAKSRKS

SEQ ID NO: 13696 - protein, 1379 aa, Artificial Sequence
  SARS-CoV-2/Iceland/192/2020__EPI_ISL_417819 spike protein (1-1211)(N914C_S1123C) Ferritin construct
MFVFFVLLPLVSSQCVNLTTRTQLPPAYTNSFTRGVYYPDKVFRSSVLHSTQDLFLPFFSNVTWFHAIHVSGTNGTKRFDNPVLPFNDGVYFASTEKSNIIRGWIFGTTLDSKTQSLLIVNNATNVVIKVCEFQFCNDPFLGVYYHKNNKSWMESEFRVYSSANNCTFEYVSQPFLMDLEGKQGNFKNLREFVFKNIDGYFKIYSKHTPINLVRDLPQGFSALEPLVDLPIGINITRFQTLLALHRSYLTPGDSSSGWTAGAAAYYVGYLQPRTFLLKYNENGTITDAVDCALDPLSETKCTLKSFTVEKGIYQTSNFRVQPTESIVRFPNITNLCPFGEVFNATRFASVYAWNRKRISNCVADYSVLYNSASFSTFKCYGVSPTKLNDLCFTNVYADSFVIRGDEVRQIAPGQTGKIADYNYKLPDDFTGCVIAWNSNNLDSKVGGNYNYLYRLFRKSNLKPFERDISTEIYQAGSTPCNGVEGFNCYFPLQSYGFQPTNGVGYQPYRVVVLSFELLHAPATVCGPKKSTNLVKNKCVNFNFNGLTGTGVLTESNKKFLPFQQFGRDIADTTDAVRDPQTLEILDITPCSFGGVSVITPGTNTSNQVAVLYQGVNCTEVPVAIHADQLTPTWRVYSTGSNVFQTRAGCLIGAEHVNNSYECDIPIGAGICASYQTQTNSPRRARSVASQSIIAYTMSLGAENSVAYSNNSIAIPTNFTISVTTEILPVSMTKTSVDCTMYICGDSTECSNLLLQYGSFCTQLNRALTGIAVEQDKNTQEVFAQVKQIYKTPPIKDFGGFNFSQILPDPSKPSKRSFIEDLLFNKVTLADAGFIKQYGDCLGDIAARDLICAQKFNGLTVLPPLLTDEMIAQYTSALLAGTITSGWTFGAGAALQIPFAMQMAYRFNGIGVTQCVLYENQKLIANQFNSAIGKIQDSLSSTASALGKLQDVVNQNAQALNTLVKQLSSNFGAISSVLNDILSRLDKVEAEVQIDRLITGRLQSLQTYVTQQLIRAAEIRASANLAATKMSECVLGQSKRVDFCGKGYHLMSFPQSAPHGVVFLHVTYVPAQEKNFTTAPAICHDGKAHFPREGVFVSNGTHWFVTQRNFYEPQIITTDNTFVCGNCDVVIGIVNNTVYDPLQPELDSFKEELDKYFKNHTSPDVDLGDISGINASVVNIQKEIDRLNEVAKNLNESLIDLQELGKYEQYIKGGGGSDIIKLLNEQVNKEMQSSNLYMSMSSWCYTHSLDGAGLFLFDHAAEEYEHAKKLIIFLNENNVPVQLTSISAPEHKFEGLTQIFQKAYEHEQHISESINNIVDHAIKSKDHATFNFLQWYVAEQHEEEVLFKDILDKIELIGNENHGLYLADQYVKGIAKSRKS

SEQ ID NO: 13697 - protein, 1379 aa, Artificial Sequence
  SARS-CoV-2/Belgium/ULG-6939/2020__EPI_ISL_417020 spike protein (1-1211)(N914C_S1123C) Ferritin construct
MFVFLVLLPLVSSQCVNLTTRTQLPPAYTNSFTRGVYYPDKVFRSSVLHSTQDLFLPFFSNVTWFHAIHVSGTNGTKRFDNPVLPFNDGVYFASTEKSNIIRGWIFGTTLDSKTQSLLIVNNATNVVIKVCEFQFCNDPFLGVYYHKNNKSWMESEFRVYSSANNCTFEYVSQPFLMDLEGKQGNFKNLREFVFKNIDGYFKIYSKHTPINLVRDLPQGFSALEPLVDLPIGINITRFQTLLALHRSYLTPGDSSSGWTAGAAAYYVGYLQPRTFLLKYNENGTITDAVDCALDPLSETKCTLKSFTVEKGIYQTSNFRVQPTESIVRFPNITNLCPFGEVFNATRFASVYAWNRKRISNCVADYSVLYNSASFSTFKCYGVSPTKLNDLCFTNVYADSFVIRGDEVRQIAPGQTGKIADYNYKLPDDFTGCVIAWNSNNLDSKVGGNYNYLYRLFRKSNLKPFERDISTEIYQAGSTPCNGVEGFNCYFPLQSYGFQPTNGVGYQPYRVVVLSFELLHAPATVCGPKKSTNLVKNKCVNFNFNGLTGTGVLTESNKKFLPFQQFGRDIADTTDAVRDPQTLEILDITPCSFGGVSVITPGTNTSNQVAVLYQGVNCTEVPVAIHADQLTPTWRVYSTGSNVFQTRAGCLIGAEHVNNSYECDIPIGAGICASYQTQTNSPRRARSVASQSIIAYTMSLGAENSVVYSNNSIAIPTNFTISVTTEILPVSMTKTSVDCTMYICGDSTECSNLLLQYGSFCTQLNRALTGIAVEQDKNTQEVFAQVKQIYKTPPIKDFGGFNFSQILPDPSKPSKRSFIEDLLFNKVTLADAGFIKQYGDCLGDIAARDLICAQKFNGLTVLPPLLTDEMIAQYTSALLAGTITSGWTFGAGAALQIPFAMQMAYRFNGIGVTQCVLYENQKLIANQFNSAIGKIQDSLSSTASALGKLQDVVNQNAQALNTLVKQLSSNFGAISSVLNDILSRLDKVEAEVQIDRLITGRLQSLQTYVTQQLIRAAEIRASANLAATKMSECVLGQSKRVDFCGKGYHLMSFPQSAPHGVVFLHVTYVPAQEKNFTTAPAICHDGKAHFPREGVFVSNGTHWFVTQRNFYEPQIITTDNTFVCGNCDVVIGIVNNTVYDPLQPELDSFKEELDKYFKNHTSPDVDLGDISGINASVVNIQKEIDRLNEVAKNLNESLIDLQELGKYEQYIKGGGGSDIIKLLNEQVNKEMQSSNLYMSMSSWCYTHSLDGAGLFLFDHAAEEYEHAKKLIIFLNENNVPVQLTSISAPEHKFEGLTQIFQKAYEHEQHISESINNIVDHAIKSKDHATFNFLQWYVAEQHEEEVLFKDILDKIELIGNENHGLYLADQYVKGIAKSRKS

SEQ ID NO: 13698 - protein, 1379 aa, Artificial Sequence
  SARS-CoV-2/France/HF2496/2020__EPI_ISL_418231 spike protein (1-1211)(N914C_S1123C) Ferritin construct
MFVFLVLLPLVSSQCVNLTTRTQLPPAYTNSFTRGVYYPDKVFRSSVLHSTQDLFLPFFSNVTWFHAIHVSGTNGTKRFDNPVLPFNDGVYFASTEKSNIIRGWIFGTTLDSKTQSLLIVNNATNVVIKVCEFQFCNDPFLGVYYHKNNKSWMESEFRVYSSANNCTFEYVSQPFLMDLEGKQGNFKNLREFVFKNIDGYFKIYSKHTPINLVRDLPQGFSALEPLVDLPIGINITRFQTLLALHRSYLTPGDSSSGWTAGAAAYYVGYLQPRTFLLKYNENGTITDAVDCALDPLSETKCTLKSFTVEKGIYQTSNFRVQPTESIVRFPNITNLCPFGEVFNATRFASVYAWNRKRISNCVADYSVLYNSASFSTFKCYGVSPTKLNDLCFTNVYADSFVIRGDEVRQIAPGQTGKIADYNYKLPDDFTGCVIAWNSNNLDSKVGGNYNYLYRLFRKSNLKPFERDISTEIYQAGSTPCNGVEGFNCYFPLQSYGFQPTNGVGYQPYRVVVLSFELLHAPATVCGPKKSTNLVKNKCVNFNFNGLTGTGVLTESNKKFLPFQQFGRDIADTTDAVRDPQTLEILDITPCSFGGVSVITPGTNTSNQVAVLYQGVNCTEVPVAIHADQLTPTWRVYSTGSNVFQTRAGCLIGAEHVNNSYECDIPIGAGICASYQTQTNSPRRARSVASQSIIAYTMSLGAENSVAYSNNSIAIPTNFTISVTTEILPVSMTKTSVDCTMYICGDSTECSNLLLQYGSFCTQLNRALTGIAVEQDKNTQEVFAQVKQIYKTPPIKDFGGFNFSQILPDPSKPSKRSFIEDLLFNKVTLADAGFIKQYGDCLGDIVARDLICAQKFNGLTVLPPLLTDEMIAQYTSALLAGTITSGWTFGAGAALQIPFAMQMAYRFNGIGVTQCVLYENQKLIANQFNSAIGKIQDSLSSTASALGKLQDVVNQNAQALNTLVKQLSSNFGAISSVLNDILSRLDKVEAEVQIDRLITGRLQSLQTYVTQQLIRAAEIRASANLAATKMSECVLGQSKRVDFCGKGYHLMSFPQSAPHGVVFLHVTYVPAQEKNFTTAPAICHDGKAHFPREGVFVSNGTHWFVTQRNFYEPQIITTDNTFVCGNCDVVIGIVNNTVYDPLQPELDSFKEELDKYFKNHTSPDVDLGDISGINASVVNIQKEIDRLNEVAKNLNESLIDLQELGKYEQYIKGGGGSDIIKLLNEQVNKEMQSSNLYMSMSSWCYTHSLDGAGLFLFDHAAEEYEHAKKLIIFLNENNVPVQLTSISAPEHKFEGLTQIFQKAYEHEQHISESINNIVDHAIKSKDHATFNFLQWYVAEQHEEEVLFKDILDKIELIGNENHGLYLADQYVKGIAKSRKS

SEQ ID NO: 13699 - protein, 1379 aa, Artificial Sequence
  SARS-CoV-2/USA/WA-UW291/2020__EPI_ISL_418076 spike protein (1-1211)(N914C_S1123C) Ferritin construct
MFVFLVLLPLVSSQCVNLTTRTQLPPAYTNSFTRGVYYPDKVFRSSVLHSTQDLFLPFFSNVTWFHAIHVSGTNGTKRFDNPVLPFNDGVYFASTEKSNIIRGWIFGTTLDSKTQSLLIVNNATNVVIKVCEFQFCNDPFLGVYYHKNNKSWMESEFRVYSSANNCTFEYVSQPFLMDLEGKQGNFKNLREFVFKNIDGYFKIYSKHTPINLVRDLPQGFSALEPLVDLPIGINITRFQTLLALHRSYLTPGDSSSGWTAGAAAYYVGYLQPRTFLLKYNENGTITDAVDCALDPLSETKCTLKSFTVEKGIYQTSNFRVQPTESIVRFPNITNLCPFGEVFNATRFASVYAWNRKRISNCVADYSVLYNSASFSTFKCYGVSPTKLNDLCFTNVYADSFVIRGDEVRQIAPGQTGKIADYNYKLPDDFTGCVIAWNSNNLDSKVGGNYNYLYRLFRKSNLKPFERDISTEIYQAGSTPCNGVEGFNCYFPLQSYGFQPTNGVGYQPYRVVVLSFELLHAPATVCGPKKSTNLVKNKCVNFNFNGLTGTGVLTESNKKFLPFQQFGRDIADTTDAVRDPQTLEILDITPCSFGGVSVITPGTNTSNQVAVLYQGVNCTEVPVAIHADQLTPTWRVYSTGSNVFQTRAGCLIGAEHVNNSYECDIPIGAGICASYQTQTNSPRRARSVASQSIIAYTMSLGAENSVAYSNNSIAIPTNFTISVTTEILPVSMTKTSVDCTMYICGDSTECSNLLLQYGSFCTQLNRALTGIAVEQDKNTQEVFAQVKQIYKTPPIKDFGGFNFSQILPDPSKPSKRSFIEDLLFNKVTLADAGFIKQYGDCLGDIAARDLICAQKFNGLTVLPPLLTDEMIAQYTSALLAGTITSGWTFGAGAALQIPFAMQMAYRFNGIGVTQCVLYENQKLIANQFNSAIGKIQYSLSSTASALGKLQDVVNQNAQALNTLVKQLSSNFGAISSVLNDILSRLDKVEAEVQIDRLITGRLQSLQTYVTQQLIRAAEIRASANLAATKMSECVLGQSKRVDFCGKGYHLMSFPQSAPHGVVFLHVTYVPAQEKNFTTAPAICHDGKAHFPREGVFVSNGTHWFVTQRNFYEPQIITTDNTFVCGNCDVVIGIVNNTVYDPLQPELDSFKEELDKYFKNHTSPDVDLGDISGINASVVNIQKEIDRLNEVAKNLNESLIDLQELGKYEQYIKGGGGSDIIKLLNEQVNKEMQSSNLYMSMSSWCYTHSLDGAGLFLFDHAAEEYEHAKKLIIFLNENNVPVQLTSISAPEHKFEGLTQIFQKAYEHEQHISESINNIVDHAIKSKDHATFNFLQWYVAEQHEEEVLFKDILDKIELIGNENHGLYLADQYVKGIAKSRKS

SEQ ID NO: 13700 - protein, 1379 aa, Artificial Sequence; identical to SEQ ID NO: 13663
  SARS-CoV-2/Portugal/PT0034/2020__EPI_ISL_418019 spike protein (1-1211)(N914C_S1123C) Ferritin construct

SEQ ID NO: 13701 - protein, 1379 aa, Artificial Sequence
  SARS-CoV-2/Iceland/202/2020__EPI_ISL_417750 spike protein (1-1211)(N914C_S1123C) Ferritin construct
MFVFLVLLPLVSSQCVNLTTRTQLPPAYTNSFTRGVYYPDKVFRSSVLHSTQDLFLPFFSNVTWFHAIHVSGTNGTKRFDNPVLPFNDGVYFASTEKSNIIRGWIFGTTLDSKTQSLLIVNNATNVVIKVCEFQFCNDPFLGVYYHKNNKSWMESEFRVYSSANNCTFEYVSQPFLMDLEGKQGNFKNLREFVFKNIDGYFKIYSKHTPINLVRDLPQGFSALEPLVDLPIGINITRFQTLLALHRSYLTPGDSSSGWTAGAAAYYVGYLQPRTFLLKYNENGTITDAVDCALDPLSETKCTLKSFTVEKGIYQTSNFRVQPTESIVRFPNITNLCPFGEVFNATRFASVYAWNRKRISNCVADYSVLYNSASFSTFKCYGVSPTKLNDLCFTNVYADSFVIRGDEVRQIAPGQTGKIADYNYKLPDDFTGCVIAWNSNNLDSKVGGNYNYLYRLFRKSNLKPFERDISTEIYQAGSTPCNGVEGFNCYFPLQSYGFQPTNGVGYQPYRVVVLSFELLHAPATVCGPKKSTNLVKNKCVNFNFNGLTGTGVLTESNKKFLPFQQFGRDIADTTDAVRDPQTLEILDITPCSFGGVSVITPGTNTSNQVAVLYQDVNCTEVPVAIHADQLTPTWRVYSTGSNVFQTRAGCLIGAEHVNNSYECDIPIGAGICASYQTQTNSPRRARSVASQSIIAYTMSLGAENSVAYSNNSIAIPTNFTISVTTEILPVSMTKTSVDCTMYICGDSTECSNLLLQYGSFCTQLNRALTGIAVEQDKNTQEVFAQVKQIYKTPPIKDFGGFNFSQILPDPSKPSKRSFIEDLLFNKVTLADAGFIKQYGDCLGDIAARDLICAQKFNGLTVLPPLLTDEMIAQYTSALLAGTITSGWTFGAGAALQIPFAMQMAYRFNGIGVTQCVLYENQKLIANQFNSAIGKIQDSLSSTASALGKLQDVVNQNAQALNTLVKQLSSNFGAISSVLNDILSRLDKVEAEVQIDRLITGRLQSLQTYVTQQLIRAAEIRASANLAATKMSECVLGQSKRVDFCGKGYHLMSFPQSAPHGVVFLHVTYVPAQEKNFTTAPAICHDGKAHFPREGVFVSNGTHWFVTQRNFYEPQIITTDNTFVCGNCDVVIGIVNNTVYDPLQPELDSFKEELDKYFKNHTSPDVDLGDIPGINASVVNIQKEIDRLNEVAKNLNESLIDLQELGKYEQYIKGGGGSDIIKLLNEQVNKEMQSSNLYMSMSSWCYTHSLDGAGLFLFDHAAEEYEHAKKLIIFLNENNVPVQLTSISAPEHKFEGLTQIFQKAYEHEQHISESINNIVDHAIKSKDHATFNFLQWYVAEQHEEEVLFKDILDKIELIGNENHGLYLADQYVKGIAKSRKS

SEQ ID NO: 13702 - protein, 1379 aa, Artificial Sequence
  SARS-CoV-2/USA/WA-UW261/2020__EPI_ISL_418046 spike protein (1-1211)(N914C_S1123C) Ferritin construct
MFVFLVLLPLVSSQCVNLTTRTQLPPAYTNSFTRGVYYPDKVFRSSVLHSTQDLFLPFFSNVTWFHAIHVSGTNGTKRFDNPVLPFNDGVYFASTEKSNIIRGWIFGTTLDSKTQSLLIVNNATNVVIKVCEFQFCNDPFLGVYYHKNNKSWMESEFRVYSSANNCTFEYVSQPFLMDLEGKQGNFKNLREFVFKNIDGYFKIYSKHTPINLVRDLPQGFSALEPLVDLPIGINITRFQTLLALHRSYLTPGDSSSGWTAGAAAYYVGYLQPRTFLLKYNENGTITDAVDCALDPLSETKCTLKSFTVEKGIYQTSNFRVQPTESIVRFPNITNLCPFGEVFNATRFTSVYAWNRKRISNCVADYSVLYNSASFSTFKCYGVSPTKLNDLCFTNVYADSFVIRGDEVRQIAPGQTGKIADYNYKLPDDFTGCVIAWNSNNLDSKVGGNYNYLYRLFRKSNLKPFERDISTEIYQAGSTPCNGVEGFNCYFPLQSYGFQPTNGVGYQPYRVVVLSFELLHAPATVCGPKKSTNLVKNKCVNFNFNGLTGTGVLTESNKKFLPFQQFGRDIADTTDAVRDPQTLEILDITPCSFGGVSVITPGTNTSNQVAVLYQDVNCTEVPVAIHADQLTPTWRVYSTGSNVFQTRAGCLIGAEHVNNSYECDIPIGAGICASYQTQTNSPRRARSVASQSIIAYTMSLGAENSVAYSNNSIAIPTNFTISVTTEILPVSMTKTSVDCTMYICGDSTECSNLLLQYGSFCTQLNRALTGIAVEQDKNTQEVFAQVKQIYKTPPIKDFGGFNFSQILPDPSKPSKRSFIEDLLFNKVTLADAGFIKQYGDCLGDIAARDLICAQKFNGLTVLPPLLTDEMIAQYTSALLAGTITSGWTFGAGAALQIPFAMQMAYRFNGIGVTQCVLYENQKLIANQFNSAIGKIQDSLSSTASALGKLQDVVNQNAQALNTLVKQLSSNFGAISSVLNDILSRLDKVEAEVQIDRLITGRLQSLQTYVTQQLIRAAEIRASANLAATKMSECVLGQSKRVDFCGKGYHLMSFPQSAPHGVVFLHVTYVPAQEKNFTTAPAICHDGKAHFPREGVFVSNGTHWFVTQRNFYEPQIITTDNTFVCGNCDVVIGIVNNTVYDPLQPELDSFKEELDKYFKNHTSPDVDLGDISGINASVVNIQKEIDRLNEVAKNLNESLIDLQELGKYEQYIKGGGGSDIIKLLNEQVNKEMQSSNLYMSMSSWCYTHSLDGAGLFLFDHAAEEYEHAKKLIIFLNENNVPVQLTSISAPEHKFEGLTQIFQKAYEHEQHISESINNIVDHAIKSKDHATFNFLQWYVAEQHEEEVLFKDILDKIELIGNENHGLYLADQYVKGIAKSRKS

SEQ ID NO: 13703 - protein, 1379 aa, Artificial Sequence
  SARS-CoV-2/Portugal/PT0035/2020__EPI_ISL_418020 spike protein (1-1211)(N914C_S1123C) Ferritin construct
MFVFLVLLPLVSSQCVNLTTRTQLPPAYTNSFTRGVYYPDKVFRSSVLHSTQDLFLPFFSNVTWFHAIHVSGTNGTKRFDNPVLPFNDGVYFASTEKSNIIRGWIFGTTLDSKTQSLLIVNNATNVVIKVCEFQFCNDPFLGVYYHKNNKSWMESEFRVYSSANNCTFEYVSQPFLMDLEGKQGNFKNLREFVFKNIDGYFKIYSKHTPINLVRDLPQGFSALEPLVDLPIGINITRFQTLLALHRSYLTPGDSSSGWTAGAAAYYVGYLQPRTFLLKYNENGTITDAVDCALDPLSETKCTLKSFTVEKGIYQTSNFRVQPTESIVRFPNITNLCPFGEVFNATRFASVYAWNRKRISNCVADYSVLYNSASFSTFKCYGVSPTKLNDLCFTNVYADSFVIRGDEVRQIAPGQTGKIADYNYKLPDDFTGCVIAWNSNNLDSKVGGNYNYLYRLFRKSNLKPFERDISTEIYQAGSTPCNGVEGFNCYFPLQSYGFQPTNGVGYQPYRVVVLSFELLHAPATVCGPKKSTNLVKNKCVNFNFNGLTGTGVLTESNKKFLPFQQFGRDIADTTDAVRDPQTLEILDITPCSFGGVSVITPGTNTSNQVAVLYQDVNCTEVPVAIHADQLTPTWRVYSTGSNVFQTRAGCLIGAEHVNNSYECDIPIGAGICASYQTQTNSPRRARSVASQSIIAYTMSLGAENSVAYSNNSIAIPTNFTISVTTEILPVSMTKTSVDCTMYICGDSTECSNLLLQYGSFCTQLNRALTGIAVEQDKNTQEVFAQVKQIYKTPPIKDFGGFNFSQILPDPSKPSKRSFIEDLLFNKVTLADAGFIKQYGDCLGDISARDLICAQKFNGLTVLPPLLTDEMIAQYTSALLAGTITSGWTFGAGAALQIPFAMQMAYRFNGIGVTQCVLYENQKLIANQFNSAIGKIQDSLSSTASALGKLQDVVNQNAQALNTLVKQLSSNFGAISSVLNDILSRLDKVEAEVQIDRLITGRLQSLQTYVTQQLIRAAEIRASANLAATKMSECVLGQSKRVDFCGKGYHLMSFPQSAPHGVVFLHVTYVPAQEKNFTTAPAICHDGKAHFPREGVFVSNGTHWFVTQRNFYEPQIITTDNTFVCGNCDVVIGIVNNTVYDPLQPELDSFKEELDKYFKNHTSPDVDLGDISGINASVVNIQKEIDRLNEVAKNLNESLIDLQELGKYEQYIKGGGGSDIIKLLNEQVNKEMQSSNLYMSMSSWCYTHSLDGAGLFLFDHAAEEYEHAKKLIIFLNENNVPVQLTSISAPEHKFEGLTQIFQKAYEHEQHISESINNIVDHAIKSKDHATFNFLQWYVAEQHEEEVLFKDILDKIELIGNENHGLYLADQYVKGIAKSRKS

SEQ ID NO: 13704 - protein, 1379 aa, Artificial Sequence
  SARS-CoV-2/USA/NY-NYUMC7/2020__EPI_ISL_418192 spike protein (1-1211)(N914C_S1123C) Ferritin construct
MFVFLVLLPLVSSQCVNLTTRTQLPPAYTNSFTRGVYYPDKVFRSSVLHSTQDLFLPFFSNVTWFHAIHVSGTNGTKRFDNPVLPFNDGVYFASTEKSNIIRGWIFGTTLDSKTQSLLIVNNATNVVIKVCEFQFCNDPFLGVYHHKNNKSWMESEFRVYSSANNCTFEYVSQPFLMDLEGKQGNFKNLREFVFKNIDGYFKIYSKHTPINLVRDLPQGFSALEPLVDLPIGINITRFQTLLALHRSYLTPGDSSSGWTAGAAAYYVGYLQPRTFLLKYNENGTITDAVDCALDPLSETKCTLKSFTVEKGIYQTSNFRVQPTESIVRFPNITNLCPFGEVFNATRFASVYAWNRKRISNCVADYSVLYNSASFSTFKCYGVSPTKLNDLCFTNVYADSFVIRGDEVRQIAPGQTGKIADYNYKLPDDFTGCVIAWNSNNLDSKVGGNYNYLYRLFRKSNLKPFERDISTEIYQAGSTPCNGVEGFNCYFPLQSYGFQPTNGVGYQPYRVVVLSFELLHAPATVCGPKKSTNLVKNKCVNFNFNGLTGTGVLTESNKKFLPFQQFGRDIADTTDAVRDPQTLEILDITPCSFGGVSVITPGTNTSNQVAVLYQGVNCTEVPVAIHADQLTPTWRVYSTGSNVFQTRAGCLIGAEHVNNSYECDIPIGAGICASYQTQTNSPRRARSVASQSIIAYTMSLGAENSVAYSNNSIAIPTNFTISVTTEILPVSMTKTSVDCTMYICGDSTECSNLLLQYGSFCTQLNRALTGIAVEQDKNTQEVFAQVKQIYKTPPIKDFGGFNFSQILPDPSKPSKRSFIEDLLFNKVTLADAGFIKQYGDCLGDIAARDLICAQKFNGLTVLPPLLTDEMIAQYTSALLAGTITSGWTFGAGAALQIPFAMQMAYRFNGIGVTQCVLYENQKLIANQFNSAIGKIQDSLSSTASALGKLQDVVNQNAQALNTLVKQLSSNFGAISSVLNDILSRLDKVEAEVQIDRLITGRLQSLQTYVTQQLIRAAEIRASANLAATKMSECVLGQSKRVDFCGKGYHLMSFPQSAPHGVVFLHVTYVPAQEKNFTTAPAICHDGKAHFPREGVFVSNGTHWFVTQRNFYEPQIITTDNTFVCGNCDVVIGIVNNTVYDPLQPELDSFKEELDKYFKNHTSPDVDLGDISGINASVVNIQKEIDRLNEVAKNLNESLIDLQELGKYEQYIKGGGGSDIIKLLNEQVNKEMQSSNLYMSMSSWCYTHSLDGAGLFLFDHAAEEYEHAKKLIIFLNENNVPVQLTSISAPEHKFEGLTQIFQKAYEHEQHISESINNIVDHAIKSKDHATFNFLQWYVAEQHEEEVLFKDILDKIELIGNENHGLYLADQYVKGIAKSRKS

SEQ ID NO: 13705 - protein, 1379 aa, Artificial Sequence
  SARS-CoV-2/Iceland/189/2020__EPI_ISL_417709 spike protein (1-1211)(N914C_S1123C) Ferritin construct
MFVFLVLLPLVSSQCVNLTTRTQLPPAYTNSFTRGVYYPDKVFRSSVLHSTQDLFLPFFSNVTWFHAIHVSGTNGTKRFDNPVLPFNDGVYFASTEKSNIIRGWIFGTTLDSKTQSLLIVNNATNVVIKVCEFQFCNDPFLGVYYHKNNKSWMESEFRVYSSANNCTFEYVSQPFLMDLEGKQGNFKNLREFVFKNIDGYFKIYSKHTPINLVRDLPQGFSALEPLVDLPIGINITRFQTLLALHRSYLTPGDSSSGWTAGAAAYYVGYLQPRTFLLKYNENGTITDAVDCALDPLSETKCTLKSFTVEKGIYQTSNFRVQPTESIVRFPNITNLCPFGEVFNATRFASVYAWNRKRISNCVADYSVLYNSASFSTFKCYGVSPTKLNDLCFTNVYADSFVIRGDEVRQIAPGQTGKIADYNYKLPDDFTGCVIAWNSNNLDSKVGGNYNYLYRLFRKSNLKPFERDISTEIYQAGSTPCNGVEGFNCYFPLQSYGFQPTNGVGYQPYRVVVLSFELLHAPATVCGPKKSTNLVKNKCVNFNFNGLTGTGVLTESNKKFLPFQQFGRDIADTTDAVRDPQTLEILDITPCSFGGVSVITPGTNTSNQVAVLYQGVNCTEVPVAIHADQLTPTWRVYSTGSNVFQTRAGCLIGAEHVNNSYECDIPIGAGICASYQTQTNSPRRARSVASQSIIAYTMSLGAENSVAYSNNSIAIPTNFTISVTTEILPVSMTKTSVDCTMYICGDSTECSNLLLQYGSFCTQLNRALTGIAVEQDKNTQEVFAQVKQIYKTPPIKDFGGFNFSQILPDPSKPSKRSFIEDLLFNKVTLADAGFTKQYGDCLGDIAARDLICAQKFNGLTVLPPLLTDEMIAQYTSALLAGTITSGWTFGAGAALQIPFAMQMAYRFNGIGVTQCVLYENQKLIANQFNSAIGKIQDSLSSTASALGKLQDVVNQNAQALNTLVKQLSSNFGAISSVLNDILSRLDKVEAEVQIDRLITGRLQSLQTYVTQQLIRAAEIRASANLAATKMSECVLGQSKRVDFCGKGYHLMSFPQSAPHGVVFLHVTYVPAQEKNFTTAPAICHDGKAHFPREGVFVSNGTHWFVTQRNFYEPQIITTDNTFVCGNCDVVIGIVNNTVYDPLQPELDSFKEELDKYFKNHTSPDVDLGDISGINASVVNIQKEIDRLNEVAKNLNESLIDLQELGKYEQYIKGGGGSDIIKLLNEQVNKEMQSSNLYMSMSSWCYTHSLDGAGLFLFDHAAEEYEHAKKLIIFLNENNVPVQLTSISAPEHKFEGLTQIFQKAYEHEQHISESINNIVDHAIKSKDHATFNFLQWYVAEQHEEEVLFKDILDKIELIGNENHGLYLADQYVKGIAKSRKS

SEQ ID NO: 13706 - protein, 1379 aa, Artificial Sequence
  SARS-CoV-2/Australia/NSW56/2020__EPI_ISL_417408 spike protein (1-1211)(N914C_S1123C) Ferritin construct
MFVFLVLLPLVSSQCVNLTTRTQLPPAYTNSFTRGVYYPDKVFRSSVLHSTQDLFLPFFSNVTWFHAIHVSGTNGTKRFDNPVLPFNDGVYFASTEKSNIIRGWIFGTTLDSKTQSLLIVNNATNVVIKVCEFQFCNDPFLGVYYHKNNKSWMESEFRVYSSANNCTFEYVSQPFLMDLEGKQGNFKNLREFVFKNIDGYFKIYSKHTPINLVRDLPQGFSALEPLVDLPIGINITRFQTLLALHRSYLTPGDSSSGWTAGAAAYYVGYLQPRTFLLKYNENGTITDAVDCALDPLSETKCTLKSFTVEKGIYQTSNFRVQPTESIVRFPNITNLCPFGEVFNATRFASVYAWNRKRISNCVADYSVLYNSASFSTFKCYGVSPTKLNDLCFTNVYADSFVIRGDEVRQIAPGQTGKIADYNYKLPDDFTGCVIAWNSNNLDSKVGGNYNYLYRLFRKSNLKPFERDISTEIYQAGSTPCNGVEGFNCYFPLQSYGFQPTNGVGYQPYRVVVLSFELLHAPATVCGPKKSTNLVKNKCVNFNFNGLTGTGVLTESNKKFLPFQQFGRDIADTTDAVRDPQTLEILDITPCSFGGVSVITPGTNTSNQVAVLYQDVNCTEVPVAIHADQLTPTWRVYSTGSNVFQTRAGCLIGAEHVNNSYECDIPIGAGICASYQTQTNSPRRARSVASQSIIAYTMSLGAENSVAYSNNSIAIPTNFTISVTTEILPVSMTKTSVDCTMYICGDSTECSNLLLQYGSFCTQLNRALTGIAVEQDKNTQEVFAQVKQIYKTPPIKDFGGFNFSQILPDSSKPSKRSFIEDLLFNKVTLADAGFIKQYGDCLGDIAARDLICAQKFNGLTVLPPLLTDEMIAQYTSALLAGTITSGWTFGAGAALQIPFAMQMAYRFNGIGVTQCVLYENQKLIANQFNSAIGKIQDSLSSTASALGKLQDVVNQNAQALNTLVKQLSSNFGAISSVLNDILSRLDKVEAEVQIDRLITGRLQSLQTYVTQQLIRAAEIRASANLAATKMSECVLGQSKRVDFCGKGYHLMSFPQSAPHGVVFLHVTYVPAQEKNFTTAPAICHDGKAHFPREGVFVSNGTHWFVTQRNFYEPQIITTDNTFVCGNCDVVIGIVNNTVYDPLQPELDSFKEELDKYFKNHTSPDVDLGDISGINASVVNIQKEIDRLNEVAKNLNESLIDLQELGKYEQYIKGGGGSDIIKLLNEQVNKEMQSSNLYMSMSSWCYTHSLDGAGLFLFDHAAEEYEHAKKLIIFLNENNVPVQLTSISAPEHKFEGLTQIFQKAYEHEQHISESINNIVDHAIKSKDHATFNFLQWYVAEQHEEEVLFKDILDKIELIGNENHGLYLADQYVKGIAKSRKS

SEQ ID NO: 13707 - protein, 1379 aa, Artificial Sequence
  SARS-CoV-2/Iceland/280/2020__EPI_ISL_417608 spike protein (1-1211)(N914C_S1123C) Ferritin construct
MFVFLVLLPLVSSQCVNLTTRTQLPPAYTNSFTRGVYYPDKVFRSSVLHSTQDLFLPFFSNVTWFHAIHVSGTNGTKRFDNPVLPFNDGVYFASTEKSNIIRGWIFGTTLDSKTQSLLIVNNATNVVIKVCEFQFCNDPFLGVYYHKNNKSWMESEFRVYSSANNCTFEYVSQPFLMDLEGKQGNFKNLREFVFKNIDGYFKIYSKHTPINLVRDLPQGFSALEPLVDLPIGINITRFQTLLALHRSYLTPGDSSSGWTAGAAAYYVGYLQPRTFLLKYNENGTITDAVDCALDPLSETKCTLKSFTVEKGIYQTSNFRVQPTESIVRFPNITNLCPFGEVFNATRFASVYAWNRKRISNCVADYSVLYNSASFSTFKCYGVSPTKLNDLCFTNVYADSFVIRGDEVRQIAPGQTGKIADYNYKLPDDFTGCVIAWNSNNLDSKVGGNYNYLYRLFRKSNLKPFERDISTEIYQAGSTPCNGVEGFNCYFPLQSYGFQPTNGVGYQPYRVVVLSFELLHAPATVCGPKKSTNLVKNKCVNFNFNGLTGTGVLTESNKKFLPFQQFGRDIADTTDAVRDPQTLEILDITPCSFGGVSVITPGTNTSNQVAVLYQGVNCTEVPVAIHADQLTPTWRVYSTGSNVFQTRAGCLIGAEHVNNSYECDIPIGAGICASYHTQTNSPRRARSVASQSIIAYTMSLGAENSVAYSNNSIAIPTNFTISVTTEILPVSMTKTSVDCTMYICGDSTECSNLLLQYGSFCTQLNRALTGIAVEQDKNTQEVFAQVKQIYKTPPIKDFGGFNFSQILPDPSKPSKRSFIEDLLFNKVTLADAGFIKQYGDCLGDIAARDLICAQKFNGLTVLPPLLTDEMIAQYTSALLAGTITSGWTFGAGAALQIPFAMQMAYRFNGIGVTQCVLYENQKLIANQFNSAIGKIQDSLSSTASALGKLQDVVNQNAQALNTLVKQLSSNFGAISSVLNDILSRLDKVEAEVQIDRLITGRLQSLQTYVTQQLIRAAEIRASANLAATKMSECVLGQSKRVDFCGKGYHLMSFPQSAPHGVVFLHVTYVPAQEKNFTTAPAICHDGKAHFPREGVFVSNGTHWFVTQRNFYEPQIITTDNTFVCGNCDVVIGIVNNTVYDPLQPELDSFKEELDKYFKNHTSPDVDLGDISGINASVVNIQKEIDRLNEVAKNLNESLIDLQELGKYEQYIKGGGGSDIIKLLNEQVNKEMQSSNLYMSMSSWCYTHSLDGAGLFLFDHAAEEYEHAKKLIIFLNENNVPVQLTSISAPEHKFEGLTQIFQKAYEHEQHISESINNIVDHAIKSKDHATFNFLQWYVAEQHEEEVLFKDILDKIELIGNENHGLYLADQYVKGIAKSRKS

SEQ ID NO: 13708 - protein, 1379 aa, Artificial Sequence; identical to SEQ ID NO: 13663
  SARS-CoV-2/Iceland/247/2020__EPI_ISL_417575 spike protein (1-1211)(N914C_S1123C) Ferritin construct

SEQ ID NO: 13709 - protein, 1379 aa, Artificial Sequence
  SARS-CoV-2/Iceland/238/2020__EPI_ISL_417566 spike protein (1-1211)(N914C_S1123C) Ferritin construct
MFVFLVLLPLVSSQCVNLTTRTQLPPAYTNSFTRGVYYPDKVFRSSVLHSTQDLFLPFFSNVTWFHAIHVSGTNGTKRFDNPVLPFNDGVYFASTEKSNIIRGWIFGTTLDSKTQSLLIVNNATNVVIKVCEFQFCNDPFLGVYYHKNNKSWMESEFRVYSSANNCTFEYVSQPFLMDLEGKQGNFKNLREFVFKNIDGYFKIYSKHTPINLVRDLPQGFSALEPLVDLPIGINITRFQTLLALHRSYLTPGDSSSGWTAGAAAYYVGYLQPRTFLLKYNENGTITDAVDCALDPLSETKCTLKSFTVEKGIYQTSNFRVQPTESIVRFPNITNLCPFGEVFNATRFASVYAWNRKRISNCVADYSVLYNSASFSTFKCYGVSPTKLNDLCFTNVYADSFVIRGDEVRQIAPGQTGKIADYNYKLPDDFTGCVIAWNSNNLDSKVGGNYNYLYRLFRKSNLKPFERDISTEIYQAGSTPCNGVEGFNCYFPLQSYGFQPTNGVGYQPYRVVVLSFELLHAPATVCGPKKSTNLVKNKCVNFNFNGLTGTGVLTESNKKFLPFQQFGRDIADTTDAVRDPQTLEILDITPCSFGGVSVITPGTNTSNQVAVLYQGVNCTEVPVAIHADQLTPTWRVYSTGSNVFQTRAGCLIGAEHVNNSYECDIPIGAGICASYQTQTNSPRRARSVASQSIIAYTMSLGAENSVAYSNNSIAIPTNFTISVTTEILPVSMTKTSVDCTMYICGDSTECSNLLLQYGSFCTQLNRALTGIAVEQDKNTQEVFAQVKQIYKTPPIKDFGGFNFSQILPDPSKPSKRSFIEDLLFNKVTLADVGFIKQYGDCLGDIAARDLICAQKFNGLTVLPPLLTDEMIAQYTSALLAGTITSGWTFGAGAALQIPFAMQMAYRFNGIGVTQCVLYENQKLIANQFNSAIGKIQDSLSSTASALGKLQDVVNQNAQALNTLVKQLSSNFGAISSVLNDILSRLDKVEAEVQIDRLITGRLQSLQTYVTQQLIRAAEIRASANLAATKMSECVLGQSKRVDFCGKGYHLMSFPQSAPHGVVFLHVTYVPAQEKNFTTAPAICHDGKAHFPREGVFVSNGTHWFVTQRNFYEPQIITTDNTFVCGNCDVVIGIVNNTVYDPLQPELDSFKEELDKYFKNHTSPDVDLGDISGINASVVNIQKEIDRLNEVAKNLNESLIDLQELGKYEQYIKGGGGSDIIKLLNEQVNKEMQSSNLYMSMSSWCYTHSLDGAGLFLFDHAAEEYEHAKKLIIFLNENNVPVQLTSISAPEHKFEGLTQIFQKAYEHEQHISESINNIVDHAIKSKDHATFNFLQWYVAEQHEEEVLFKDILDKIELIGNENHGLYLADQYVKGIAKSRKS

SEQ ID NO: 13710 - protein, 1379 aa, Artificial Sequence
  SARS-CoV-2/Greece/16/2020__EPI_ISL_418265 spike protein (1-1211)(N914C_S1123C) Ferritin construct
MFVFLVLLPLVSSQCVNLTTRTQLPPAYTNSFTRGVYYPDKVFRSSVLHSTQDLFLPFFSNVTWFHAIHVSGTNGTKRFDNPVLPFNDGVYFASTEKSNIIRGWIFGTTLDSKTQSLLIVNNATNVVIKVCEFQFCNDPFLGVYYHKNNKSWMESEFRVYSSANNCTFEYVSQPFLMDLEGKQGNFKNLREFVFKNVDGYFKIYSKHTPINLVRDLPQGFSALEPLVDLPIGINITRFQTLLALHRSYLTPGDSSSGWTAGAAAYYVGYLQPRTFLLKYNENGTITDAVDCALDPLSETKCTLKSFTVEKGIYQTSNFRVQPTESIVRFPNITNLCPFGEVFNATRFASVYAWNRKRISNCVADYSVLYNSASFSTFKCYGVSPTKLNDLCFTNVYADSFVIRGDEVRQIAPGQTGKIADYNYKLPDDFTGCVIAWNSNNLDSKVGGNYNYLYRLFRKSNLKPFERDISTEIYQAGSTPCNGVEGFNCYFPLQSYGFQPTNGVGYQPYRVVVLSFELLHAPATVCGPKKSTNLVKNKCVNFNFNGLTGTGVLTESNKKFLPFQQFGRDIADTTDAVRDPQTLEILDITPCSFGGVSVITPGTNTSNQVAVLYQDVNCTEVPVAIHADQLTPTWRVYSTGSNVFQTRAGCLIGAEHVNNSYECDIPIGAGICASYQTQTNSPRRARSVASQSIIAYTMSLGAENSVAYSNNSIAIPTNFTISVTTEILPVSMTKTSVDCTMYICGDSTECSNLLLQYGSFCTQLNRALTGIAVEQDKNTQEVFAQVKQIYKTPPIKDFGGFNFSQILPDPSKPSKRSFIEDLLFNKVTLADAGFIKQYGDCLGDIAARDLICAQKFNGLTVLPPLLTDEMIAQYTSALLAGTITSGWTFGAGAALQIPFAMQMAYRFNGIGVTQCVLYENQKLIANQFNSAIGKIQDSLSSTASALGKLQDVVNQNAQALNTLVKQLSSNFGAISSVLNDILSRLDKVEAEVQIDRLITGRLQSLQTYVTQQLIRAAEIRASANLAATKMSECVLGQSKRVDFCGKGYHLMSFPQSAPHGVVFLHVTYVPAQEKNFTTAPAICHDGKAHFPREGVFVSNGTHWFVTQRNFYEPQIITTDNTFVCGNCDVVIGIVNNTVYDPLQPELDSFKEELDKYFKNHTSPDVDLGDISGINASVVNIQKEIDRLNEVAKNLNESLIDLQELGKYEQYIKGGGGSDIIKLLNEQVNKEMQSSNLYMSMSSWCYTHSLDGAGLFLFDHAAEEYEHAKKLIIFLNENNVPVQLTSISAPEHKFEGLTQIFQKAYEHEQHISESINNIVDHAIKSKDHATFNFLQWYVAEQHEEEVLFKDILDKIELIGNENHGLYLADQYVKGIAKSRKS

SEQ ID NO: 13711 - protein, 1379 aa, Artificial Sequence
  SARS-CoV-2/Iceland/319/2020__EPI_ISL_417648 spike protein (1-1211)(N914C_S1123C) Ferritin construct
MFVFLVLLPLVSSQCVNLTTRTQLPPAYTNSFTRGVYYPDKVFRSSVLHSTQDLFLPFFSNVTWFHAIHVSGTNGTKRFDNPVLPFNDGVYFASTEKSNIIRGWIFGTTLDSKTQSLLIVNNATNVVIKVCEFQFCNDPFLGVYYHKNNKSWMESEFRVYSSANNCTFEYVSQPFLIDLEGKQGNFKNLREFVFKNIDGYFKIYSKHTPINLVRDLPQGFSALEPLVDLPIGINITRFQTLLALHRSYLTPGDSSSGWTAGAAAYYVGYLQPRTFLLKYNENGTITDAVDCALDPLSETKCTLKSFTVEKGIYQTSNFRVQPTESIVRFPNITNLCPFGEVFNATRFASVYAWNRKRISNCVADYSVLYNSASFSTFKCYGVSPTKLNDLCFTNVYADSFVIRGDEVRQIAPGQTGKIADYNYKLPDDFTGCVIAWNSNNLDSKVGGNYNYLYRLFRKSNLKPFERDISTEIYQAGSTPCNGVEGFNCYFPLQSYGFQPTNGVGYQPYRVVVLSFELLHAPATVCGPKKSTNLVKNKCVNFNFNGLTGTGVLTESNKKFLPFQQFGRDIADTTDAVRDPQTLEILDITPCSFGGVSVITPGTNTSNQVAVLYQGVNCTEVPVAIHADQLTPTWRVYSTGSNVFQTRAGCLIGAEHVNNSYECDIPIGAGICASYQTQTNSPRRARSVASQSIIAYTMSLGAENSVAYSNNSIAIPTNFTISVTTEILPVSMTKTSVDCTMYICGDSTECSNLLLQYGSFCTQLNRALTGIAVEQDKNTQEVFAQVKQIYKTPPIKDFGGFNFSQILPDPSKPSKRSFIEDLLFNKVTLADAGFIKQYGDCLGDIAARDLICAQKFNGLTVLPPLLTDEMIAQYTSALLAGTITSGWTFGAGAALQIPFAMQMAYRFNGIGVTQCVLYENQKLIANQFNSAIGKIQDSLSSTASALGKLQDVVNQNAQALNTLVKQLSSNFGAISSVLNDILSRLDKVEAEVQIDRLITGRLQSLQTYVTQQLIRAAEIRASANLAATKMSECVLGQSKRVDFCGKGYHLMSFPQSAPHGVVFLHVTYVPAQEKNFTTAPAICHDGKAHFPREGVFVSNGTHWFVTQRNFYEPQIITTDNTFVCGNCDVVIGIVNNTVYDPLQPELDSFKEELDKYFKNHTSPDVDLGDISGINASVVNIQKEIDRLNEVAKNLNESLIDLQELGKYEQYIKGGGGSDIIKLLNEQVNKEMQSSNLYMSMSSWCYTHSLDGAGLFLFDHAAEEYEHAKKLIIFLNENNVPVQLTSISAPEHKFEGLTQIFQKAYEHEQHISESINNIVDHAIKSKDHATFNFLQWYVAEQHEEEVLFKDILDKIELIGNENHGLYLADQYVKGIAKSRKS

SEQ ID NO: 13712 - protein, 1379 aa, Artificial Sequence
  SARS-CoV-2/Congo/94/2020__EPI_ISL_417947 spike protein (1-1211)(N914C_S1123C) Ferritin construct
MFVFLVLLPLVSSQCVNLTTRTQLPPAYTNSFTRGVYYPDKVFRSSVLHSTQDLFLPFFSNVTWFHAIHVSGTNGTKRFDNPVLPFNDGVYFASTEKSNIIRGWIFGTTLDSKTQSLLIVNNATNVVIKVCEFQFCNDPFLGVYYHKNNKSWMESEFRVYSSANNCTFEYVSQPFLMDLEGKQGNFKNLREFVFKNIDGYFKIYSKHTPINLVRDLPQGFSALEPLVDLPIGINITRFQTLLALHRSYLTPGDSSSGWTAGAAAYYVGYLQPRTFLLKYNENGTITDAVDCALDPLSETKCTLKSFTVEKGIYQTSNFRVQPTESIVRFPNITNLCPFGEVFNATRFASVYAWNRKRISNCVADYSVLYNSASFSTFKCYGVSPTKLNDLCFTNVYADSFVIRGDEVRQIAPGQTGKIADYNYKLPDDFTGCVIAWNSNNLDSKVGGNYNYLYRLFRKSNLKPFERDISTEIYQAGSTPCNGVEGFNCYFPLQSYGFQPTNGVGYQPYRVVVLSFELLHAPATVCGPKKSTNLVKNKCVNFNFNGLTGTGVLTESNKKFLPFQQFGRDIADTTDAVRDPQTLEILDITPCSFGGVSVITPGTNTSNQVAVLYQGVNCTEVPVAIHADQLTPTWRVYSTGSNVFQTRAGCLIGAEHVNNSYECDIPIGAGICASYQTQTNSPRRARSVASQSIIAYTMSLGAENSVAYSNNSIAIPTNFTISVTTEILPVSMTKTSVDCTMYICGDSTECSNLLLQYGSFCTQLNRALTGIAVEQDKNTQEVFAQVKQIYKTPPIKDFGGFNFSQILPDPSKPSKRSFIEDILFNKVTLADAGFIKQYGDCLGDIAARDLICAQKFNGLTVLPPLLTDEMIAQYTSALLAGTITSGWTFGAGAALQIPFAMQMAYRFNGIGVTQCVLYENQKLIANQFNSAIGKIQDSLSSTASALGKLQDVVNQNAQALNTLVKQLSSNFGAISSVLNDILSRLDKVEAEVQIDRLITGRLQSLQTYVTQQLIRAAEIRASANLAATKMSECVLGQSKRVDFCGKGYHLMSFPQSAPHGVVFLHVTYVPAQEKNFTTAPAICHDGKAHFPREGVFVSNGTHWFVTQRNFYEPQIITTDNTFVCGNCDVVIGIVNNTVYDPLQPELDSFKEELDKYFKNHTSPDVDLGDISGINASVVNIQKEIDRLNEVAKNLNESLIDLQELGKYEQYIKGGGGSDIIKLLNEQVNKEMQSSNLYMSMSSWCYTHSLDGAGLFLFDHAAEEYEHAKKLIIFLNENNVPVQLTSISAPEHKFEGLTQIFQKAYEHEQHISESINNIVDHAIKSKDHATFNFLQWYVAEQHEEEVLFKDILDKIELIGNENHGLYLADQYVKGIAKSRKS

SEQ ID NO: 13713 - protein, 1379 aa, Artificial Sequence
  SARS-CoV-2/Congo/158/2020__EPI_ISL_417950 spike protein (1-1211)(N914C_S1123C) Ferritin construct
MFVFLVLLPLVSSQCVNLTTRTQLPPAYTNSFTRGVYYPDKVFRSSVLHSTQDLFLPFFSNVTWFHAIHVSGTNGTKRFDNPVLPFNDGVYFASTEKSNIIRGWIFGTTLDSKTQSLLIVNNATNVVIKVCEFQFCNDPFLGVYYHKNNKSWMESEFRVYSSANNCTFEYVSQPFLMDLEGKQGNFKNLREFVFKNIDGYFKIYSKHTPINLVRDLPQGFSALEPLVDLPIGINITRFQTLLALHRSYLTPGDSSSGWTAGAAAYYVGYLQPRTFLLKYNENGTITDAVDCALDPLSETKCTLKSFTVEKGIYQTSNFRVQPTESIVRFPNITNLCPFGEVFNATRFASVYAWNRKRISNCVADYSVLYNSASFSTFKCYGVSPTKLNDLCFTNVYADSFVIRGDEVRQIAPGQTGKIADYNYKLPDDFTGCVIAWNSNNLDSKVGGNYNYLYRLFRKSNLKPFERDISTEIYQAGSTPCNGVEGFNCYFPLQSYGFQPTNGVGYQPYRVVVLSFELLHAPATVCGPKKSTNLVKNKCVNFNFNGLTGTGVLTESNKKFLPFQQFGRDIADTTDAVRDPQTLEILDITPCSFGGVSVITPGTNTSNQVAVLYQDVNCTEVPVAIHADQLTPTWRVYSTGSNVFQTRAGCLIGAEHVNNSYECDIPIGAGICASYQTQTNSPRRARSVASQSIIAYTMSLGAENSVAYSNNSIAIPTNFTISVTTEILPVSMTKTSVDCTMYICGDSTECSNLLLQYGSFCTQLNRALTGIAVEQDKNTQEVFAQVKQIYKTPPIKDFGGFNFSQILPDPSKPSKRSFIEDLLFNKVTLADAGFIKQYGDCLGDIAARDLICAQKFNGLTVLPPLLTDEMIAQYTSALLAGTITSGWTFGAGAALQIPFAMQMAYRFNGIGVTQCVLYENQKLIANQFNSAIGKIQDSLSSTASALGKLQDVVNQNAQALNTLVKQLSSNFGAISSVLNDILSRLDKVEAEVQIDRLITGRLQSLQTYVTQQLIRAAEIRASANLAATKMSECVLGQSKRVDFCGKGYHLMSFPQSAPHGVVFLHVTYVPAQEKNFTTAPAICHDGKAHFPREGVFVSNGTHWFVTQRNFYEPQIITTDNTFLCGNCDVVIGIVNNTVYDPLQPELDSFKEELDKYFKNHTSPDVDLGDISGINASVVNIQKEIDRLNEVAKNLNESLIDLQELGKYEQYIKGGGGSDIIKLLNEQVNKEMQSSNLYMSMSSWCYTHSLDGAGLFLFDHAAEEYEHAKKLIIFLNENNVPVQLTSISAPEHKFEGLTQIFQKAYEHEQHISESINNIVDHAIKSKDHATFNFLQWYVAEQHEEEVLFKDILDKIELIGNENHGLYLADQYVKGIAKSRKS

SEQ ID NO: 13714 - protein, 1379 aa, Artificial Sequence
  SARS-CoV-2/USA/UT-00034/2020__EPI_ISL_417977 spike protein (1-1211)(N914C_S1123C) Ferritin construct
MFVFLVLLPLVSSQCVNLTTRTQLPPAYTNSFTRGVYYPDKVFRSSVLHSTQDLFLPFFSNVTWFHAIHVSGTNGTKRFDNPVLPFNDGVYFASTEKSNIIRGWIFGTTLDSKTQSLLIVNNATNVVIKVCEFQFCNDPFLGVYYYKNNKSWMESEFRVYSSANNCTFEYVSQPFLMDLEGKQGNFKNLREFVFKNIDGYFKIYSKHTPINLVRDLPQGFSALEPLVDLPIGINITRFQTLLALHRSYLTPGDSSSGWTAGAAAYYVGYLQPRTFLLKYNENGTITDAVDCALDPLSETKCTLKSFTVEKGIYQTSNFRVQPTESIVRFPNITNLCPFGEVFNATRFASVYAWNRKRISNCVADYSVLYNSASFSTFKCYGVSPTKLNDLCFTNVYADSFVIRGDEVRQIAPGQTGKIADYNYKLPDDFTGCVIAWNSNNLDSKVGGNYNYLYRLFRKSNLKPFERDISTEIYQAGSTPCNGVEGFNCYFPLQSYGFQPTNGVGYQPYRVVVLSFELLHAPATVCGPKKSTNLVKNKCVNFNFNGLTGTGVLTESNKKFLPFQQFGRDIADTTDAVRDPQTLEILDITPCSFGGVSVITPGTNTSNQVAVLYQGVNCTEVPVAIHADQLTPTWRVYSTGSNVFQTRAGCLIGAEHVNNSYECDIPIGAGICASYQTQTNSPRRARSVASQSIIAYTMSLGAENSVAYSNNSIAIPTNFTISVTTEILPVSMTKTSVDCTMYICGDSTECSNLLLQYGSFCTQLNRALTGIAVEQDKNTQEVFAQVKQIYKTPPIKDFGGFNFSQILPDPSKPSKRSFIEDLLFNKVTLADAGFIKQYGDCLGDIAARDLICAQKFNGLTVLPPLLTDEMIAQYTSALLAGTITSGWTFGAGAALQIPFAMQMAYRFNGIGVTQCVLYENQKLIANQFNSAIGKIQDSLSSTASALGKLQDVVNQNAQALNTLVKQLSSNFGAISSVLNDILSRLDKVEAEVQIDRLITGRLQSLQTYVTQQLIRAAEIRASANLAATKMSECVLGQSKRVDFCGKGYHLMSFPQSAPHGVVFLHVTYVPAQEKNFTTAPAICHDGKAHFPREGVFVSNGTHWFVTQRNFYEPQIITTDNTFVCGNCDVVIGIVNNTVYDPLQPELDSFKEELDKYFKNHTSPDVDLGDISGINASVVNIQKEIDRLNEVAKNLNESLIDLQELGKYEQYIKGGGGSDIIKLLNEQVNKEMQSSNLYMSMSSWCYTHSLDGAGLFLFDHAAEEYEHAKKLIIFLNENNVPVQLTSISAPEHKFEGLTQIFQKAYEHEQHISESINNIVDHAIKSKDHATFNFLQWYVAEQHEEEVLFKDILDKIELIGNENHGLYLADQYVKGIAKSRKS

SEQ ID NO: 13715 - protein, 1379 aa, Artificial Sequence
  SARS-CoV-2/USA/UT-00033/2020__EPI_ISL_417976 spike protein (1-1211)(N914C_S1123C) Ferritin construct
MFVFLVLLPLVSSQCVNLTTRTQLPPAYTNSFTRGVYYPDKVFRSSVLHSTQDLFLPFFSNVTWFHAIHVSGTNGTKRFDNPVLPFNDGVYFASTEKSNIIRGWIFGTTLDSKTQSLLIVNNATNVVIKVCEFQFCNDPFLGVYYHKNNKSWMESEFRVYSSANNCTFEYVSQPFLMDLEGKQGNFKNLREFVFKNIDGYFKIYSKHTPINLVRDLPQGFSALEPLVDLPIGINITRFQTLLALHRSYLTPGDSSSGLTAGAAAYYVGYLQPRTFLLKYNENGTITDAVDCALDPLSETKCTLKSFTVEKGIYQTSNFRVQPTESIVRFPNITNLCPFGEVFNATRFASVYAWNRKRISNCVADYSVLYNSASFSTFKCYGVSPTKLNDLCFTNVYADSFVIRGDEVRQIAPGQTGKIADYNYKLPDDFTGCVIAWNSNNLDSKVGGNYNYLYRLFRKSNLKPFERDISTEIYQAGSTPCNGVEGFNCYFPLQSYGFQPTNGVGYQPYRVVVLSFELLHAPATVCGPKKSTNLVKNKCVNFNFNGLTGTGVLTESNKKFLPFQQFGRDIADTTDAVRDPQTLEILDITPCSFGGVSVITPGTNTSNQVAVLYQGVNCTEVPVAIHADQLTPTWRVYSTGSNVFQTRAGCLIGAEHVNNSYECDIPIGAGICASYQTQTNSPRRARSVASQSIIAYTMSLGAENSVAYSNNSIAIPTNFTISVTTEILPVSMTKTSVDCTMYICGDSTECSNLLLQYGSFCTQLNRALTGIAVEQDKNTQEVFAQVKQIYKTPPIKDFGGFNFSQILPDPSKPSKRSFIEDLLFNKVTLADAGFIKQYGDCLGDIAARDLICAQKFNGLTVLPPLLTDEMIAQYTSALLAGTITSGWTFGAGAALQIPFAMQMAYRFNGIGVTQCVLYENQKLIANQFNSAIGKIQDSLSSTASALGKLQDVVNQNAQALNTLVKQLSSNFGAISSVLNDILSRLDKVEAEVQIDRLITGRLQSLQTYVTQQLIRAAEIRASANLAATKMSECVLGQSKRVDFCGKGYHLMSFPQSAPHGVVFLHVTYVPAQEKNFTTAPAICHDGKAHFPREGVFVSNGTHWFVTQRNFYEPQIITTDNTFVCGNCDVVIGIVNNTVYDPLQPELDSFKEELDKYFKNHTSPDVDLGDISGINASVVNIQKEIDRLNEVAKNLNESLIDLQELGKYEQYIKGGGGSDIIKLLNEQVNKEMQSSNLYMSMSSWCYTHSLDGAGLFLFDHAAEEYEHAKKLIIFLNENNVPVQLTSISAPEHKFEGLTQIFQKAYEHEQHISESINNIVDHAIKSKDHATFNFLQWYVAEQHEEEVLFKDILDKIELIGNENHGLYLADQYVKGIAKSRKS

SEQ ID NO: 13716 - protein, 1379 aa, Artificial Sequence
  SARS-CoV-2/USA/WI-13/2020__EPI_ISL_417516 spike protein (1-1211)(N914C_S1123C) Ferritin construct
MFVFLVLLPLVSSQCVNLTTRTQLPPAYTNSFTRGVYYPDKVFRSSVLHSTQDLFLPFFSNVTWFHAIHVSGTNGTKRFDNPVLPFNDGVYFASTEKSNIIRGWIFGTTLDSKTQSLLIVNNATNVVIKVCEFQFCNDPFLGVYYHKNNKSWMESEFRVYSSANNCTFEYVSQPFLMDLEGKQGNFKNLREFVFKNIDGYFKIYSKHTPINLVRDLPQGFSALEPLVDLPIGINITRFQTLLALHRSYLTPGDSSSGWTAGAAAYYVGYLQPRTFLLKYNENGTITDAVDCALDPLSETKCTLKSFTVEKGIYQTSNFRVLPTESIVRFPNITNLCPFGEVFNATRFASVYAWNRKRISNCVADYSVLYNSASFSTFKCYGVSPTKLNDLCFTNVYADSFVIRGDEVRQIAPGQTGKIADYNYKLPDDFTGCVIAWNSNNLDSKVGGNYNYLYRLFRKSNLKPFERDISTEIYQAGSTPCNGVEGFNCYFPLQSYGFQPTNGVGYQPYRVVVLSFELLHAPATVCGPKKSTNLVKNKCVNFNFNGLTGTGVLTESNKKFLPFQQFGRDIADTTDAVRDPQTLEILDITPCSFGGVSVITPGTNTSNQVAVLYQGVNCTEVPVAIHADQLTPTWRVYSTGSNVFQTRAGCLIGAEHVNNSYECDIPIGAGICASYQTQTNSPRRARSVASQSIIAYTMSLGAENSVAYSNNSIAIPTNFTISVTTEILPVSMTKTSVDCTMYICGDSTECSNLLLQYGSFCTQLNRALTGIAVEQDKNTQEVFAQVKQIYKTPPIKDFGGFNFSQILPDPSKPSKRSFIEDLLFNKVTLADAGFIKQYGDCLGDIAARDLICAQKFNGLTVLPPLLTDEMIAQYTSALLAGTITSGWTFGAGAALQIPFAMQMAYRFNGIGVTQCVLYENQKLIANQFNSAIGKIQDSLSSTASALGKLQDVVNQNAQALNTLVKQLSSNFGAISSVLNDILSRLDKVEAEVQIDRLITGRLQSLQTYVTQQLIRAAEIRASANLAATKMSECVLGQSKRVDFCGKGYHLMSFPQSAPHGVVFLHVTYVPAQEKNFTTAPAICHDGKAHFPREGVFVSNGTHWFVTQRNFYEPQIITTDNTFVCGNCDVVIGIVNNTVYDPLQPELDSFKEELDKYFKNHTSPDVDLGDISGINASVVNIQKEIDRLNEVAKNLNESLIDLQELGKYEQYIKGGGGSDIIKLLNEQVNKEMQSSNLYMSMSSWCYTHSLDGAGLFLFDHAAEEYEHAKKLIIFLNENNVPVQLTSISAPEHKFEGLTQIFQKAYEHEQHISESINNIVDHAIKSKDHATFNFLQWYVAEQHEEEVLFKDILDKIELIGNENHGLYLADQYVKGIAKSRKS

SEQ ID NO: 13717 - protein, 1378 aa, Artificial Sequence
  SARS-CoV-2/India/1-27/2020__EPI_ISL_413522 spike protein (1-1210)(N913C_S1122C) Ferritin construct
MFVFLVLLPLVSSQCVNLTTRTQLPPAYTNSFTRGVYYPDKVFRSSVLHSTQDLFLPFFSNVTWFHAIHVSGTNGTKRFDNPVLPFNDGVYFASTEKSNIIRGWIFGTTLDSKTQSLLIVNNATNVVIKVCEFQFCNDPFLGVYHKNNKSWMESEFRVYSSANNCTFEYVSQPFLMDLEGKQGNFKNLREFVFKNIDGYFKIYSKHTPINLVRDLPQGFSALEPLVDLPIGINITRFQTLLALHRSYLTPGDSSSGWTAGAAAYYVGYLQPRTFLLKYNENGTITDAVDCALDPLSETKCTLKSFTVEKGIYQTSNFRVQPTESIVRFPNITNLCPFGEVFNATRFASVYAWNRKRISNCVADYSVLYNSASFSTFKCYGVSPTKLNDLCFTNVYADSFVIRGDEVIQIAPGQTGKIADYNYKLPDDFTGCVIAWNSNNLDSKVGGNYNYLYRLFRKSNLKPFERDISTEIYQAGSTPCNGVEGFNCYFPLQSYGFQPTNGVGYQPYRVVVLSFELLHAPATVCGPKKSTNLVKNKCVNFNFNGLTGTGVLTESNKKFLPFQQFGRDIADTTDAVRDPQTLEILDITPCSFGGVSVITPGTNTSNQVAVLYQDVNCTEVPVAIHADQLTPTWRVYSTGSNVFQTRAGCLIGAEHVNNSYECDIPIGAGICASYQTQTNSPRRARSVASQSIIAYTMSLGAENSVAYSNNSIAIPTNFTISVTTEILPVSMTKTSVDCTMYICGDSTECSNLLLQYGSFCTQLNRALTGIAVEQDKNTQEVFAQVKQIYKTPPIKDFGGFNFSQILPDPSKPSKRSFIEDLLFNKVTLADAGFIKQYGDCLGDIAARDLICAQKFNGLTVLPPLLTDEMIAQYTSALLAGTITSGWTFGAGAALQIPFAMQMAYRFNGIGVTQCVLYENQKLIANQFNSAIGKIQDSLSSTASALGKLQDVVNQNAQALNTLVKQLSSNFGAISSVLNDILSRLDKVEAEVQIDRLITGRLQSLQTYVTQQLIRAAEIRASANLAATKMSECVLGQSKRVDFCGKGYHLMSFPQSAPHGVVFLHVTYVPAQEKNFTTAPAICHDGKAHFPREGVFVSNGTHWFVTQRNFYEPQIITTDNTFVCGNCDVVIGIVNNTVYDPLQPELDSFKEELDKYFKNHTSPDVDLGDISGINASVVNIQKEIDRLNEVAKNLNESLIDLQELGKYEQYIKGGGGSDIIKLLNEQVNKEMQSSNLYMSMSSWCYTHSLDGAGLFLFDHAAEEYEHAKKLIIFLNENNVPVQLTSISAPEHKFEGLTQIFQKAYEHEQHISESINNIVDHAIKSKDHATFNFLQWYVAEQHEEEVLFKDILDKIELIGNENHGLYLADQYVKGIAKSRKS

SEQ ID NO: 13718 - protein, 1373 aa, Artificial Sequence
  SARS-CoV-2/pangolin/Guangxi/P4L/2017__EPI_ISL_410538 spike protein (1-1205)(N908C_S1117C) Ferritin construct
MFVFLFVLPLVSSQCVNLTTRTGIPPGYTNSSTRGVYYPDKVFRSSILHLTQDLFLPFFSNVTWFNTINYQGGFKKFDNPVLPFNDGVYFASTEKSNIIRGWIFGTTLDARTQSLLIVNNATNVVIKVCEFQFCTDPFLGVYYHNNNKTWVENEFRVYSSANNCTFEYISQPFLMDLEGKQGNFKNLREFVFKNVDGYFKIYSKHTPIDLVRDLPRGFAALEPLVDLPIGINITRFQTLLALHRSYLTPGNLESGWTTGAAAYYVGYLQQRTFLLSYNQNGTITDAVDCSLDPLSETKCTLKSLTVEKGIYQTSNFRVQPTISIVRFPNITNLCPFGEVFNASKFASVYAWNRKRISNCVADYSVLYNSTSFSTFKCYGVSPTKLNDLCFTNVYADSFVVKGDEVRQIAPGQTGVIADYNYKLPDDFTGCVIAWNSVKQDALTGGNYGYLYRLFRKSKLKPFERDISTEIYQAGSTPCNGQVGLNCYYPLERYGFHPTTGVNYQPFRVVVLSFELLNGPATVCGPKLSTTLVKDKCVNFNFNGLTGTGVLTTSKKQFLPFQQFGRDISDTTDAVRDPQTLEILDITPCSFGGVSVITPGTNTSNQVAVLYQDVNCTEVPMAIHAEQLTPAWRVYSAGANVFQTRAGCLVGAEHVNNSYECDIPVGAGICASYHSMSSLRSVNQRSIIAYTMSLGAENSVAYSNNSIAIPTNFTISVTTEILPVSMTKTSVDCTMYICGDSIECSNLLLQYGSFCTQLNRALTGIAVEQDKNTQEVFAQVKQIYKTPPIKDFGGFNFSQILPDPSKPSKRSFIEDLLFNKVTLADAGFIKQYGDCLGDIAARDLICAQKFNGLTVLPPLLTDEMIAQYTSALLAGTITSGWTFGAGAALQIPFAMQMAYRFNGIGVTQCVLYENQKLIANQFNSAIGKIQDSLSSTASALGKLQDVVNQNAQALNTLVKQLSSNFGAISSVLNDILSRLDKVEAEVQIDRLITGRLQSLQTYVTQQLIRAAEIRASANLAATKMSECVLGQSKRVDFCGKGYHLMSFPQSAPHGVVFLHVTYVPAQEKNFTTAPAICHEGKAHFPREGVFVSNGTHWFITQRNFYEPQIITTDNTFVCGSCDVVIGIVNNTVYDPLQPELDSFKEELDKYFKNHTSPDVDLGDISGINASVVNIQKEIDRLNEVAKNLNESPIDLQELGKYEQYIKGGGGSDIIKLLNEQVNKEMQSSNLYMSMSSWCYTHSLDGAGLFLFDHAAEEYEHAKKLIIFLNENNVPVQLTSISAPEHKFEGLTQIFQKAYEHEQHISESINNIVDHAIKSKDHATFNFLQWYVAEQHEEEVLFKDILDKIELIGNENHGLYLADQYVKGIAKSRKS

SEQ ID NO: 13719 - protein, 1373 aa, Artificial Sequence
  SARS-CoV-2/pangolin/Guangxi/P5L/2017__EPI_ISL_410540 spike protein (1-1205)(N908C_S1117C) Ferritin construct
MFVFLFVLPLVSSQCVNLTTRTGIPPGYTNSSTRGVYYPDKVFRSSILHLTQDLFLPFFSNVTWFNTINYQGGFKKFDNPVLPFNDGVYFASTEKSNIIRGWIFGTTLDARTQSLLIVNNATNVVIKVCEFQFCTDPFLGVYYHNNNKTWVENEFRVYSSANNCTFEYISQPFLMDLEGKQGNFKNLREFVFKNVDGYFKIYSKHTPIDLVRDLPRGFAALEPLVDLPIGINITRFQTLLALHRSYLTPGKLESGWTTGAAAYYVGYLQQRTFLLSYNQNGTITDAVDCSLDPLSETKCTLKSLTVEKGIYQTSNFRVQPTISIVRFPNITNLCPFGEVFNASKFASVYAWNRKRISNCVADYSVLYNSTSFSTFKCYGVSPTKLNDLCFTNVYADSFVVKGDEVRQIAPGQTGVIADYNYKLPDDFTGCVIAWNSVKQDALTGGNYGYLYRLFRKSKLKPFERDISTEIYQAGSTPCNGQVGLNCYYPLERYGFHPTTGVNYQPFRVVVLSFELLNGPATVCGPKLSTTLVKDKCVNFNFNGLTGTGVLTTSKKQFLPFQQFGRDISDTTDAVRDPQTLEILDITPCSFGGVSVITPGTNTSNQVAVLYQDVNCTEVPMAIHAEQLTPAWRVYSAGANVFQTRAGCLVGAEHVNNSYECDIPVGAGICASYHSMSSFRSVNQRSIIAYTMSLGAENSVAYSNNSIAIPTNFTISVTTEILPVSMTKTSVDCTMYICGDSIECSNLLLQYGSFCTQLNRALTGIAVEQDKNTQEVFAQVKQIYKTPPIKDFGGFNFSQILPDPSKPSKRSFIEDLLFNKVTLADAGFIKQYGDCLGDIAARDLICAQKFNGLTVLPPLLTDEMIAQYTSALLAGTITSGWTFGAGAALQIPFAMQMAYRFNGIGVTQCVLYENQKLIANQFNSAIGKIQDSLSSTASALGKLQDVVNQNAQALNTLVKQLSSNFGAISSVLNDILSRLDKVEAEVQIDRLITGRLQSLQTYVTQQLIRAAEIRASANLAATKMSECVLGQSKRVDFCGKGYHLMSFPQSAPHGVVFLHVTYVPAQEKNFTTAPAICHEGKAHFPREGVFVSNGTHWFITQRNFYEPQIITTDNTFVCGSCDVVIGIVNNTVYDPLQPELDSFKEELDKYFKNHTSPDVDLGDISGINASVVNIQKEIDRLNEVAKNLNESLIDLQELGKYEQYIKGGGGSDIIKLLNEQVNKEMQSSNLYMSMSSWCYTHSLDGAGLFLFDHAAEEYEHAKKLIIFLNENNVPVQLTSISAPEHKFEGLTQIFQKAYEHEQHISESINNIVDHAIKSKDHATFNFLQWYVAEQHEEEVLFKDILDKIELIGNENHGLYLADQYVKGIAKSRKS

SEQ ID NO: 13720 - protein, 1373 aa, Artificial Sequence
  SARS-CoV-2/pangolin/Guangxi/P5E/2017__EPI_ISL_410541 spike protein (1-1205)(N908C_S1117C) Ferritin construct
MFVFLFVLPLVSSQCVNLTTRTGIPPGYTNSSTRGVYYPDKVFRSSILHLTQDLFLPFFSNVTWFNTITYQGGSKKFDNPVLPFNDGVYFASTEKSNIIRGWIFGTTLDARTQSLLIVNNATNVVIKVCEFQFCTDPFLGVYYHNNNKTWVENEFRVYSSANNCTFEYISQPFLMDLEGKQGNFKNLREFVFKNVDGYFKIYSKHTPIDLVRDLPRGFAALEPLVDLPIGINITRFQTLLALHRSYLTPGKLESGWTTGAAAYYVGYLQQRTFLLSYNQNGTITDAVDCSLDPLSETKCTLKSLTVEKGIYQTSNFRVQPTISIVRFPNITNLCPFGEVFNASKFASVYAWNRKRISNCVADYSVLYNSTSFSTFKCYGVSPTKLNDLCFTNVYADSFVVKGDEVRQIAPGQTGVIADYNYKLPDDFTGCVIAWNSVKQDALTGDNYGYLYRLFRKSKLKPFERDISTEIYQAGSTPCNGQVGLNCYYPLERYGFHPTTGVNYQPFRVVVLSFELLNGPATVCGPKLSTTLVKDKCVNFNFNGLTGTGVLTTSKKQFLPFQQFGRDISDTTDAVRDPQTLEILDITPCSFGGVSVITPGTNTSNQVAVLYQDVNCTEVPMAIHAEQLTPAWRVYSAGANVFQTRAGCLVGAEHVNNSYECDIPVGAGICASYHSMSSFRSVNQRSIIAYTMSLGAENSVAYSNNSIAIPTNFTISVTTEILPVSMTKTSVDCTMYICGDSIECSNLLLQYGSFCTQLNRALTGIAVEQDKNTQEVFAQVKQIYKTPPIKDFGGFNFSQILPDPSKPSKRSFIEDLLFNKVTLADAGFIKQYGDCLGDIAARDLICAQKFNGLTVLPPLLTDEMIAQYTSALLAGTITSGWTFGAGAALQIPFAMQMAYRFNGIGVTQCVLYENQKLIANQFNSAIGKIQDSLSSTASALGKLQDVVNQNAQALNTLVKQLSSNFGAISSVLNDILSRLDKVEAEVQIDRLITGRLQSLQTYVTQQLIRAAEIRASANLAATKMSECVLGQSKRVDFCGKGYHLMSFPQSAPHGVVFLHVTYVPAQEKNFTTAPAICHEGKAHFPREGVFVSNGTHWFITQRNFYEPQIITTDNTFVCGSCDVVIGIVNNTVYDPLQPELDSFKEELDKYFKNHTSPDVDLGDISGINASVVNIQKEIDRLNEVAKNLNESLIDLQELGKYEQYIKGGGGSDIIKLLNEQVNKEMQSSNLYMSMSSWCYTHSLDGAGLFLFDHAAEEYEHAKKLIIFLNENNVPVQLTSISAPEHKFEGLTQIFQKAYEHEQHISESINNIVDHAIKSKDHATFNFLQWYVAEQHEEEVLFKDILDKIELIGNENHGLYLADQYVKGIAKSRKS

SEQ ID NO: 13721 - protein, 1371 aa, Artificial Sequence
  SARS-CoV-2/pangolin/Guangxi/P1E/2017__EPI_ISL_410539 spike protein (1-1203)(N906C_S1115C) Ferritin construct
MFVFLFVLPLVSSQCVNLTTRTGIQPGYTNSSTRGVYYPDKVFRSSILHLTQDLFLPFFSNVTWFNTINYQGGFKKFDNPVLPFNDGVYFASTEKSNIIRGWIFGTTLDARTQSLLIVNNATNVVIKVCEFQFCTDPFLGVYYHNNNKTWVENEFRVYSSANNCTFEYISQPFLMDLEGKQGNFKNLREFVFKNVDGYFKIYSKHTPIDLVRDLPRGFAALEPLVDLPIGINITRFQTLLALHRSYLTPGKLESGWTTGAAAYYVGYLQQRTFLLSYNQNGTITDAVDCSLDPLSETKCTLKSLTVEKGIYQTSNFRVQPTISIVRFPNITNLCPFGEVFNASKFASVYAWNRKRISNCVADYSVLYNSTSFSTFKCYGVSPTKLNDLCFTNVYADSFVVKGDEVRQIAPGQTGVIADYNYKLPDDFTGCVIAWNSVKQDALTGGNYLYRLFRKSKLKPFERDISTEIYQAGSTPCNGQVGLNCYYPLERYGFHPTTGVNYQPFRVVVLSFELLNGPATVCGPKLSTTLVKDKCVNFNFNGLTGTGVLTTSKKQFLPFQQFGRDISDTTDAVRDPQTLEILDITPCSFGGVSVITPGTNTSNQVAVLYQDVNCTEVPMAIHAEQLTPAWRVYSAGANVFQTRAGCLVGAEHVNNSYECDIPVGAGICASYHSMSSLRSVNQRSIIAYTMSLGAENSVAYSNNSIAIPTNFTISVTTEILPVSMTKTSVDCTMYICGDSIECSNLLLQYGSFCTQLNRALTGIAVEQDKNTQEVFAQVKQIYKTPPIKDFGGFNFSQILPDPSKPSKRSFIEDLLFNKVTLADAGFIKQYGDCLGDIAARDLICAQKFNGLTVLPPLLTDEMIAQYTSALLAGTITSGWTFGAGAALQIPFAMQMAYRFNGIGVTQCVLYENQKLIANQFNSAIGKIQDSLSSTASALGKLQDVVNQNAQALNTLVKQLSSNFGAISSVLNDILSRLDKVEAEVQIDRLITGRLQSLQTYVTQQLIRAAEIRASANLAATKMSECVLGQSKRVDFCGKGYHLMSFPQSAPHGVVFLHVTYVPAQEKNFTTAPAICHEGKAHFPREGVFVSNGTHWFITQRNFYEPQIITTDNTFVCGSCDVVIGIVNNTVYDPLQPELDSFKEELDKYFKNHTSPDVDLGDISGINASVVNIQKEIDRLNEVAKNLNESLIDLQELGKYEQYIKGGGGSDIIKLLNEQVNKEMQSSNLYMSMSSWCYTHSLDGAGLFLFDHAAEEYEHAKKLIIFLNENNVPVQLTSISAPEHKFEGLTQIFQKAYEHEQHISESINNIVDHAIKSKDHATFNFLQWYVAEQHEEEVLFKDILDKIELIGNENHGLYLADQYVKGIAKSRKS

SEQ ID NO: 13722 - protein, 1241 aa, Artificial Sequence
  SARS-CoV-2/Wuhan/WIV05/2019__EPI_ISL_402128 spike protein (1-1211)(N914C_S1123C) Foldon construct
MFVFLVLLPLVSSQCVNLTTRTQLPPAYTNSFTRGVYYPDKVFRSSVLHSTQDLFLPFFSNVTWFHAIHVSGTNGTKRFDNPVLPFNDGVYFASTEKSNIIRGWIFGTTLDSKTQSLLIVNNATNVVIKVCEFQFCNDPFLGVYYHKNNKSWMESEFRVYSSANNCTFEYVSQPFLMDLEGKQGNFKNLREFVFKNIDGYFKIYSKHTPINLVRDLPQGFSALEPLVDLPIGINITRFQTLLALHRSYLTPGDSSSGWTAGAAAYYVGYLQPRTFLLKYNENGTITDAVDCALDPLSETKCTLKSFTVEKGIYQTSNFRVQPTESIVRFPNITNLCPFGEVFNATRFASVYAWNRKRISNCVADYSVLYNSASFSTFKCYGVSPTKLNDLCFTNVYADSFVIRGDEVRQIAPGQTGKIADYNYKLPDDFTGCVIAWNSNNLDSKVGGNYNYLYRLFRKSNLKPFERDISTEIYQAGSTPCNGVEGFNCYFPLQSYGFQPTNGVGYQPYRVVVLSFELLHAPATVCGPKKSTNLVKNKCVNFNFNGLTGTGVLTESNKKFLPFQQFGRDIADTTDAVRDPQTLEILDITPCSFGGVSVITPGTNTSNQVAVLYQDVNCTEVPVAIHADQLTPTWRVYSTGSNVFQTRAGCLIGAEHVNNSYECDIPIGAGICASYQTQTNSPRRARSVASQSIIAYTMSLGAENSVAYSNNSIAIPTNFTISVTTEILPVSMTKTSVDCTMYICGDSTECSNLLLQYGSFCTQLNRALTGIAVEQDKNTQEVFAQVKQIYKTPPIKDFGGFNFSQILPDPSKPSKRSFIEDLLFNKVTLADAGFIKQYGDCLGDIAARDLICAQKFNGLTVLPPLLTDEMIAQYTSALLAGTITSGWTFGAGAALQIPFAMQMAYRFNGIGVTQCVLYENQKLIANQFNSAIGKIQDSLSSTASALGKLQDVVNQNAQALNTLVKQLSSNFGAISSVLNDILSRLDKVEAEVQIDRLITGRLQSLQTYVTQQLIRAAEIRASANLAATKMSECVLGQSKRVDFCGKGYHLMSFPQSAPHGVVFLHVTYVPAQEKNFTTAPAICHDGKAHFPREGVFVSNGTHWFVTQRNFYEPQIITTDNTFVCGNCDVVIGIVNNTVYDPLQPELDSFKEELDKYFKNHTSPDVDLGDISGINASVVNIQKEIDRLNEVAKNLNESLIDLQELGKYEQYIKGGSGYIPEAPRDGQAYVRKDGEWVLLSTFL

SEQ ID NO: 13723 - protein, 1237 aa, Artificial Sequence
  SARS-CoV-2/bat/Yunnan/RaTG13/2013__EPI_ISL_402131 spike protein (1-1207)(N910C_S1119C) Foldon construct
MFVFLVLLPLVSSQCVNLTTRTQLPPAYTNSSTRGVYYPDKVFRSSVLHLTQDLFLPFFSNVTWFHAIHVSGTNGIKRFDNPVLPFNDGVYFASTEKSNIIRGWIFGTTLDSKTQSLLIVNNATNVVIKVCEFQFCNDPFLGVYYHKNNKSWMESEFRVYSSANNCTFEYVSQPFLMDLEGKQGNFKNLREFVFKNIDGYFKIYSKHTPINLVRDLPPGFSALEPLVDLPIGINITRFQTLLALHRSYLTPGDSSSGWTAGAAAYYVGYLQPRTFLLKYNENGTITDAVDCALDPLSETKCTLKSFTVEKGIYQTSNFRVQPTDSIVRFPNITNLCPFGEVFNATTFASVYAWNRKRISNCVADYSVLYNSTSFSTFKCYGVSPTKLNDLCFTNVYADSFVITGDEVRQIAPGQTGKIADYNYKLPDDFTGCVIAWNSKHIDAKEGGNFNYLYRLFRKANLKPFERDISTEIYQAGSKPCNGQTGLNCYYPLYRYGFYPTDGVGHQPYRVVVLSFELLNAPATVCGPKKSTNLVKNKCVNFNFNGLTGTGVLTESNKKFLPFQQFGRDIADTTDAVRDPQTLEILDITPCSFGGVSVITPGTNASNQVAVLYQDVNCTEVPVAIHADQLTPTWRVYSTGSNVFQTRAGCLIGAEHVNNSYECDIPIGAGICASYQTQTNSRSVASQSIIAYTMSLGAENSVAYSNNSIAIPTNFTISVTTEILPVSMTKTSVDCTMYICGDSTECSNLLLQYGSFCTQLNRALTGIAVEQDKNTQEVFAQVKQIYKTPPIKDFGGFNFSQILPDPSKPSKRSFIEDLLFNKVTLADAGFIKQYGDCLGDIAARDLICAQKFNGLTVLPPLLTDEMIAQYTSALLAGTITSGWTFGAGAALQIPFAMQMAYRFNGIGVTQCVLYENQKLIANQFNSAIGKIQDSLSSTASALGKLQDVVNQNAQALNTLVKQLSSNFGAISSVLNDILSRLDKVEAEVQIDRLITGRLQSLQTYVTQQLIRAAEIRASANLAATKMSECVLGQSKRVDFCGKGYHLMSFPQSAPHGVVFLHVTYVPAQEKNFTTAPAICHDGKAHFPREGVFVSNGTHWFVTQRNFYEPQIITTDNTFVCGSCDVVIGIVNNTVYDPLQPELDSFKEELDKYFKNHTSPDVDLGDISGINASVVNIQKEIDRLNEVAKNLNESLIDLQELGKYEQYIKGGSGYIPEAPRDGQAYVRKDGEWVLLSTFL

SEQ ID NO: 13724 - protein, 1241 aa, Artificial Sequence
  SARS-CoV-2/Wuhan/HBCDC-HB-01/2019__EPI_ISL_402132 spike protein (1-1211)(N914C_S1123C) Foldon construct
MFVFLVLLPLVSSQCVNLTTRTQLPPAYTNSITRGVYYPDKVFRSSVLHSTQDLFLPFFSNVTWFHAIHVSGTNGTKRFDNPVLPFNDGVYFASTEKSNIIRGWIFGTTLDSKTQSLLIVNNATNVVIKVCEFQFCNDPFLGVYYHKNNKSWMESEFRVYSSANNCTFEYVSQPFLMDLEGKQGNFKNLREFVFKNIDGYFKIYSKHTPINLVRDLPQGFSALEPLVDLPIGINITRFQTLLALHRSYLTPGDSSSGWTAGAAAYYVGYLQPRTFLLKYNENGTITDAVDCALDPLSETKCTLKSFTVEKGIYQTSNFRVQPTESIVRFPNITNLCPFGEVFNATRFASVYAWNRKRISNCVADYSVLYNSASFSTFKCYGVSPTKLNDLCFTNVYADSFVIRGDEVRQIAPGQTGKIADYNYKLPDDFTGCVIAWNSNNLDSKVGGNYNYLYRLFRKSNLKPFERDISTEIYQAGSTPCNGVEGFNCYFPLQSYGFQPTNGVGYQPYRVVVLSFELLHAPATVCGPKKSTNLVKNKCVNFNFNGLTGTGVLTESNKKFLPFQQFGRDIADTTDAVRDPQTLEILDITPCSFGGVSVITPGTNTSNQVAVLYQDVNCTEVPVAIHADQLTPTWRVYSTGSNVFQTRAGCLIGAEHVNNSYECDIPIGAGICASYQTQTNSPRRARSVASQSIIAYTMSLGAENSVAYSNNSIAIPTNFTISVTTEILPVSMTKTSVDCTMYICGDSTECSNLLLQYGSFCTQLNRALTGIAVEQDKNTQEVFAQVKQIYKTPPIKDFGGFNFSQILPDPSKPSKRSFIEDLLFNKVTLADAGFIKQYGDCLGDIAARDLICAQKFNGLTVLPPLLTDEMIAQYTSALLAGTITSGWTFGAGAALQIPFAMQMAYRFNGIGVTQCVLYENQKLIANQFNSAIGKIQDSLSSTASALGKLQDVVNQNAQALNTLVKQLSSNFGAISSVLNDILSRLDKVEAEVQIDRLITGRLQSLQTYVTQQLIRAAEIRASANLAATKMSECVLGQSKRVDFCGKGYHLMSFPQSAPHGVVFLHVTYVPAQEKNFTTAPAICHDGKAHFPREGVFVSNGTHWFVTQRNFYEPQIITTDNTFVCGNCDVVIGIVNNTVYDPLQPELDSFKEELDKYFKNHTSPDVDLGDISGINASVVNIQKEIDRLNEVAKNLNESLIDLQELGKYEQYIKGGSGYIPEAPRDGQAYVRKDGEWVLLSTFL

SEQ ID NO: 13725 - protein, 1241 aa, Artificial Sequence
  SARS-CoV-2/Guangdong/20SF028/2020__EPI_ISL_403936 spike protein (1-1211)(N914C_S1123C) Foldon construct
MFVFLVLLPLVSSQCVNLTTRTQLPPAYTNSFTRGVYYPDKVFRSSVLYSTQDLFLPFFSNVTWFHAIHVSGTNGTKRFDNPVLPFNDGVYFASTEKSNIIRGWIFGTTLDSKTQSLLIVNNATNVVIKVCEFQFCNDPFLGVYYHKNNKSWMESEFRVYSSANNCTFEYVSQPFLMDLEGKQGNFKNLREFVFKNIDGYFKIYSKHTPINLVRDLPQGFSALEPLVDLPIGINITRFQTLLALHRSYLTPGDSSSGWTAGAAAYYVGYLQPRTFLLKYNENGTITDAVDCALDPLSETKCTLKSFTVEKGIYQTSNFRVQPTESIVRFPNITNLCPFGEVFNATRFASVYAWNRKRISNCVADYSVLYNSASFSTFKCYGVSPTKLNDLCFTNVYADSFVIRGDEVRQIAPGQTGKIADYNYKLPDDFTGCVIAWNSNNLDSKVGGNYNYLYRLFRKSNLKPFERDISTEIYQAGSTPCNGVEGFNCYFPLQSYGFQPTNGVGYQPYRVVVLSFELLHAPATVCGPKKSTNLVKNKCVNFNFNGLTGTGVLTESNKKFLPFQQFGRDIADTTDAVRDPQTLEILDITPCSFGGVSVITPGTNTSNQVAVLYQDVNCTEVPVAIHADQLTPTWRVYSTGSNVFQTRAGCLIGAEHVNNSYECDIPIGAGICASYQTQTNSPRRARSVASQSIIAYTMSLGAENSVAYSNNSIAIPTNFTISVTTEILPVSMTKTSVDCTMYICGDSTECSNLLLQYGSFCTQLNRALTGIAVEQDKNTQEVFAQVKQIYKTPPIKDFGGFNFSQILPDPSKPSKRSFIEDLLFNKVTLADAGFIKQYGDCLGDIAARDLICAQKFNGLTVLPPLLTDEMIAQYTSALLAGTITSGWTFGAGAALQIPFAMQMAYRFNGIGVTQCVLYENQKLIANQFNSAIGKIQDSLSSTASALGKLQDVVNQNAQALNTLVKQLSSNFGAISSVLNDILSRLDKVEAEVQIDRLITGRLQSLQTYVTQQLIRAAEIRASANLAATKMSECVLGQSKRVDFCGKGYHLMSFPQSAPHGVVFLHVTYVPAQEKNFTTAPAICHDGKAHFPREGVFVSNGTHWFVTQRNFYEPQIITTDNTFVCGNCDVVIGIVNNTVYDPLQPELDSFKEELDKYFKNHTSPDVDLGDISGINASVVNIQKEIDRLNEVAKNLNESLIDLQELGKYEQYIKGGSGYIPEAPRDGQAYVRKDGEWVLLSTFL

SEQ ID NO: 13726 - protein, 1241 aa, Artificial Sequence
  SARS-CoV-2/Shenzhen/SZTH-001/2020__EPI_ISL_406592 spike protein (1-1211)(N914C_S1123C) Foldon construct
MFVFLVLLPLVSSQCVNLTTRTQLPPAYTNSFTRGVYYPDKVFRSSVLHSTQDLFLPFFSNVTWFHAIHVSGTNGTKRFDNPVLPFNDGVYFASTEKSNIIRGWIFGTTLDSKTQSLLIVNNATNVVIKVCEFQFCNDPFLGVYYHKNNKSWMESEFRVYSSANNCTFEYVSQPFLMDLEGKQGNFKNLREFVFKNIDGYFKIYSKHTPINLVRDLPQGFSALEPLVDLPIGINITRFQTLLALHRSYLTPGDSSSGWTAGAAAYYVGYLQPRTFLLKYNENGTITDAVDCALDPLSETKCTLKSFTVEKGIYQTSNFRVQPTESIVRFPNITNLCPFGEVFNATRFASVYAWNRKRISNCVADYSVLYNSASFSTFKCYGVSPTKLNDLCFTNVYADSFVIRGDEVRQIAPGQTGKIADYNYKLPDDFTGCVIAWNSNNLDSKVGGNYNYLYRLFRKSNLKPFERDISTEIYQAGSTPCNGVEGFNCYFPLQSYGFQPTNGVGYQPYRVVVLSFELLHAPATVCGPKKSTNLVKNKCVNFNFNGLTGTGVLTESNKKFLPFQQFGRDIADTTDAVRDPQTLEILDITPCSFGGVSVITPGTNTSNQVAVLYQDVNCTEVPVAIHADQLTPTWRVYSTGSNVFQTRAGCLIGAEHVNNSYECDIPIGAGICASYQTQTNSPRRARSVASQSIIAYTMSLGAENSVAYSNNSIAIPTNFTISVTTEILPVSMTKTSVDCTMYICGDSTECSNLLLQYGSFCTQLNRALTGIAVEQDKNTQEVFAQVKQIYKTPPIKDFGGFNFSQILPDPSKPSKRSFIEDLLFNKVTLADAGFIKQYGDCLGDIAARDLICAQKFNGLTVLPPLLTDEMIAQYTSALLAGTITSGWTFGAGAALQIPFAMQMAYRFNGIGVTQCVLYENQKLIANQFNSAIGKIQDSLSSTASALGKLQDVVNQNAQALNTLVKQLSSNFGAISSVLNDILSRLDKVEAEVQIDRLITGRLQSLQTYVTQQLIRAAEIRASANLAATKMSECVLGQSKRVDFCGKGYHLMSFPQSAPHGVVFLHVTYVPAQEKNFTTAPAICHDGKAHFPREGVFVSNGTHWFVTQRNFYEPQIITTDNTFVCGNCDVLIGIVNNTVYDPLQPELDSFKEELDKYFKNHTSPDVDLGDISGINASVVNIQKEIDRLNEVAKNLNESLIDLQELGKYEQYIKGGSGYIPEAPRDGQAYVRKDGEWVLLSTFL

SEQ ID NO: 13727 - protein, 1241 aa, Artificial Sequence
  SARS-CoV-2/Shenzhen/SZTH-004/2020__EPI_ISL_406595 spike protein (1-1211)(N914C_S1123C) Foldon construct
MFVFLVLLPLVSSQCVNLTTRTQLPPAYTNSFTRGVYYPDKVFRSSVLHSTQDLFLPFFSNVTWFHAIHVSGTNGTKRFDNPVLPFNDGVYFASTEKSNIIRGWIFGTTLDSKTQSLLIVNNATNVVIKVCEFQFCNDPFLGVYYHKNNKSWMESEFRVYSSANNCTFEYVSQPFLMDLEGKQGNFKNLREFVFKNIDGYFKIYSKHTPINLVRDLPQGFSALEPLVDLPIGINITRFQTLLALHRSYLTPGDSSSGWTAGAAAYYVGYLQPRTFLLKYNENGTITDAVDCALDPLSETKCTLKSFTVEKGIYQTSNFRVQPTESIVRFPNITNLCPFGEVFNATRFASVYAWDRKRISNCVAYYSVLYNSASFSTFKCYGVSPTKLNDLCFTNVYADSFVIRGDEVRQIAPGQTGKIADYNYKLPDDFTGCVIAWNSNNLDSKVGGNYNYLYRLFRKSNLKPFERDISTEIYQAGSTPCNGVEGFNCYFPLQSYGFQPTNGVGYQPYRVVVLSFELLHAPATVCGPKKSTNLVKNKCVNFNFNGLTGTGVLTESNKKFLPFQQFGRDIADTTDAVRDPQTLEILDITPCSFGGVSVITPGTNTSNQVAVLYQDVNCTEVPVAIHADQLTPTWRVYSTGSNVFQTRAGCLIGAEHVNNSYECDIPIGAGICASYQTQTNSPRRARSVASQSIIAYTMSLGAENSVAYSNNSIAIPTNFTISVTTEILPVSMTKTSVDCTMYICGDSTECSNLLLQYGSFCTQLNRALTGIAVEQDKNTQEVFAQVKQIYKTPPIKDFGGFNFSQILPDPSKPSKRSFIEDLLFNKVTLADAGFIKQYGDCLGDIAARDLICAQKFNGLTVLPPLLTDEMIAQYTSALLAGTITSGWTFGAGAALQIPFAMQMAYRFNGIGVTQCVLYENQKLIANQFNSAIGKIQDSLSSTASALGKLQDVVNQNAQALNTLVKQLSSNFGAISSVLNDILSRLDKVEAEVQIDRLITGRLQSLQTYVTQQLIRAAEIRASANLAATKMSECVLGQSKRVDFCGKGYHLMSFPQSAPHGVVFLHVTYVPAQEKNFTTAPAICHDGKAHFPREGVFVSNGTHWFVTQRNFYEPQIITTDNTFVCGNCDVVIGIVNNTVYDPLQPELDSFKEELDKYFKNHTSPDVDLGDISGINASVVNIQKEIDRLNEVAKNLNESLIDLQELGKYEQYIKGGSGYIPEAPRDGQAYVRKDGEWVLLSTFL

SEQ ID NO: 13728 - protein, 1241 aa, Artificial Sequence
  SARS-CoV-2/France/IDF0372/2020__EPI_ISL_406596 spike protein (1-1211)(N914C_S1123C) Foldon construct
MFVFLVLLPLVSSQCVNLTTRTQLPPAYTNSFTRGVYYPDKVFRSSVLHSTQDLFLPFFSNVTWFHAIHVSGTNGTKRFDNPVLPFNDGVYFASTEKSNIIRGWIFGTTLDSKTQSLLIVNNATNVVIKVCEFQFCNDPFLGVYYHKNNKSWMESEFRVYSSANNCTFEYVSQPFLMDLEGKQGNFKNLREFVFKNIDGYFKIYSKHTPINLVRDLPQGFSALEPLVDLPIGINITRFQTLLALHRSYLTPGDSSSGWTAGAAAYYVGYLQPRTFLLKYNENGTITDAVDCALDPLSETKCTLKSFTVEKGIYQTSNFRVQPTESIVRFPNITNLCPFGEVFNATRFASVYAWNRKRISNCVADYSFLYNSASFSTFKCYGVSPTKLNDLCFTNVYADSFVIRGDEVRQIAPGQTGKIADYNYKLPDDFTGCVIAWNSNNLDSKVGGNYNYLYRLFRKSNLKPFERDISTEIYQAGSTPCNGVEGFNCYFPLQSYGFQPTNGVGYQPYRVVVLSFELLHAPATVCGPKKSTNLVKNKCVNFNFNGLTGTGVLTESNKKFLPFQQFGRDIADTTDAVRDPQTLEILDITPCSFGGVSVITPGTNTSNQVAVLYQDVNCTEVPVAIHADQLTPTWRVYSTGSNVFQTRAGCLIGAEHVNNSYECDIPIGAGICASYQTQTNSPRRARSVASQSIIAYTMSLGAENSVAYSNNSIAIPTNFTISVTTEILPVSMTKTSVDCTMYICGDSTECSNLLLQYGSFCTQLNRALTGIAVEQDKNTQEVFAQVKQIYKTPPIKDFGGFNFSQILPDPSKPSKRSFIEDLLFNKVTLADAGFIKQYGDCLGDIAARDLICAQKFNGLTVLPPLLTDEMIAQYTSALLAGTITSGWTFGAGAALQIPFAMQMAYRFNGIGVTQCVLYENQKLIANQFNSAIGKIQDSLSSTASALGKLQDVVNQNAQALNTLVKQLSSNFGAISSVLNDILSRLDKVEAEVQIDRLITGRLQSLQTYVTQQLIRAAEIRASANLAATKMSECVLGQSKRVDFCGKGYHLMSFPQSAPHGVVFLHVTYVPAQEKNFTTAPAICHDGKAHFPREGVFVSNGTHWFVTQRNFYEPQIITTDNTFVCGNCDVVIGIVNNTVYDPLQPELDSFKEELDKYFKNHTSPDVDLGDISGINASVVNIQKEIDRLNEVAKNLNESLIDLQELGKYEQYIKGGSGYIPEAPRDGQAYVRKDGEWVLLSTFL

SEQ ID NO: 13729 - protein, 1241 aa, Artificial Sequence
  SARS-CoV-2/Australia/VIC01/2020__EPI_ISL_406844 spike protein (1-1211)(N914C_S1123C) Foldon construct
MFVFLVLLPLVSSQCVNLTTRTQLPPAYTNSFTRGVYYPDKVFRSSVLHSTQDLFLPFFSNVTWFHAIHVSGTNGTKRFDNPVLPFNDGVYFASTEKSNIIRGWIFGTTLDSKTQSLLIVNNATNVVIKVCEFQFCNDPFLGVYYHKNNKSWMESEFRVYSSANNCTFEYVSQPFLMDLEGKQGNFKNLREFVFKNIDGYFKIYSKHTPINLVRDLPQGFSALEPLVDLPIGINITRFQTLLALHRRYLTPGDSSSGWTAGAAAYYVGYLQPRTFLLKYNENGTITDAVDCALDPLSETKCTLKSFTVEKGIYQTSNFRVQPTESIVRFPNITNLCPFGEVFNATRFASVYAWNRKRISNCVADYSVLYNSASFSTFKCYGVSPTKLNDLCFTNVYADSFVIRGDEVRQIAPGQTGKIADYNYKLPDDFTGCVIAWNSNNLDSKVGGNYNYLYRLFRKSNLKPFERDISTEIYQAGSTPCNGVEGFNCYFPLQSYGFQPTNGVGYQPYRVVVLSFELLHAPATVCGPKKSTNLVKNKCVNFNFNGLTGTGVLTESNKKFLPFQQFGRDIADTTDAVRDPQTLEILDITPCSFGGVSVITPGTNTSNQVAVLYQDVNCTEVPVAIHADQLTPTWRVYSTGSNVFQTRAGCLIGAEHVNNSYECDIPIGAGICASYQTQTNSPRRARSVASQSIIAYTMSLGAENSVAYSNNSIAIPTNFTISVTTEILPVSMTKTSVDCTMYICGDSTECSNLLLQYGSFCTQLNRALTGIAVEQDKNTQEVFAQVKQIYKTPPIKDFGGFNFSQILPDPSKPSKRSFIEDLLFNKVTLADAGFIKQYGDCLGDIAARDLICAQKFNGLTVLPPLLTDEMIAQYTSALLAGTITSGWTFGAGAALQIPFAMQMAYRFNGIGVTQCVLYENQKLIANQFNSAIGKIQDSLSSTASALGKLQDVVNQNAQALNTLVKQLSSNFGAISSVLNDILSRLDKVEAEVQIDRLITGRLQSLQTYVTQQLIRAAEIRASANLAATKMSECVLGQSKRVDFCGKGYHLMSFPQSAPHGVVFLHVTYVPAQEKNFTTAPAICHDGKAHFPREGVFVSNGTHWFVTQRNFYEPQIITTDNTFVCGNCDVVIGIVNNTVYDPLQPELDSFKEELDKYFKNHTSPDVDLGDISGINASVVNIQKEIDRLNEVAKNLNESLIDLQELGKYEQYIKGGSGYIPEAPRDGQAYVRKDGEWVLLSTFL

SEQ ID NO: 13730 - protein, 1241 aa, Artificial Sequence
  SARS-CoV-2/Germany/BavPat1/2020__EPI_ISL_406862 spike protein (1-1211)(N914C_S1123C) Foldon construct
MFVFLVLLPLVSSQCVNLTTRTQLPPAYTNSFTRGVYYPDKVFRSSVLHSTQDLFLPFFSNVTWFHAIHVSGTNGTKRFDNPVLPFNDGVYFASTEKSNIIRGWIFGTTLDSKTQSLLIVNNATNVVIKVCEFQFCNDPFLGVYYHKNNKSWMESEFRVYSSANNCTFEYVSQPFLMDLEGKQGNFKNLREFVFKNIDGYFKIYSKHTPINLVRDLPQGFSALEPLVDLPIGINITRFQTLLALHRSYLTPGDSSSGWTAGAAAYYVGYLQPRTFLLKYNENGTITDAVDCALDPLSETKCTLKSFTVEKGIYQTSNFRVQPTESIVRFPNITNLCPFGEVFNATRFASVYAWNRKRISNCVADYSVLYNSASFSTFKCYGVSPTKLNDLCFTNVYADSFVIRGDEVRQIAPGQTGKIADYNYKLPDDFTGCVIAWNSNNLDSKVGGNYNYLYRLFRKSNLKPFERDISTEIYQAGSTPCNGVEGFNCYFPLQSYGFQPTNGVGYQPYRVVVLSFELLHAPATVCGPKKSTNLVKNKCVNFNFNGLTGTGVLTESNKKFLPFQQFGRDIADTTDAVRDPQTLEILDITPCSFGGVSVITPGTNTSNQVAVLYQGVNCTEVPVAIHADQLTPTWRVYSTGSNVFQTRAGCLIGAEHVNNSYECDIPIGAGICASYQTQTNSPRRARSVASQSIIAYTMSLGAENSVAYSNNSIAIPTNFTISVTTEILPVSMTKTSVDCTMYICGDSTECSNLLLQYGSFCTQLNRALTGIAVEQDKNTQEVFAQVKQIYKTPPIKDFGGFNFSQILPDPSKPSKRSFIEDLLFNKVTLADAGFIKQYGDCLGDIAARDLICAQKFNGLTVLPPLLTDEMIAQYTSALLAGTITSGWTFGAGAALQIPFAMQMAYRFNGIGVTQCVLYENQKLIANQFNSAIGKIQDSLSSTASALGKLQDVVNQNAQALNTLVKQLSSNFGAISSVLNDILSRLDKVEAEVQIDRLITGRLQSLQTYVTQQLIRAAEIRASANLAATKMSECVLGQSKRVDFCGKGYHLMSFPQSAPHGVVFLHVTYVPAQEKNFTTAPAICHDGKAHFPREGVFVSNGTHWFVTQRNFYEPQIITTDNTFVCGNCDVVIGIVNNTVYDPLQPELDSFKEELDKYFKNHTSPDVDLGDISGINASVVNIQKEIDRLNEVAKNLNESLIDLQELGKYEQYIKGGSGYIPEAPRDGQAYVRKDGEWVLLSTFL

SEQ ID NO: 13731 - protein, 1241 aa, Artificial Sequence
  SARS-CoV-2/Wuhan/HBCDC-HB-02/2020__EPI_ISL_412978 spike protein (1-1211)(N914C_S1123C) Foldon construct
MFVFLVLLPLVSSQCVNLTTRTQLPPAYTNSFTRGVYYPDKVFRSSVLHSTQDLFLPFFSNVTWFHAIHVSGTNGTKRFDNPVLPFNDGVYFASTEKSNIIRGWIFGTTLDSKTQSLLIVNNATNVVIKVCEFQFCNDPFLGVYYHKNNKSWMESEFRVYSSANNCTFEYVSQPFLMDLEGKQGNFKNLREFVFKNIDGYFKIYSKHTPINLVRDLPQGFSALEPLVDLPIGINITRFQTLLALHRSYLTPGDSSSGWTAGAAAYYVGYLQPRTFLLKYNENGTITDAVDCALDPLSETKCTLKSFTVEKGIYQTSNFRVQPTESIVRFPNITNLCPFGEVFNATRFASVYAWNRKRISNCVADYSVLYNSASFSTFKCYGVSPTKLNDLCFTNVYADSFVIRGDEVRQIAPGQTGKIADYNYKLPDDFTGCVIAWNSNNLDSKVGGNYNYLYRLFRKSNLKPFERDISTEIYQAGSTPCNGVEGFNCYFPLQSYGFQPTNGVGYQPYRVVVLSFELLHAPATVCGPKKSTNLVKNKCVNFNFNGLTGTGVLTESNKKFLPFQQFGRDIADTTDAVRDPQTLEILDITPCSFGGVSVITPGTNTSNQVAVLYQDVNCTEVPVAIHADQLTPTWRVYSTGSNVFQTRAGCLIGAEHVNNSYECDIPIGAGICASYQTQTNSPRRARSVASQSIIAYTMSLGAENSVAYSNNSIAIPTNFTISVTTEILPVSMTKTSVDCTMYICGDSTECSNFLLQYGSFCTQLNRALTGIAVEQDKNTQEVFAQVKQIYKTPPIKDFGGFNFSQILPDPSKPSKRSFIEDLLFNKVTLADAGFIKQYGDCLGDIAARDLICAQKFNGLTVLPPLLTDEMIAQYTSALLAGTITSGWTFGAGAALQIPFAMQMAYRFNGIGVTQCVLYENQKLIANQFNSAIGKIQDSLSSTASALGKLQDVVNQNAQALNTLVKQLSSNFGAISSVLNDILSRLDKVEAEVQIDRLITGRLQSLQTYVTQQLIRAAEIRASANLAATKMSECVLGQSKRVDFCGKGYHLMSFPQSAPHGVVFLHVTYVPAQEKNFTTAPAICHDGKAHFPREGVFVSNGTHWFVTQRNFYEPQIITTDNTFVCGNCDVVIGIVNNTVYDPLQPELDSFKEELDKYFKNHTSPDVDLGDISGINASVVNIQKEIDRLNEVAKNLNESLIDLQELGKYEQYIKGGSGYIPEAPRDGQAYVRKDGEWVLLSTFL

SEQ ID NO: 13732 - protein, 1241 aa, Artificial Sequence
  SARS-CoV-2/Australia/QLD02/2020__EPI_ISL_407896 spike protein (1-1211)(N914C_S1123C) Foldon construct
MFVFLVLLPLVSSQCVNLTTRTQLPPAYTNSFTRGVYYPDKVFRSSVLHSTQDLFLPFFSNVTWFHAIHVSGTNGTKRFDNPVLPFNDGVYFASTEKSNIIRGWIFGTTLDSKTQSLLIVNNATNVVIKVCEFQFCNDPFLGVYYHKNNKSWMESEFRVYSSANNCTFEYVSQPFLMDLEGKQGNFKNLREFVFKNIDGYFKIYSKHTPINLVRDLPQGFSALEPLVDLPIGINITRFQTLLALHRSYLTPGDSSSGWTAGAAAYYVGYLQPRTFLLKYNENGTITDAVDCALDPLSETKCTLKSFTVEKGIYQTSNFRVQPTESIVRFPNITNLCPFGEVFNATRFASVYAWNRKRISNCVADYSVLYNSASFSTFKCYGVSPTKLNDLCFTNVYADSFVIRGDEVRQIAPGQTGKIADYNYKLPDDFTGCVIAWNSNNLDSKVGGNYNYLYRLFRKSNLKPFERDISTEIYQAGSTPCNGVEGFNCYFPLQSYGFQPTNGVGYQPYRVVVLSFELLHAPATVCGPKKSTNLVKNKCVNFNFNGLTGTGVLTESNKKFLPFQQFGRDIADTTDAVRDPQTLEILDITPCSFGGVSVITPGTNTSNQVAVLYQDVNCTEVPVAIHADQLTPTWRVYSTGSNVFQTRAGCLIGAEHVNNSYECDIPIGAGICASYQTQTNSPRRARSVASQSIIAYTMSLGAENSVAYSNNSIAIPTNFTISVTTEILPVSMTKTSVDCTMYICGDSTECSNLLLQYGSFCTQLNRALTGIAVEQDKNTQEVFAQVKQIYKTPPIKDFGGFNFSQILPDPSKPSKRSFIEDLLFNKVTLADAGFIKQYGDCLGDIAARDLICAQKFNGLTVLPPLLTDEMIAQYTSALLAGTITSGWTFGAGAALQIPFAMQMAYRFNGIGVTQCVLYENQKLIANQFNSAIGKIQDSLSSTASALGKLQDVVNQNAQALNTLVKQLSSNFGAISSVLNDILSRLDKVEAEVQIDRLITGRLQSLQTYVTQQLIRAAEIRASANLAATKMSECVLGQSKRVDFCGKGYHLMSFPQSAPHGVVFLHVTYVPAQEKNFTTAPAICHDGKAHFPREGVFVSNGTHWFVTQRNFYEPQIITTDNTFVCGNCDVVIGIVNNTVYDPLQLELDSFKEELDKYFKNHTSPDVDLGDISGINASVVNIQKEIDRLNEVAKNLNESLIDLQELGKYEQYIKGGSGYIPEAPRDGQAYVRKDGEWVLLSTFL

SEQ ID NO: 13733 - protein, 1241 aa, Artificial Sequence
  SARS-CoV-2/India/1-31/2020__EPI_ISL_413523 spike protein (1-1211)(N914C_S1123C) Foldon construct
MFVFLVLLPLVSSQCVNLTTRTQLPPAYTNSFTRGVYYPDKVFRSSVLHSTQDLFLPFFSNVTWFHAIHVSGTNGTKRFDNPVLPFNDGVYFASTEKSNIIRGWIFGTTLDSKTQSLLIVNNATNVVIKVCEFQFCNDPFLGVYYHKNNKSWMESEFRVYSSANNCTFEYVSQPFLMDLEGKQGNFKNLREFVFKNIDGYFKIYSKHTPINLVRDLPQGFSALEPLVDLPIGINITRFQTLLALHRSYLTPGDSSSGWTAGAAAYYVGYLQPRTFLLKYNENGTITDAVDCALDPLSETKCTLKSFTVEKGIYQTSNFRVQPTESIVRFPNITNLCPFGEVFNATRFASVYAWNRKRISNCVADYSVLYNSASFSTFKCYGVSPTKLNDLCFTNVYADSFVIRGDEVRQIAPGQTGKIADYNYKLPDDFTGCVIAWNSNNLDSKVGGNYNYLYRLFRKSNLKPFERDISTEIYQAGSTPCNGVEGFNCYFPLQSYGFQPTNGVGYQPYRVVVLSFELLHAPATVCGPKKSTNLVKNKCVNFNFNGLTGTGVLTESNKKFLPFQQFGRDIADTTDAVRDPQTLEILDITPCSFGGVSVITPGTNTSNQVAVLYQDVNCTEVPVAIHADQLTPTWRVYSTGSNVFQTRAGCLIGAEHVNNSYECDIPIGAGICASYQTQTNSPRRARSVASQSIIAYTMSLGAENSVAYSNNSIAIPTNFTISVTTEILPVSMTKTSVDCTMYICGDSTECSNLLLQYGSFCTQLNRALTGIAVEQDKNTQEVFAQVKQIYKTPPIKDFGGFNFSQILPDPSKPSKRSFIEDLLFNKVTLADAGFIKQYGDCLGDIAARDLICAQKFNGLTVLPPLLTDEMIAQYTSALLAGTITSGWTFGAGAALQIPFAMQMAYRFNGIGVTQCVLYENQKLIANQFNSVIGKIQDSLSSTASALGKLQDVVNQNAQALNTLVKQLSSNFGAISSVLNDILSRLDKVEAEVQIDRLITGRLQSLQTYVTQQLIRAAEIRASANLAATKMSECVLGQSKRVDFCGKGYHLMSFPQSAPHGVVFLHVTYVPAQEKNFTTAPAICHDGKAHFPREGVFVSNGTHWFVTQRNFYEPQIITTDNTFVCGNCDVVIGIVNNTVYDPLQPELDSFKEELDKYFKNHTSPDVDLGDISGINASVVNIQKEIDRLNEVAKNLNESLIDLQELGKYEQYIKGGSGYIPEAPRDGQAYVRKDGEWVLLSTFL

SEQ ID NO: 13734 - protein, 1241 aa, Artificial Sequence
  SARS-CoV-2/Guangdong/GD2020087-P0008/2020__EPI_ISL_413863 spike protein (1-1211)(N914C_S1123C) Foldon construct
MFVFLVLLPLVSSQCVNLTTRTQLPPAYTNSFTRGVYYPDKVFRSSVLHSTQDLFLPFFSNVTWFHAIHVSGTNGTKRFDNPVLPFNDGVYFASTEKSNIIRGWIFGTTLDSKTQSLLIVNNATNVVIKVCEFQFCNDPFLGVYYHKNNKSWMESEFRVYSSANNCTFEYVSQPFLMDLEGKQGNFKNLREFVFKNIDGYFKIYSKHTPINLVRDLPQGFSALEPLVDLPIGINITRFQTLLALHRSYLTPGDSSSGWTAGAAAYYVGYLQPRTFLLKYNENGTITDAVDCALDPLSETKCTLKSFTVEKGIYQTSNFRVQPTESIVRFPNITNLCPFGEVFNATRFASVYAWNRKRISNCVADYSVLYNSASFSTFKCYGVSPTKLNDLCFTNVYADSFVIRGDEVREIAPGQTGKIADYNYKLPDDFTGCVIAWNSNNLDSKVGGNYNYLYRLFRKSNLKPFERDISTEIYQAGSTPCNGVEGFNCYFPLQSYGFQPTNGVGYQPYRVVVLSFELLHAPATVCGPKKSTNLVKNKCVNFNFNGLTGTGVLTESNKKFLPFQQFGRDIADTTDAVRDPQTLEILDITPCSFGGVSVITPGTNTSNQVAVLYQDVNCTEVPVAIHADQLTPTWRVYSTGSNVFQTRAGCLIGAEHVNNSYECDIPIGAGICASYQTQTNSPRRARSVASQSIIAYTMSLGAENSVAYSNNSIAIPTNFTISVTTEILPVSMTKTSVDCTMYICGDSTECSNLLLQYGSFCTQLNRALTGIAVEQDKNTQEVFAQVKQIYKTPPIKDFGGFNFSQILPDPSKPSKRSFIEDLLFNKVTLADAGFIKQYGDCLGDIAARDLICAQKFNGLTVLPPLLTDEMIAQYTSALLAGTITSGWTFGAGAALQIPFAMQMAYRFNGIGVTQCVLYENQKLIANQFNSAIGKIQDSLSSTASALGKLQDVVNQNAQALNTLVKQLSSNFGAISSVLNDILSRLDKVEAEVQIDRLITGRLQSLQTYVTQQLIRAAEIRASANLAATKMSECVLGQSKRVDFCGKGYHLMSFPQSAPHGVVFLHVTYVPAQEKNFTTAPAICHDGKAHFPREGVFVSNGTHWFVTQRNFYEPQIITTDNTFVCGNCDVVIGIVNNTVYDPLQPELDSFKEELDKYFKNHTSPDVDLGDISGINASVVNIQKEIDRLNEVAKNLNESLIDLQELGKYEQYIKGGSGYIPEAPRDGQAYVRKDGEWVLLSTFL

SEQ ID NO: 13735 - protein, 1241 aa, Artificial Sequence
  SARS-CoV-2/Sweden/01/2020__EPI_ISL_411951 spike protein (1-1211)(N914C_S1123C) Foldon construct
MFVFLVLLPLVSSQCVNLTTRTQLPPAYTNSFTRGVYYPDKVFRSSVLHSTQDLFLPFFSNVTWFHAIHVSGTNGTKRFDNPVLPFNDGVYFASTEKSNIIRGWIFGTTLDSKTQSLLIVNNATNVVIKVCEFQFCNDPFLGVYYHKNNKSWMESEFRVYSSANNCTFEYVSQPFLMDLEGKQGNFKNLREFVFKNIDGYFKIYSKHTPINLVRDLPQGFSALEPLVDLPIGINITRFQTLLALHRSYLTPGDSSSGWTAGAAAYYVGYLQPRTFLLKYNENGTITDAVDCALDPLSETKCTLKSFTVEKGIYQTSNFRVQPTESIVRFPNITNLCPFGEVFNATRFASVYAWNRKRISNCVADYSVLYNSASFSTFKCYGVSPTKLNDLCFTNVYADSFVIRGDEVRQIAPGQTGKIADYNYKLPDDFTGCVIAWNSNNLDSKVGGNYNYLYRLFRKSNLKPFERDISTEIYQAGSTPCNGVEGFNCYFPLQSYGFQPTNGVGYQPYRVVVLSFELLHAPATVCGPKKSTNLVKNKCVNFNFNGLTGTGVLTESNKKFLPFQQFGRDIADTTDAVRDPQTLEILDITPCSFGGVSVITPGTNTSNQVAVLYQDVNCTEVPVAIHADQLTPTWRVYSTGSNVFQTRAGCLIGAEHVNNSYECDIPIGAGICASYQTQTNSPRRARSVASQSIIAYTMSLGAENSVAYSNNSIAIPTNFTISVTTEILPVSMTKTSVDCTMYICGDSTECSNLLLQYGSFCTQLNRALTGIAVEQDKNTQEVFAQVKQIYKTPPIKDCGGFNFSQILPDPSKPSKRSFIEDLLFNKVTLADAGFIKQYGDCLGDIAARDLICAQKFNGLTVLPPLLTDEMIAQYTSALLAGTITSGWTFGAGAALQIPFAMQMAYRFNGIGVTQCVLYENQKLIANQFNSAIGKIQDSLSSTASALGKLQDVVNQNAQALNTLVKQLSSNFGAISSVLNDILSRLDKVEAEVQIDRLITGRLQSLQTYVTQQLIRAAEIRASANLAATKMSECVLGQSKRVDFCGKGYHLMSFPQSAPHGVVFLHVTYVPAQEKNFTTAPAICHDGKAHFPREGVFVSNGTHWFVTQRNFYEPQIITTDNTFVCGNCDVVIGIVNNTVYDPLQPELDSFKEELDKYFKNHTSPDVDLGDISGINASVVNIQKEIDRLNEVAKNLNESLIDLQELGKYEQYIKGGSGYIPEAPRDGQAYVRKDGEWVLLSTFL

SEQ ID NO: 13736 - protein, 1241 aa, Artificial Sequence
  SARS-CoV-2/Tianmen/HBCDC-HB-07/2020__EPI_ISL_412983 spike protein (1-1211)(N914C_S1123C) Foldon construct
MFVFLVLLPLVSSQCVNLTTRTQLPPAYTNSFTRGVYYPDKVFRSSVLHSTQDLFLPFFSNVTWFHAIHVSGTNGTKRFDNPVLPFNDGVYFASTEKSNIIRGWIFGTTLDSKTQSLLIVNNATNVVIKVCEFQFCNDPFLGVYYHKNNKSWMESEFRVYSSANNCTFEYVSQPFLMDLEGKQGNFKNLREFVFKNIDGYFKIYSKHTPINLVRDLPQGFSALEPLVDLPIGINITRFQTLLALHRSYLTPGDSSSGWTAGAAAYYVGYLQPRTFLLKYNENGTITDAVDCALDPLSETKCTLKSFTVEKGIYQTSNFRVQPTESIVRFPNITNLCPFGEVFNATRFASVYAWNRKRISNCVADYSVLYNSASFSTFKCYGVSPTKLNDLCFTNVYADSFVIRGDEVRQIAPGQTGKIADYNYKLPDDFTGCVIAWNSNNLDSKVGGNYNYLYRLFRKSNLKPFERDISTEIYQAGSTPCNGVEGFNCYFPLQSYGFQPTNGVGYQPYRVVVLSFELLHAPATVCGPKKSTNLVKNKCVNFNFNGLTGTGVLTESNKKFLPFQQFGRDIADTTDAVRDPQTLEILDITPCSFGGVSVITPGTNTSNQVAVLYQDLNCTEVPVAIHADQLTPTWRVYSTGSNVFQTRAGCLIGAEHVNNSYECDIPIGAGICASYQTQTNSPRRARSVASQSIIAYTMSLGAENSVAYSNNSIAIPTNFTISVTTEILPVSMTKTSVDCTMYICGDSTECSNLLLQYGSFCTQLNRALTGIAVEQDKNTQEVFAQVKQIYKTPPIKDFGGFNFSQILPDPSKPSKRSFIEDLLFNKVTLADAGFIKQYGDCLGDIAARDLICAQKFNGLTVLPPLLTDEMIAQYTSALLAGTITSGWTFGAGAALQIPFAMQMAYRFNGIGVTQCVLYENQKLIANQFNSAIGKIQDSLSSTASALGKLQDVVNQNAQALNTLVKQLSSNFGAISSVLNDILSRLDKVEAEVQIDRLITGRLQSLQTYVTQQLIRAAEIRASANLAATKMSECVLGQSKRVDFCGKGYHLMSFPQSAPHGVVFLHVTYVPAQEKNFTTAPAICHDGKAHFPREGVFVSNGTHWFVTQRNFYEPQIITTDNTFVCGNCDVVIGIVNNTVYDPLQPELDSFKEELDKYFKNHTSPDVDLGDISGINASVVNIQKEIDRLNEVAKNLNESLIDLQELGKYEQYIKGGSGYIPEAPRDGQAYVRKDGEWVLLSTFL

SEQ ID NO: 13737 - protein, 1241 aa, Artificial Sequence
  SARS-CoV-2/Hong Kong/case42_VM20002493/2020__EPI_ISL_414527 spike protein (1-1211)(N914C_S1123C) Foldon construct
MFVFLVLLPLVSSQCVNLTTRTQLPPAYTNSFTRGVYYPDKVFRSSVLHSTQDLFLPFFSNVTWFHAIHVSGTNGTKRFDNPVLPFNDGVYFASTEKSNIIRGWIFGTTLDSKTQSLLIVNNATNVVIKVCEFQFCNDPFLGVYYHKNNKSWMESEFRVYSSANNCTFEYVSQPFLMDLEGKQGNFKNLREFVFKNIDGYFKIYSKHTPINLVRDLPQGFSALEPLVDLPIGINITRFQTLLALHRSYLTPGDSSSGWTAGAAAYYVGYLQPRTFLLKYNENGTITDAVDCALDPLSETKCTLKSFTVEKGIYQTSNFRVQPTESIVRFPNITNLCPFGEVFNATRFASVYAWNRKRISNCVADYSVLYNSASFSTFKCYGVSPTKLNDLCFTNVYADSFVIRGDEVRQIAPGQTGKIADYNYKLPDDFTGCVIAWNSNNLDSKVGGNYNYLYRLFRKSNLKPFERDISTEIYQAGSTPCNGVEGFNCYFPLQSYGFQPTNGVGYQPYRVVVLSFELLHAPATVCGPKKSTNLVKNKCVNFNFNGLTGTGVLTESNKKFLPFQQFGRDIADTTDAVRDPQTLEILDITPCSFGGVSVITPGTNTSNQVAVLYQDVNCTEVPVAIHADQLTPTWRVYSTGSNVFQTRAGCLIGAEHVNNSYECDIPIGAGICASYQTQTNSPRRARSVASQSIIAYTMSLGAENSVAYSNNSIAIPTNFAISVTTEILPVSMTKTSVDCTMYICGDSTECSNLLLQYGSFCTQLNRALTGIAVEQDKNTQEVFAQVKQIYKTPPIKDFGGFNFSQILPDPSKPSKRSFIEDLLFNKVTLADAGFIKQYGDCLGDIAARDLICAQKFNGLTVLPPLLTDEMIAQYTSALLAGTITSGWTFGAGAALQIPFAMQMAYRFNGIGVTQCVLYENQKLIANQFNSAIGKIQDSLSSTASALGKLQDVVNQNAQALNTLVKQLSSNFGAISSVLNDILSRLDKVEAEVQIDRLITGRLQSLQTYVTQQLIRAAEIRASANLAATKMSECVLGQSKRVDFCGKGYHLMSFPQSAPHGVVFLHVTYVPAQEKNFTTAPAICHDGKAHFPREGVFVSNGTHWFVTQRNFYEPQIITTDNTFVCGNCDVVIGIVNNTVYDPLQPELDSFKEELDKYFKNHTSPDVDLGDISGINASVVNIQKEIDRLNEVAKNLNESLIDLQELGKYEQYIKGGSGYIPEAPRDGQAYVRKDGEWVLLSTFL

SEQ ID NO: 13738 - protein, 1241 aa, Artificial Sequence
  SARS-CoV-2/USA/CruiseA-23/2020__EPI_ISL_414482 spike protein (1-1211)(N914C_S1123C) Foldon construct
MFVFLVLLPLVSSQCVNLTTRTQLPPAYTNSFTRGVYYPDKVFRSSVLHSTQDLFLPFFSNVTWFHAIHVSGTNGTKRFDNPVLPFNDGVYFASTEKSNIIRGWIFGTTLDSKTQSLLIVNNATNVVIKVCEFQFCNDPFLGVYYHKNNKSWMESEFRVYSSANNCTFEYVSQPFLMDLEVKQGNFKNLREFVFKNIDGYFKIYSKHTPINLVRDLPQGFSALEPLVDLPIGINITRFQTLLALHRSYLTPGDSSSGWTAGAAAYYVGYLQPRTFLLKYNENGTITDAVDCALDPLSETKCTLKSFTVEKGIYQTSNFRVQPTESIVRFPNITNLCPFGEVFNATRFASVYAWNRKRISNCVADYSVLYNSASFSTFKCYGVSPTKLNDLCFTNVYADSFVIRGDEVRQIAPGQTGKIADYNYKLPDDFTGCVIAWNSNNLDSKVGGNYNYLYRLFRKSNLKPFERDISTEIYQAGSTPCNGVEGFNCYFPLQSYGFQPTNGVGYQPYRVVVLSFELLHAPATVCGPKKSTNLVKNKCVNFNFNGLTGTGVLTESNKKFLPFQQFGRDIADTTDAVRDPQTLEILDITPCSFGGVSVITPGTNTSNQVAVLYQDVNCTEVPVAIHADQLTPTWRVYSTGSNVFQTRAGCLIGAEHVNNSYECDIPIGAGICASYQTQTNSPRRARSVASQSIIAYTMSLGAENSVAYSNNSIAIPTNFTISVTTEILPVSMTKTSVDCTMYICGDSTECSNLLLQYGSFCTQLNRALTGIAVEQDKNTQEVFAQVKQIYKTPPIKDFGGFNFSQILPDPSKPSKRSFIEDLLFNKVTLADAGFIKQYGDCLGDIAARDLICAQKFNGLTVLPPLLTDEMIAQYTSALLAGTITSGWTFGAGAALQIPFAMQMAYRFNGIGVTQCVLYENQKLIANQFNSAIGKIQDSLSSTASALGKLQDVVNQNAQALNTLVKQLSSNFGAISSVLNDILSRLDKVEAEVQIDRLITGRLQSLQTYVTQQLIRAAEIRASANLAATKMSECVLGQSKRVDFCGKGYHLMSFPQSAPHGVVFLHVTYVPAQEKNFTTAPAICHDGKAHFPREGVFVSNGTHWFVTQRNFYEPQIITTDNTFVCGNCDVVIGIVNNTVYDPLQPELDSFKEELDKYFKNHTSPDVDLGDISGINASVVNIQKEIDRLNEVAKNLNESLIDLQELGKYEQYIKGGSGYIPEAPRDGQAYVRKDGEWVLLSTFL

SEQ ID NO: 13739 - protein, 1241 aa, Artificial Sequence
  SARS-CoV-2/Hong Kong/case85_VM20002868/2020__EPI_ISL_414519 spike protein (1-1211)(N914C_S1123C) Foldon construct
MFVFLVLVPLVSSQCVNLTTRTQLPPAYTNSFTRGVYYPDKVFRSSVLHSTQDLFLPFFSNVTWFHAIHVSGTNGTKRFDNPVLPFNDGVYFASTEKSNIIRGWIFGTTLDSKTQSLLIVNNATNVVIKVCEFQFCNDPFLGVYYHKNNKSWMESEFRVYSSANNCTFEYVSQPFLMDLEGKQGNFKNLREFVFKNIDGYFKIYSKHTPINLVRDLPQGFSALEPLVDLPIGINITRFQTLLALHRSYLTPGDSSSGWTAGAAAYYVGYLQPRTFLLKYNENGTITDAVDCALDPLSETKCTLKSFTVEKGIYQTSNFRVQPTESIVRFPNITNLCPFGEVFNATRFASVYAWNRKRISNCVADYSVLYNSASFSTFKCYGVSPTKLNDLCFTNVYADSFVIRGDEVRQIAPGQTGKIADYNYKLPDDFTGCVIAWNSNNLDSKVGGNYNYLYRLFRKSNLKPFERDISTEIYQAGSTPCNGVEGFNCYFPLQSYGFQPTNGVGYQPYRVVVLSFELLHAPATVCGPKKSTNLVKNKCVNFNFNGLTGTGVLTESNKKFLPFQQFGRDIADTTDAVRDPQTLEILDITPCSFGGVSVITPGTNTSNQVAVLYQDVNCTEVPVAIHADQLTPTWRVYSTGSNVFQTRAGCLIGAEHVNNSYECDIPIGAGICASYQTQTNSPRRARSVASQSIIAYTMSLGAENSVAYSNNSIAIPTNFTISVTTEILPVSMTKTSVDCTMYICGDSTECSNLLLQYGSFCTQLNRALTGIAVEQDKNTQEVFAQVKQIYKTPPIKDFGGFNFSQILPDPSKPSKRSFIEDLLFNKVTLADAGFIKQYGDCLGDIAARDLICAQKFNGLTVLPPLLTDEMIAQYTSALLAGTITSGWTFGAGAALQIPFAMQMAYRFNGIGVTQCVLYENQKLIANQFNSAIGKIQDSLSSTASALGKLQDVVNQNAQALNTLVKQLSSNFGAISSVLNDILSRLDKVEAEVQIDRLITGRLQSLQTYVTQQLIRAAEIRASANLAATKMSECVLGQSKRVDFCGKGYHLMSFPQSAPHGVVFLHVTYVPAQEKNFTTAPAICHDGKAHFPREGVFVSNGTHWFVTQRNFYEPQIITTDNTFVCGNCDVVIGIVNNTVYDPLQPELDSFKEELDKYFKNHTSPDVDLGDISGINASVVNIQKEIDRLNEVAKNLNESLIDLQELGKYEQYIKGGSGYIPEAPRDGQAYVRKDGEWVLLSTFL

SEQ ID NO: 13740 - protein, 1241 aa, Artificial Sequence; identical to SEQ ID NO: 13730
  SARS-CoV-2/England/200990660/2020__EPI_ISL_414523 spike protein (1-1211)(N914C_S1123C) Foldon construct

SEQ ID NO: 13741 - protein, 1241 aa, Artificial Sequence
  SARS-CoV-2/Australia/NSW09/2020__EPI_ISL_413595 spike protein (1-1211)(N914C_S1123C) Foldon construct
MFVFLVLLPLVSSQCVNLTTRTQLPPAYTNSFTRGVYYPDKVFRSSVLHSTQDLFLPFFSNVTWFHAIHVSGTNGTKRFDNPVLPFNDGVYFASTEKSNIIRGWIFGTTLDSKTQSLLIVNNATNVVIKVCEFQFCNDPFLGVYYHKNNKSWMESEFRVYSSANNCTFEYVSQPFLMDLEGKQGNFKNLREFVFKNIDGYFKIYSKHTPINLVRDLPQGFSALEPLVDLPIGINITRFQTLLALHRSYLTPGDSSSGWTAGAAAYYVGYLQPRTFLLKYNENGTITDAVDCALDPLSETKCTLKSFTVEKGIYQTSNFRVQPTESIVRFPNITNLCPFGEVFNATRFASVYAWNRKRISNCVADYSVLYNSASFSTFKCYGVSPTKLNDLCFTNVYADSFVIRGDEVRQIAPGQTGKIADYNYKLPDDFTGCVIAWNSNNLDSKVGGNYNYLYRLFRKSNLKPFERDISTEIYQAGSTPCNGVEGFNCYFPLQSYGFQPTNGVGYQPYRVVVLSFELLHAPATVCGPKKSTNLVKNKCVNFNFNGLTGTGVLTESNKKFLPFQQFGRDIADTTDAVRDPQTLEILDITPCSFGGVSVITPGTNTSNQVAVLYQDVNCTEVPVAIHADQLTPTWRVYSTGSNVFQTRAGCLIGAEHVNNSYECDIPIGAGICASYQTQTNSPRRARSVASQSIIAYTMSLGAENSVAYSNNSIAIPTNFTISVTTEILPVSMTKTSVDCTMYICGDSTECSNLLLQYGSFCTQLNRALTGIAVEQDKNTQEVFAQVKQIYKTPPIKDFGGFNFSQILPDPSKPSKRSFIEDLLFNKVTLADAGFIKQYGDCLGDIAARDLICAQKFNGLTVLPPLLTDEMIAQYTSALLAGTITSGWTFGAGAALQIPFAMQMAYRFNGIGVTQCVLYENQKLIANQFNSAIGKIQDSLSFTASALGKLQDVVNQNAQALNTLVKQLSSNFGAISSVLNDILSRLDKVEAEVQIDRLITGRLQSLQTYVTQQLIRAAEIRASANLAATKMSECVLGQSKRVDFCGKGYHLMSFPQSAPHGVVFLHVTYVPAQEKNFTTAPAICHDGKAHFPREGVFVSNGTHWFVTQRNFYEPQIITTDNTFVCGNCDVVIGIVNNTVYDPLQPELDSFKEELDKYFKNHTSPDVDLGDISGINASVVNIQKEIDRLNEVAKNLNESLIDLQELGKYEQYIKGGSGYIPEAPRDGQAYVRKDGEWVLLSTFL

SEQ ID NO: 13742 - protein, 1241 aa, Artificial Sequence; identical to SEQ ID NO: 13722
  SARS-CoV-2/Australia/NSW10/2020__EPI_ISL_413596 spike protein (1-1211)(N914C_S1123C) Foldon construct

SEQ ID NO: 13743 - protein, 1241 aa, Artificial Sequence
  SARS-CoV-2/Switzerland/1000477797/2020__EPI_ISL_413023 spike protein (1-1211)(N914C_S1123C) Foldon construct
MFVFLVLLPLVSSQCVNLTTRTQLPPAYTNSFTRGVYYPDKVFRSSVLHSTQDLFLPFFSNVTWFHAIHVSGTNGTKRFDNPVLPFNDGVYFASTEKSNIIRGWIFGTTLDSKTQSLLIVNNATNVVIKVCEFQFCNDPFLGVYYHKNNKSWMESEFRVYSSANNCTFEYVSQPFLMDLEGKQGNFKNLREFVFKNIDGYFNIYSKHTPINLVRDLPQGFSALEPLVDLPIGINITRFQTLLALHRSYLTPGDSSSGWTAGAAAYYVGYLQPRTFLLKYNENGTITDAVDCALDPLSETKCTLKSFTVEKGIYQTSNFRVQPTESIVRFPNITNLCPFGEVFNATRFASVYAWNRKRISNCVADYSVLYNSASFSTFKCYGVSPTKLNDLCFTNVYADSFVIRGDEVRQIAPGQTGKIADYNYKLPDDFTGCVIAWNSNNLDSKVGGNYNYLYRLFRKSNLKPFERDISTEIYQAGSTPCNGVEGFNCYFPLQSYGFQPTNGVGYQPYRVVVLSFELLHAPATVCGPKKSTNLVKNKCVNFNFNGLTGTGVLTESNKKFLPFQQFGRDIADTTDAVRDPQTLEILDITPCSFGGVSVITPGTNTSNQVAVLYQGVNCTEVPVAIHADQLTPTWRVYSTGSNVFQTRAGCLIGAEHVNNSYECDIPIGAGICASYQTQTNSPRRARSVASQSIIAYTMSLGAENSVAYSNNSIAIPTNFTISVTTEILPVSMTKTSVDCTMYICGDSTECSNLLLQYGSFCTQLNRALTGIAVEQDKNTQEVFAQVKQIYKTPPIKDFGGFNFSQILPDPSKPSKRSFIEDLLFNKVTLADAGFIKQYGDCLGDIAARDLICAQKFNGLTVLPPLLTDEMIAQYTSALLAGTITSGWTFGAGAALQIPFAMQMAYRFNGIGVTQCVLYENQKLIANQFNSAIGKIQDSLSSTASALGKLQDVVNQNAQALNTLVKQLSSNFGAISSVLNDILSRLDKVEAEVQIDRLITGRLQSLQTYVTQQLIRAAEIRASANLAATKMSECVLGQSKRVDFCGKGYHLMSFPQSAPHGVVFLHVTYVPAQEKNFTTAPAICHDGKAHFPREGVFVSNGTHWFVTQRNFYEPQIITTDNTFVCGNCDVVIGIVNNTVYDPLQPELDSFKEELDKYFKNHTSPDVDLGDISGINASVVNIQKEIDRLNEVAKNLNESLIDLQELGKYEQYIKGGSGYIPEAPRDGQAYVRKDGEWVLLSTFL

SEQ ID NO: 13744 - protein, 1241 aa, Artificial Sequence
  SARS-CoV-2/Belgium/BA-02291/2020__EPI_ISL_415159 spike protein (1-1211)(N914C_S1123C) Foldon construct
MFVFLVLLPLVSSQCVNLTTRTQLPPAYTNSFTRGVYYPDKVFRSSVLHSTQDLFLPFFSNVTWFHAIHVSGTNGTKRFDNPVLPFNDGVYFASTEKSNIIRGWIFGTTLDSKTQSLLIVNNATNVVIKVCEFQFCNDPFLGVYYHKNNKSWMESEFRVYSSANNCTFEYVSQPFLMDLEGKQGNFKNLREFVFKNIDGYFKIYSKHTPINLVRDLPQGFSALEPLVDLPIGINITRFQTLLALHRSYLTPGDSSSGWTAGAAAYYVGYLQPRTFLLKYNENGTITDAVDCALDPLSETKCTLKSFTVEKGIYQTSNFRVQPTESIVRFPNITNLCPFGEVFNATRFASVYAWNRKRISNCVADYSVLYNSASFSTFKCYGVSPTKLNDLCFTNVYADSFVIRGDEVRQIAPGQTGKIADYNYKLPDDFTGCVIAWNSNNLDSKVGGNYNYLYRLFRRSNLKPFERDISTEIYQAGSTPCNGVEGFNCYFPLQSYGFQPTNGVGYQPYRVVVLSFELLPAPATVCGPKKSTNLVKNKCVNFNFNGLTGTGVLTESNKKFLPFQQFGRDIADTTDAVRDPQTLEILDITPCSFGGVSVITPGTNTSNQVAVLYQGVNCTEVPVAIHADQLTPTWRVYSTGSNVFQTRAGCLIGAEHVNNSYECDIPIGAGICASYQTQTNSPRRARSVASQSIIAYTMSLGAENSVAYSNNSIAIPTNFTISVTTEILPVSMTKTSVDCTMYICGDSTECSNLLLQYGSFCTQLNRALTGIAVEQDKNTQEVFAQVKQIYKTPPIKDFGGFNFSQILPDPSKPSKRSFIEDLLFNKVTLADAGFIKQYGDCLGDIAARDLICAQKFNGLTVLPPLLTDEMIAQYTSALLAGTITSGWTFGAGAALQIPFAMQMAYRFNGIGVTQCVLYENQKLIANQFNSAIGKIQDSLSSAAPALGKLQDVVNQNAQALNTLVKQLSSNFGAISSVLNDILSRLDKVEAEVQIDRLITGRLQSLQTYVTQQLIRAAEIRASANLAATKMSECVLGQSKRVDFCGKGYHLMSFPQSAPHGVVFLHVTYVPAQEKNFTTAPAICHDGKAHFPREGVFVSNGTHWFVTQRNFYEPQIITTDNTFVCGNCDVVIGIVNNTVYDPLQPELDSFKEELDKYFKNHTSPDVDLGDISGINASVVNIQKEIDRLNEVAKNLNESLIDLQELGKYEQYIKGGSGYIPEAPRDGQAYVRKDGEWVLLSTFL

SEQ ID NO: 13745 - protein, 1241 aa, Artificial Sequence
  SARS-CoV-2/USA/WA8-UW5/2020__EPI_ISL_413486 spike protein (1-1211)(N914C_S1123C) Foldon construct
MFVFLVLLPLVSSQCVNLTTRTQLPPAYTNSFTRGVYYPDKVFRSSVLHSTQDLFLPFFSNVTWFHAIHVSGTNGTKRFDNPVLPFNDGVYFASTEKSNIIRGWIFGTTLDSKTQSLLIVNNATNVVIKVCEFQFCNDPFLGVYYHKNNKSWMESEFRVYSSANNCTFEYVSQPFLMDLEGKQGNFKNLREFVFKNIDGYFKIYSKHTPINLVRDLPQGFSALEPLVDLPIGINITRFQTLLALHRSYLTPGDSSSGWTAGAAAYYVGYLQPRTFLLKYNENGTITDAVDCALDPLSETKCTLKSFTVEKGIYQTSNFRVQPTESIVRFPNITNLCPFGEVFNATRFASVYAWNRKRISNCVADYSVLYNSASFSTFKCYGVSPTKLNDLCFTNVYADSFVIRGDEVRQIAPGQTGKIADYNYKLPDDFTGCVIAWNSNNLDSKVGGNYNYLYRLFRKSNLKPFERDISTEIYQAGSTPCNGVEGFNCYFPLQSYGFQPTNGVGYQPYRVVVLSFELLHAPATVCGPKKSTNLVKNKCVNFNFNGLTGTGVLTESNKKFLPFQQFGRDIADTTDAVRDPQTLEILDITPCSFGGVSVITPGTNTSNQVAVLYQDVNCTEVPVAIHADQLTPTWRVYSTGSNVFQTRAGCLIGAEYVNNSYECDIPIGAGICASYQTQTNSPRRARSVASQSIIAYTMSLGAENSVAYSNNSIAIPTNFTISVTTEILPVSMTKTSVDCTMYICGDSTECSNLLLQYGSFCTQLNRALTGIAVEQDKNTQEVFAQVKQIYKTPPIKDFGGFNFSQILPDPSKPSKRSFIEDLLFNKVTLADAGFIKQYGDCLGDIAARDLICAQKFNGLTVLPPLLTDEMIAQYTSALLAGTITSGWTFGAGAALQIPFAMQMAYRFNGIGVTQCVLYENQKLIANQFNSAIGKIQDSLSSTASALGKLQDVVNQNAQALNTLVKQLSSNFGAISSVLNDILSRLDKVEAEVQIDRLITGRLQSLQTYVTQQLIRAAEIRASANLAATKMSECVLGQSKRVDFCGKGYHLMSFPQSAPHGVVFLHVTYVPAQEKNFTTAPAICHDGKAHFPREGVFVSNGTHWFVTQRNFYEPQIITTDNTFVCGNCDVVIGIVNNTVYDPLQPELDSFKEELDKYFKNHTSPDVDLGDISGINASVVNIQKEIDRLNEVAKNLNESLIDLQELGKYEQYIKGGSGYIPEAPRDGQAYVRKDGEWVLLSTFL

SEQ ID NO: 13746 - protein, 1241 aa, Artificial Sequence
  SARS-CoV-2/England/20102000506/2020__EPI_ISL_415147 spike protein (1-1211)(N914C_S1123C) Foldon construct
MFVFLVLLPLVSSQCVNLTTRTQLPPAYTNSFTRGVYYPDKVFRSSVLHSTQDLFLPFFSNVTWFHAIHVSGTNGTKRFDNPVLPFNDGVYFASTEKSNIIRGWIFGTTLDSKTQSLLIVNNATNVVIKVCEFQFCNDPFLGVYYHKNNKSWMESEFRVYSSANNCTFEYVSQPFLMDLEGKQGNFKNLREFVFKNIDGYFKIYSKHTPINLVRDLPQGFSALEPLVDLPIGINITRFQTLLALHRSYLTPGDSSSGWTAGAAAYYVGYLQPRTFLLKYNENGTITDAVDCALDPLSETKCTLKSFTVEKGIYQTSNFRVQPTESIVRFPNITNLCPFGEVFNATRFASVYAWNRKRISNCVADYSVLYNSASFSTFKCYGVSPTKLNDLCFTNVYADSFVIRGDEVRQIAPGQTGKIADYNYKLPDDFTGCVIAWNSNNLDSKVGGNYNYLYRLFRKSNLKPFERDISTEIYQAGSTPCNGVEGFNCYFPLQSYGFQPTNGVGYQPYRVVVLSFELLHAPATVCGPKKSTNLVKNKCVNFNFNGLTGTGVLTESNKKFLPFQQFGRDIADTTDAVRDPQTLEILDITPCSFGGVSVITPGTNTSNQVAVLYQGVNCTEVPVAIHADQLTPTWRVYSTGSNVFQTRAGCLIGAEHVNNSYECDIPIGAGICASYQTQTNSPRRARSVASQSIIAYTMSLGAENSVAYSNNSIAIPTNFTISVTTEILPVSMTKTSVDCTMYICGDSTECSNLLLQYGSFCTQLNRALTGIAVEQDKNTQEVFAQVKQIYKTPPIKDFGGFNFSQILPDPSKPSKRSFIEDLLFNKVTLADAGFIKQYGYCLGDIAARDLICAQKFNGLTVLPPLLTDEMIAQYTSALLAGTITSGWTFGAGAALQIPFAMQMAYRFNGIGVTQCVLYENQKLIANQFNSAIGKIQDSLSSTASALGKLQDVVNQNAQALNTLVKQLSSNFGAISSVLNDILSRLDKVEAEVQIDRLITGRLQSLQTYVTQQLIRAAEIRASANLAATKMSECVLGQSKRVDFCGKGYHLMSFPQSAPHGVVFLHVTYVPAQEKNFTTAPAICHDGKAHFPREGVFVSNGTHWFVTQRNFYEPQIITTDNTFVCGNCDVVIGIVNNTVYDPLQPELDSFKEELDKYFKNHTSPDVDLGDISGINASVVNIQKEIDRLNEVAKNLNESLIDLQELGKYEQYIKGGSGYIPEAPRDGQAYVRKDGEWVLLSTFL

SEQ ID NO: 13747 - protein, 1241 aa, Artificial Sequence
  SARS-CoV-2/Belgium/VAG-03013/2020__EPI_ISL_415155 spike protein (1-1211)(N914C_S1123C) Foldon construct
MFVFLVLLPLVSSQCVNLTTRTQLPPAYTNSFTRGVYYPDKVFRSSVLHSTQDLFLPFFSNVTWFHAIHVSGTNGTKRFDNPVLPFNDGVYFASTEKSNIIRGWIFGTTLDSKTQSLLIVNNATNVVIKVCEFQFCNDPFLGVYYHKNNKSWMESEFRVYSSANNCTFEYVSQPFLMDLEGKQGNFKNLREFVFKNIDGYFKIYSKHTPINLVRDLPQGFSALEPLVDLPIGINITRFQTLLALHRSYLTPGDSSSGWTAGAAAYYVGYLQPRTFLLKYNENGTITDAVDCALDPLSETKCTLKSFTVEKGIYQTSNFRVQPTESIVRFPNITNLCPFGEVFNATRFASVYAWNRKRISNCVADYSVLYNSASFSTFKCYGVSPTKLNDLCFTNVYADSFVIRGDEVRQIAPGQTGKIADYNYKLPDDFTGCVIAWNSNNLDSKVGGNYNYLYRLFRKSNLKPFERDISTEIYQAGSTPCNGVEGFNCYFPLQSYGFQPTNGVGYQPYRVVVLSFELLHAPATVCGPKKSTNLVKNKCVNFNFNGLTGTGVLTESNKKFLPFQQFGRDIADTTDAVRDPQTLEILDITPCSFGGVSVITPGTNTSNQVAVLYQGVNCTEVPVAIHADQLTPTWRVYSTGSNVFQTRAGCLIGAEHVNNSYECDIPIGAGICASYQTQTNSPRRARSVASQSIIAYTMSLGAENSVAYSNNSIAIPTNFTISVTTEILPVSMTKTSVDCTMYICGDSTECSNLLLQYGSFCTQLNRALTGIAVEQDKNTQEVFAQVKQIYKTPPIKDFGGFNFSQILPDPSKPSKRSFIEDLLFNKVTLADAGFIKQYGDCLGDIAARDLICAQKFNGLTVLPPLLTDEMIAQYTSALLAGTITSGWTFGAGAALQIPFAMQMAYRFNGIGVTQCVLYENQKLIANQFNSAIGKIQDSLSSTATALGKLQDVVNQNAQALNTLVKQLSSNFGAISSVLNDILSRLDKVEAEVQIDRLITGRLQSLQTYVTQQLIRAAEIRASANLAATKMSECVLGQSKRVDFCGKGYHLMSFPQSAPHGVVFLHVTYVPAQEKNFTTAPAICHDGKAHFPREGVFVSNGTHWFVTQRNFYEPQIITTDNTFVCGNCDVVIGIVNNTVYDPLQPELDSFKEELDKYFKNHTSPDVDLGDISGINASVVNIQKEIDRLNEVAKNLNESLIDLQELGKYEQYIKGGSGYIPEAPRDGQAYVRKDGEWVLLSTFL

SEQ ID NO: 13748 - protein, 1241 aa, Artificial Sequence
  SARS-CoV-2/Belgium/BC-03016/2020__EPI_ISL_415157 spike protein (1-1211)(N914C_S1123C) Foldon construct
MFVFLVLLPLVSSQCVNLTTRTQLPPAYTNSFTRGVYYPDKVFRSSVLHSTQDLFLPFFSNVTWFHAIHVSGTNGTKRFDNPVLPFNDGVYFASTEKSNIIRGWIFGTTLDSKTQSLLIVNNATNVVIKVCEFQFCNDPFLGVYYHKNNKSWMESEFRVYSSANNCTFEYVSQPFLMDLEGKQGNFKNLREFVFKNIDGYFKIYSKHTPINLVRDLPQGFSALEPLVDLPIGINITRFQTLLALHRSYLTPGDSSSGWTAGAAAYYVGYLQPRTFLLKYNENGTITDAVDCALDPLSETKCTLKSFTVEKGIYQTSNFRVQPTESIVRFPNITNLCPFGEVFNATRFASVYAWNRKRISNCVADYSVLYNSASFSTFKCYGVSPTKLNDLCFTNVYADSFVIRGDEVRQIAPGQTGKIADYNYKLPDDFTGCVIAWNSNNLDSKVGGNYNYLYRLFRKSNLKPFERDISTEIYQAGSTPCNGVEGFNCYFPLQSYGFQPTNGVGYQPYRVVVLSFELLHAPATVCGPKKSTNLVKNKCVNFNFNGLTGTGVLTESNKKFLPFQQFGRDIADTTDAVRDPQTLEILDITPCSFGGVSVITPGTNTSNQVAVLYQGVNCTEVPVAIHADQLTPTWRVYSTGSNVFQTRAGCLIGAEHVNNSYECDIPIGAGICASYQTQTNSPRRARSVASQSIIAYTMSLGAENSVAYSNNSIAIPTNFTISVTTEILPVSMTKTSVDCTMYICGDSTECSNLLLQYGSFCTQLNRALTGIAVEQDKNTQEVFAQVKQIYKTPPIKDFGGFNFSQILPDPSKPSKRSFIEDLLFNKVTLADAGFIKQYGDCLGDIAARDLICAQKFNGLTVLPPLLTDEMIAQYTSALLAGTITSGWTFGAGAALQIPFAMQMAYRFNGIGVTQCVLYENQKLIANQFNSAIGKIQDSLSSTAPALGKLQDVVNQNAQALNTLVKQLSSNFGAISSVLNDILSRLDKVEAEVQIDRLITGRLQSLQTYVTQQLIRAAEIRASANLAATKMSECVLGQSKRVDFCGKGYHLMSFPQSAPHGVVFLHVTYVPAQEKNFTTAPAICHDGKAHFPREGVFVSNGTHWFVTQRNFYEPQIITTDNTFVCGNCDVVIGIVNNTVYDPLQPELDSFKEELDKYFKNHTSPDVDLGDISGINASVVNIQKEIDRLNEVAKNLNESLIDLQELGKYEQYIKGGSGYIPEAPRDGQAYVRKDGEWVLLSTFL

SEQ ID NO: 13749 - protein, 1241 aa, Artificial Sequence
  SARS-CoV-2/Germany/BavPat3/2020__EPI_ISL_414521 spike protein (1-1211)(N914C_S1123C) Foldon construct
MFVFLVLLPLVSSQCVNLTTRTQLPPAYTNSFTRGVYYPDKVFRSSVLHSTQDLFLPFFSNVTWFHAIHVSGTNGTKRFDNPVLPFNDGVYFASTEKSNIIRGWIFGTTLDSKTQSLLIVNNATNVVIKVCEFQFCNDPFLGVYYHKNNKSWMESEFRVYSSANNCTFEYVSQPFLMDLEGKQGNFKNLREFVFKNIDGYFKIYSKHTPINLVRDLPQGFSALEPLVDLPIGINITRFQTLLALHRSYLTPGDSSSGWTAGAAAYYVGYLQPRTFLLKYNENGTITDAVDCALDPLSETKCTLKSFTVEKGIYQTSNFRVQPTESIVRFPNITNLCPFGEVFNATRFASVYAWNRKRISNCVADYSVLYNSASFSTFKCYGVSPTKLNDLCFTNVYADSFVIRGDEVRQIAPGQTGKIADYNYKLPDDFTGCVIAWNSNNLDSKVGGNYNYLYRLFRKSNLKPFERDISTEIYQAGSTPCNGVEGFNCYFPLQSYGFQPTNGVGYQPYRVVVLSFELLHAPATVCGPKKSTNLVKNKCVNFNFNGLTGTGVLTESNKKFLPFQQFGRDIADTTDAVRDPQTLEILDITPCSFGGVSVITPGTNTSNQVAVLYQDVNCTEVPVAIHADQLTPTWRVYSTGSNVFQTRAGCLIGAEHVNNSYECDIPIGAGICASYQTQTNSPRRARSVASQSIIAYTMSLGAENSVAYSNNSIAIPTNFTISVTTEILPVSMTKTSVDCTMYICGDSTECSNLLLQYGSFCTQLNRALTGIAVEQDKNTQQVFAQVKQIYKTPPIKDFGGFNFSQILPDPSKPSKRSFIEDLLFNKVTLADAGFIKQYGDCLGDIAARDLICAQKFNGLTVLPPLLTDEMIAQYTSALLAGTITSGWTFGAGAALQIPFAMQMAYRFNGIGVTQCVLYENQKLIANQFNSAIGKIQDSLSSTASALGKLQDVVNQNAQALNTLVKQLSSNFGAISSVLNDILSRLDKVEAEVQIDRLITGRLQSLQTYVTQQLIRAAEIRASANLAATKMSECVLGQSKRVDFCGKGYHLMSFPQSAPHGVVFLHVTYVPAQEKNFTTAPAICHDGKAHFPREGVFVSNGTHWFVTQRNFYEPQIITTDNTFVCGNCDVVIGIVNNTVYDPLQPELDSFKEELDKYFKNHTSPDVDLGDISGINASVVNIQKEIDRLNEVAKNLNESLIDLQELGKYEQYIKGGSGYIPEAPRDGQAYVRKDGEWVLLSTFL

SEQ ID NO: 13750 - protein, 1241 aa, Artificial Sequence
  SARS-CoV-2/France/HF1805/2020__EPI_ISL_414628 spike protein (1-1211)(N914C_S1123C) Foldon construct
MFVFLVLLPLVSSQCVNLTTRTQLPPAYTNSFTRGVYYPDKVFRSSVLHSTQDLFLPFFSNVTWFHAIHVSGTNGTKRFDNPVLPFNDGVYFASTEKSNIIRGWIFGTTLDSKTQSLLIVNNATNVVIKVCEFQFCNDPFLGVYYHKNNKSWMESEFRVYSSANNCTFEYVSQPFLMDLEGKQGNFKNLREFVFKNIDGYFKIYSKHTPINLVRDLPQGFSALEPLVDLPIGINITRFQTLLALHRSYLTPGDSSSGWTAGAAAYYVGYLQPRTFLLKYNENGTITDAVDCALDPLSETKCTLKSFTVEKGIYQTSNFRVQPTESIVRFPNITNLCPFGEVFNATRFASVYAWNRKRISNCVADYSVLYNSASFSTFKCYGVSPTKLNDLCFTNVYADSFVIRGDEVRQIAPGQTGKIADYNYKLPDDFTGCVIAWNSNNLDSKVGGNYNYLYRLFRKSNLKPFERDISTEIYQAGSTPCNGVEGFNCYFPLQSYGFQPTNGVGYQPYRVVVLSFELLHAPATVCGPKKSTNLVKNKCVNFNFNGLTGTGVLTESNKKFLPFQQFGRDIADTTDAVRDPQTLEILDITPCSFGGVSVITPGTNTSNQVAVLYQGVNCTEVPVAIHADQLTPTWRVYSTGSNVFQTRAGCLIGAEHVNNSYECDIPIGAGICASYQTQTNSPRRARSVASQSIIAYTMSLGAENSVAYSNNSIAIPTNFTISVTTEILPVSMTKTSVDCTMYICGDSTECSNLLLQYGSFCTQLNRALTGIAVEQDKNTQEVFAQVKQIYKTPPIKDFGGFNFSQILPDPSKPSKRSFIEDLLFNKVTLADAGFIKQYGDCLGDIAARDLICAQKFNGLTVLPPLLTDEMIAQYTSALLAGTITSGWTFGAGAALQIPFAMQMAYRFNGIGVTQCVLYENQKLIANQFNSAIGKIQDSLSSTASALGKLQDVVNQNAQALNTLVKQLSSNFGAISSVLNDILSRLDKVEAEVQIDRLITGRLQSLQTYVTQQLIRAAEIRASANLAATKMSECVLGQSKRVDFCGKGYHLMSFPQSAPHGVVFLHVTYVPAQEKNFTTAPAICHDGKAHFPREGVFVSNGTHWFVTQRNFYEPQIITTDNTFVCGNCDVVIGVVNNTVYDPLQPELDSFKEELDKYFKNHTSPDVDLGDISGINASVVNIQKEIDRLNEVAKNLNESLIDLQELGKYEQYIKGGSGYIPEAPRDGQAYVRKDGEWVLLSTFL

SEQ ID NO: 13751 - protein, 1241 aa, Artificial Sequence
  SARS-CoV-2/Netherlands/ZuidHolland_9/2020__EPI_ISL_414445 spike protein (1-1211)(N914C_S1123C) Foldon construct
MFVFLVLLPLVSSQCVNLTTRTQLPPAYTNSFTRGVYYPDKVFRSSVLHSTQDLFLPFFSNVTWFHAIHVSGTNGTKRFDNPVLPFNDGVYFASTEKSNIIRGWIFGTTLDSKTQSLLIVNNATNVVIKVCEFQFCNDPFLGVYYHKNNKSWMESEFRVYSSANNCTFEYVSQPFLMDLEGKQGNFKNLREFVFKNIDGYFKIYSKHTPINLVRDLPQGFSALEPLVDLPIGINITRFQTLLALHRSYLTPGDSSSGWTAGAAAYYVGYLQPRTFLLKYNENGTITDAVDCALDPLSETKCTLKSFTVEKGIYQTSNFRVQPTESIVRFPNITNLCPFGEVFNATRFASVYAWNRKRISNCVADYSVLYNSASFSTFKCYGVSPTKLNDLCFTNVYADSFVIRGDEVRQIAPGQTGKIADYNYKLPDDFTGCVIAWNSNNLDSKVGGNYNYLYRLFRKSNLKPFERDISTEIYQAGSTPCNGVEGFNCYFPLQSYGFQPTNGVGYQPYRVVVLSFELLHAPATVCGPKKSTNLVKNKCVNFNFNGLTGTGVLTESNKKFLPFQQFGRDIADTTDAVRDPQTLEILDITPCSFGGVSVITPGTNTSNQVAVLYQGVNCTEVPVAIHADQLTPTWRVYSTGSNVFQTRAGCLIGAEHVNNSYECDIPIGAGICASYQTQTNSPRRARSVASQSIIAYTMSLGAENSVAYSNNSIAIPTNFTISVTTEILPVSMTKTSVDCTMYICGDSTECSNLLLQYGSFCTQLNRALTGIAVEQDKNTQEVFAQVKQIYKTPPIKDFGGFNFSQILPDPSKPSKRSFIEDLLFNKVTLADAGFIKQYGDCLGDIAARDLICVQKFNGLTVLPPLLTDEMIAQYTSALLAGTITSGWTFGAGAALQIPFAMQMAYRFNGIGVTQCVLYENQKLIANQFNSAIGKIQDSLSSTASALGKLQDVVNQNAQALNTLVKQLSSNFGAISSVLNDILSRLDKVEAEVQIDRLITGRLQSLQTYVTQQLIRAAEIRASANLAATKMSECVLGQSKRVDFCGKGYHLMSFPQSAPHGVVFLHVTYVPAQEKNFTTAPAICHDGKAHFPREGVFVSNGTHWFVTQRNFYEPQIITTDNTFVCGNCDVVIGIVNNTVYDPLQPELDSFKEELDKYFKNHTSPDVDLGDISGINASVVNIQKEIDRLNEVAKNLNESLIDLQELGKYEQYIKGGSGYIPEAPRDGQAYVRKDGEWVLLSTFL

SEQ ID NO: 13752 - protein, 1241 aa, Artificial Sequence
  SARS-CoV-2/Finland/FIN03032020A/2020__EPI_ISL_413602 spike protein (1-1211)(N914C_S1123C) Foldon construct
MFVFLVLLPLVSSQCVNLTTRTQLPPAYTNSFTRGVYYPDKVFRSSVLHSTQDLFLPFFSNVTWFHAIHVSGTNGTKRFDNPVLPFNDGVYFASTEKSNIIRGWIFGTTLDSKTQSLLIVNNATNVVIKVCEFQFCNDPFLGVYYHKNNKSWMESEFRVYSSANNCTFEYVSQPFLMDLEGKQGNFKNLREFVFKNIDGYFKIYSKHTPINLVRDLPQGFSALEPLVDLPIGINITRFQTLLALHRSYLTPGDSSSGWTAGAAAYYVGYLQPRTFLLKYNENGTITDAVDCALDPLSETKCTLKSFTVEKGIYQTSNFRVQPTESIVRFPNITNLCPFGEVFNATRFASVYAWNRKRISNCVADYSVLYNSASFSTFKCYGVSPTKLNDLCFTNVYADSFVIRGDEVRQIAPGQTGKIADYNYKLPDDFTGCVISWNSNNLDSKVGGNYNYLYRLFRKSNLKPFERDISTEIYQAGSTPCNGVEGFNCYFPLQSYGFQPTNGVGYQPYRVVVLSFELLHAPATVCGPKKSTNLVKNKCVNFNFNGLTGTGVLTESNKKFLPFQQFGRDIADTTDAVRDPQTLEILDITPCSFGGVSVITPGTNTSNQVAVLYQGVNCTEVPVAIHADQLTPTWRVYSTGSNVFQTRAGCLIGAEHVNNSYECDIPIGAGICASYQTQTNSPRRARSVASQSIIAYTMSLGAENSVAYSNNSIAIPTNFTISVTTEILPVSMTKTSVDCTMYICGDSTECSNLLLQYGSFCTQLNRALTGIAVEQDKNTQEVFAQVKQIYKTPPIKDFGGFNFSQILPDPSKPSKRSFIEDLLFNKVTLADAGFIKQYGDCLGDIAARDLICAQKFNGLTVLPPLLTDEMIAQYTSALLAGTITSGWTFGAGAALQIPFAMQMAYRFNGIGVTQCVLYENQKLIANQFNSAIGKIQDSLSSTASALGKLQDVVNQNAQALNTLVKQLSSNFGAISSVLNDILSRLDKVEAEVQIDRLITGRLQSLQTYVTQQLIRAAEIRASANLAATKMSECVLGQSKRVDFCGKGYHLMSFPQSAPHGVVFLHVTYVPAQEKNFTTAPAICHDGKAHFPREGVFVSNGTHWFVTQRNFYEPQIITTDNTFVCGNCDVVIGIVNNTVYDPLQPELDSFKEELDKYFKNHTSPDVDLGDISGINASVVNIQKEIDRLNEVAKNLNESLIDLQELGKYEQYIKGGSGYIPEAPRDGQAYVRKDGEWVLLSTFL

SEQ ID NO: 13753 - protein, 1241 aa, Artificial Sequence
  SARS-CoV-2/France/GE1977/2020__EPI_ISL_414632 spike protein (1-1211)(N914C_S1123C) Foldon construct
MFVFLVLLPLVSSQCVNLTTRTQLPPAYTNSFTRGVYYPDKVFRSSVLHSTQDLFLPFFSNVTWFHAIHVSGTNGTKRFDNPVLPFNDGVYFASTEKSNIIRGWIFGTTLDSKTQSLLIVNNATNVVIKVCEFQFCNDPFLGVYYHKNNKSWMESEFRVYSSANNCTFEYVSQPFLMDLEGKQGNFKNLREFVFKNIDGYFKIYSKHTPINLVRDLPQGFSALEPLVDLPIGINITRFQTLLALHRSYLTPGDSSSGWTAGAAAYYVGYLQPRTFLLKYNENGTITDAVDCALDPLSETKCTLKSFTVEKGIYQTSNFRVQPTESIVRFPNITNLCPFGEVFNATRFASVYAWNRKRISNCVADYSVLYNSASFSTFKCYGVSPTKLNDLCFTNVYADSFVIRGDEVRQIAPGQTGKIADYNYKLPDDFTGCVIAWNSNNLDSKVGGNYNYLYRLFRKSNLKPFERDISTEIYQAGSTPCNGVEGFNCYFPLQSYGFQPTNGVGYQPYRVVVLSFELLHAPATVCGPKKSTNLVKNKCVNFNFNGLTGTGVLTESNKKFLPFQQFGRDIADTTDAVRDPQTLEILDITPCSFGGVSVITPGTNTSNQVAVLYQGVNCTEVPVAIHADQLTPTWRVYSTGSNVFQTRAGCLIGAEHVNNSYECDIPIGAGICASYQTQTNSPRRARSVASQSIIAYTMSLGAENSVAYSNNSIAIPTNFTISVTTEILPVSMTKTSVDCTMYICGDSTECSNLLLQYGSFCTQLNRALTGIAVEQDKNTQEVFAQVKQIYKTPPIKDFGGFNFSQILPDPSKPSKRSFIEDLLFNKVTLADAGFIKQYGDCLGDIAARDLICAQKFNGLTVLPPLLTDEMIAQYTSALLAGTITSGWTFGAGAALQIPFAMQMAYRFNGIGVTQCVLYENQKLIANQFNSAIGKIQDSLFSTASALGKLQDVVNQNAQALNTLVKQLSSNFGAISSVLNDILSRLDKVEAEVQIDRLITGRLQSLQTYVTQQLIRAAEIRASANLAATKMSECVLGQSKRVDFCGKGYHLMSFPQSAPHGVVFLHVTYVPAQEKNFTTAPAICHDGKAHFPREGVFVSNGTHWFVTQRNFYEPQIITTDNTFVCGNCDVVIGIVNNTVYDPLQPELDSFKEELDKYFKNHTSPDVDLGDISGINASVVNIQKEIDRLNEVAKNLNESLIDLQELGKYEQYIKGGSGYIPEAPRDGQAYVRKDGEWVLLSTFL

SEQ ID NO: 13754 - protein, 1241 aa, Artificial Sequence
  SARS-CoV-2/Finland/FIN-313/2020__EPI_ISL_414641 spike protein (1-1211)(N914C_S1123C) Foldon construct
MFVFLVLLPLVSSQCVNLTTRTQLPPAYTNSFTRGVYYPDKVFRSSVLHSTQDLFLPFFSNVTWFHAIHVSGTNGTKRFDNPVLPFNDGVYFASTEKSNIIRGWIFGTTLDSKTQSLLIVNNATNVVIKVCEFQFCNDPFLGVYYHKNNKSWMESEFRVYSSANNCTFEYVSQPFLMDLEGKQGNFKNLREFVFKNIDGYFKIYSKHTPINLVRDLPQGFSALEPLVDLPIGINITRFKTLLALHRSYLTPGDSSSGWTAGAAAYYVGYLQPRTFLLKYNENGTITDAVDCALDPLSETKCTLKSFTVEKGIYQTSNFRVQPTESIVRFPNITNLCPFGEVFNATRFASVYAWNRKRISNCVADYSVLYNSASFSTFKCYGVSPTKLNDLCFTNVYADSFVIRGDEVRQIAPGQTGKIADYNYKLPDDFTGCVIAWNSNNLDSKVGGNYNYLYRLFRKSNLKPFERDISTEIYQAGSTPCNGVEGFNCYFPLQSYGFQPTNGVGYQPYRVVVLSFELLHAPATVCGPKKSTNLVKNKCVNFNFNGLTGTGVLTESNKKFLPFQQFGRDIADTTDAVRDPQTLEILDITPCSFGGVSVITPGTNTSNQVAVLYQGVNCTEVPVAIHADQLTPTWRVYSTGSNVFQTRAGCLIGAEHVNNSYECDIPIGAGICASYQTQTNSPRRARSVASQSIIAYTMSLGAENSVAYSNNSIAIPTNFTISVTTEILPVSMTKTSVDCTMYICGDSTECSNLLLQYGSFCTQLNRALTGIAVEQDKNTQEVFAQVKQIYKTPPIKDFGGFNFSQILPDPSKPSKRSFIEDLLFNKVTLADAGFIKQYGDCLGDIAARDLICAQKFNGLTVLPPLLTDEMIAQYTSALLAGTITSGWTFGAGAALQIPFAMQMAYRFNGIGVTQCVLYENQKLIANQFNSAIGKIQDSLSSTASALGKLQDVVNQNAQALNTLVKQLSSNFGAISSVLNDILSRLDKVEAEVQIDRLITGRLQSLQTYVTQQLIRAAEIRASANLAATKMSECVLGQSKRVDFCGKGYHLMSFPQSAPHGVVFLHVTYVPAQEKNFTTAPAICHDGKAHFPREGVFVSNGTHWFVTQRNFYEPQIITTDNTFVCGNCDVVIGIVNNTVYDPLQPELDSFKEELDKYFKNHTSPDVDLGDISGINASVVNIQKEIDRLNEVAKNLNESLIDLQELGKYEQYIKGGSGYIPEAPRDGQAYVRKDGEWVLLSTFL

SEQ ID NO: 13755 - protein, 1241 aa, Artificial Sequence
  SARS-CoV-2/Netherlands/ZuidHolland_2/2020__EPI_ISL_414556 spike protein (1-1211)(N914C_S1123C) Foldon construct
MFVFLVLLPLVSSQCVNLTTRTQLPPAYTNSFTRGVYYPDKVFRSSVLHSTQDLFLPFFSNVTWFHAIHVSGTNGTKRFDNPVLPFNDGVYFASTEKSNIIRGWIFGTTLDSKTQSLLIVNNATNVVIKVCEFQFCNDPFLGVYYHKNNKSWMESEFRVYSSANNCTFEYVSQPFLMDLEGKQGNFKNLREFVFKNIDGYFKIYSKHTPINLVRDLPQGFSALEPLVDLPIGINITRFQTLLALHRSYLTPGDSSSGWTAGAAAYYVGYLQPRTFLLKYNENGTITDAVDCALDPLSETKCTLKSFTVEKGIYQTSNFRVQPTESIVRFPNITNLCPFGEVFNATRFASVYAWNRKRISNCVADYSVLYNSASFSTFKCYGVSPTKLNDLCFTNVYADSFVIRGDEVRQIAPGQTGKIADYNYKLPDDFTGCVIAWNSNNLDSKVGGNYNYLYRLFRKSNLKPFERDISTEIYQAGSTPCNGVEGFNCYFPLQSYGFQPTNGVGYQPYRVVVLSFELLHAPATVCGPKKSTNLVKNKCVNFNFNGLTGTGVLTESNKKFLPFQQFGRDIADTTDAVRDPQTLEILDITPCSFGGVSVITPGTNTSNQVAVLYQGVNCTEVPVAIHADQLTPTWRVYSTGSNVFQTRAGCLIGAEHVNNSYECDIPIGAGICASYQTQTNSPRRARSVASQSIIAYTMSLGAENSVAYSNNSIAIPTNFTISVTTEILPVSMTKTSVDCTMYICGDSTECSNLLLQYGSFCTQLNRALTGIALEQDKNTQEVFAQVKQIYKTPPIKDFGGFNFSQILPDPSKPSKRSFIEDLLFNKVTLADAGFIKQYGDCLGDIAARDLICAQKFNGLTVLPPLLTDEMIAQYTSALLAGTITSGWTFGAGAALQIPFAMQMAYRFNGIGVTQCVLYENQKLIANQFNSAIGKIQDSLSSTASALGKLQDVVNQNAQALNTLVKQLSSNFGAISSVLNDILSRLDKVEAEVQIDRLITGRLQSLQTYVTQQLIRAAEIRASANLAATKMSECVLGQSKRVDFCGKGYHLMSFPQSAPHGVVFLHVTYVPAQEKNFTTAPAICHDGKAHFPREGVFVSNGTHWFVTQRNFYEPQIITTDNTFVCGNCDVVIGIVNNTVYDPLQPELDSFKEELDKYFKNHTSPDVDLGDISGINASVVNIQKEIDRLNEVAKNLNESLIDLQELGKYEQYIKGGSGYIPEAPRDGQAYVRKDGEWVLLSTFL

SEQ ID NO: 13756 - protein, 1241 aa, Artificial Sequence
  SARS-CoV-2/USA/WA-UW31/2020__EPI_ISL_414618 spike protein (1-1211)(N914C_S1123C) Foldon construct
MFVFLVLLPLVSSQCVNLTTRTQLPPAYTNSFTRGVYYPDKVFRSSVLHSTQDLFLPFFSNVTWFHAIHVSGTNGTKRFDNPVLPFNDGVYFASTEKSNIIRGWIFGTTLDSKTQSLLIVNNATNVVIKVCEFQFCNDPFLGVYYHKNNKSWMESEFRVYSSANNCTFEYVSQPFLMDLEGKQGNFKNLREFVFKNIDGYFKIYSKHTPINLVRDLPQGFSALEPLVDLPIGINITRFQTLLALHRSYLTPGDSSSGWTAGAAAYYVGYLQPRTFLLKYNENGTITDAVDCALDPLSETKCTLKSFTVEKGIYQTSNFRVQPTESIVRFPNITNLCPFGEVFNATRFASVYAWNRKRISNCVADYSVLYNSASFSTFKCYGVSPTKLNDLCFTNVYADSFVIRGDEVRQIAPGQTGKIADYNYKLPDDFTGCVIAWNSNNLDSKVGGNYNYLYRLFRKSNLKPFERDISTEIYQAGSTPCNGAEGFNCYFPLQSYGFQPTNGVGYQPYRVVVLSFELLHAPATVCGPKKSTNLVKNKCVNFNFNGLTGTGVLTESNKKFLPFQQFGRDIADTTDAVRDPQTLEILDITPCSFGGVSVITPGTNTSNQVAVLYQDVNCTEVPVAIHADQLTPTWRVYSTGSNVFQTRAGCLIGAEHVNNSYECDIPIGAGICASYQTQTNSPRRARSVASQSIIAYTMSLGAENSVAYSNNSIAIPTNFTISVTTEILPVSMTKTSVDCTMYICGDSTECSNLLLQYGSFCTQLNRALTGIAVEQDKNTQEVFAQVKQIYKTPPIKDFGGFNFSQILPDPSKPSKRSFIEDLLFNKVTLADAGFIKQYGDCLGDIAARDLICAQKFNGLTVLPPLLTDEMIAQYTSALLAGTITSGWTFGAGAALQIPFAMQMAYRFNGIGVTQCVLYENQKLIANQFNSAIGKIQDSLSSTASALGKLQDVVNQNAQALNTLVKQLSSNFGAISSVLNDILSRLDKVEAEVQIDRLITGRLQSLQTYVTQQLIRAAEIRASANLAATKMSECVLGQSKRVDFCGKGYHLMSFPQSAPHGVVFLHVTYVPAQEKNFTTAPAICHDGKAHFPREGVFVSNGTHWFVTQRNFYEPQIITTDNTFVCGNCDVVIGIVNNTVYDPLQPELDSFKEELDKYFKNHTSPDVDLGDISGINASVVNIQKEIDRLNEVAKNLNESLIDLQELGKYEQYIKGGSGYIPEAPRDGQAYVRKDGEWVLLSTFL

SEQ ID NO: 13757 - protein, 1241 aa, Artificial Sequence
  SARS-CoV-2/South Korea/SNU01/2020__EPI_ISL_411929 spike protein (1-1211)(N914C_S1123C) Foldon construct
MFVFLVLLPLVSSQCVNLTTRTQLPPAYTNSFTRGVYYPDKVFRSSVLHSTQDLFLPFFSNVTWFHAIHVSGTNGTKRFDNPVLPFNDGVYFASTEKSNIIRGWIFGTTLDSKTQSLLIVNNATNVVIKVCEFQFCNDPFLGVYYHKNNKSWMESEFRVYSSANNCTFEYVSQPFLMDLEGKQGNFKNLREFVFKNIDGYFKIYSKHTPINLVRDLPQGFWALEPLVDLPIGINITRFQTLLALHRSYLTPGDSSSGWTAGAAAYYVGYLQPRTFLLKYNENGTITDAVDCALDPLSETKCTLKSFTVEKGIYQTSNFRVQPTESIVRFPNITNLCPFGEVFNATRFASVYAWNRKRISNCVADYSVLYNSASFSTFKCYGVSPTKLNDLCFTNVYADSFVIRGDEVRQIAPGQTGKIADYNYKLPDDFTGCVIAWNSNNLDSKVGGNYNYLYRLFRKSNLKPFERDISTEIYQAGSTPCNGVEGFNCYFPLQSYGFQPTNGVGYQPYRVVVLSFELLHAPATVCGPKKSTNLVKNKCVNFNFNGLTGTGVLTESNKKFLPFQQFGRDIADTTDAVRDPQTLEILDITPCSFGGVSVITPGTNTSNQVAVLYQDVNCTEVPVAIHADQLTPTWRVYSTGSNVFQTRAGCLIGAEHVNNSYECDIPIGAGICASYQTQTNSPRRARSVASQSIIAYTMSLGAENSVAYSNNSIAIPTNFTISVTTEILPVSMTKTSVDCTMYICGDSTECSNLLLQYGSFCTQLNRALTGIAVEQDKNTQEVFAQVKQIYKTPPIKDFGGFNFSQILPDPSKPSKRSFIEDLLFNKVTLADAGFIKQYGDCLGDIAARDLICAQKFNGLTVLPPLLTDEMIAQYTSALLAGTITSGWTFGAGAALQIPFAMQMAYRFNGIGVTQCVLYENQKLIANQFNSAIGKIQDSLSSTASALGKLQDVVNQNAQALNTLVKQLSSNFGAISSVLNDILSRLDKVEAEVQIDRLITGRLQSLQTYVTQQLIRAAEIRASANLAATKMSECVLGQSKRVDFCGKGYHLMSFPQSAPHGVVFLHVTYVPAQEKNFTTAPAICHDGKAHFPREGVFVSNGTHWFVTQRNFYEPQIITTDNTFVCGNCDVVIGIVNNTVYDPLQPELDSFKEELDKYFKNHTSPDVDLGDISGINASVVNIQKEIDRLNEVAKNLNESLIDLQELGKYEQYIKGGSGYIPEAPRDGQAYVRKDGEWVLLSTFL

SEQ ID NO: 13758 - protein, 1241 aa, Artificial Sequence
  SARS-CoV-2/China/WF0004/2020__EPI_ISL_413694 spike protein (1-1211)(N914C_S1123C) Foldon construct
MFVFLVLLPLVSSQCVNLTTRTQLPPAYTNSFTRGVYYPDKVFRSSVLHSTQDLFLPFFSNVTWFHAIHVSGTNGTKRFDNPVLPFNDGVYFASTEKSNIIRGWIFGTTLDSKTQSLLIVNNATNVVIKVCEFQFCNDPFLGVYYHKNNKSWTESEFRVYSSANNCTFEYVSQPFLMDLEGKQGNFKNLREFVFKNIDGYFKIYSKHTPINLVRDLPQGFSALEPLVDLPIGINITRFQTLLALHRSYLTPGDSSSGWTAGAAAYYVGYLQPRTFLLKYNENGTITDAVDCALDPLSETKCTLKSFTVEKGIYQTSNFRVQPTESIVRFPNITNLCPFGEVFNATRFASVYAWNRKRISNCVADYSVLYNSASFSTFKCYGVSPTKLNDLCFTNVYADSFVIRGDEVRQIAPGQTGKIADYNYKLPDDFTGCVIAWNSNNLDSKVGGNYNYLYRLFRKSNLKPFERDISTEIYQAGSTPCNGVEGFNCYFPLQSYGFQPTNGVGYQPYRVVVLSFELLHAPATVCGPKKSTNLVKNKCVNFNFNGLTGTGVLTESNKKFLPFQQFGRDIADTTDAVRDPQTLEILDITPCSFGGVSVITPGTNTSNQVAVLYQDVNCTEVPVAIHADQLTPTWRVYSTGSNVFQTRAGCLIGAEHVNNSYECDIPIGAGICASYQTQTNSPRRARSVASQSIIAYTMSLGAENSVAYSNNSIAIPTNFTISVTTEILPVSMTKTSVDCTMYICGDSTECSNLLLQYGSFCTQLNRALTGIAVEQDKNTQEVFAQVKQIYKTPPIKDFGGFNFSQILPDPSKPSKRSFIEDLLFNKVTLADAGFIKQYGDCLGDIAARDLICAQKFNGLTVLPPLLTDEMIAQYTSALLAGTITSGWTFGAGAALQIPFAMQMAYRFNGIGVTQCVLYENQKLIANQFNSAIGKIQDSLSSTASALGKLQDVVNQNAQALNTLVKQLSSNFGAISSVLNDILSRLDKVEAEVQIDRLITGRLQSLQTYVTQQLIRAAEIRASANLAATKMSECVLGQSKRFDFCGKGYHLMSFPQSAPHGVVFLHVTYVPAQEKNFTTAPAICHDGKAHFPREGVFVSNGTHWFVTQRNFYEPQIITTDNTFVCGNCDVVIGIVNNTVYDPLQPELDSFKEELDKYFKNHTSPDVDLGDISGINASVVNIQKEIDRLNEVAKNLNESLIDLQELGKYEQYIKGGSGYIPEAPRDGQAYVRKDGEWVLLSTFL

SEQ ID NO: 13759 - protein, 1241 aa, Artificial Sequence
  SARS-CoV-2/China/WF0028/2020__EPI_ISL_413791 spike protein (1-1211)(N914C_S1123C) Foldon construct
MFVFLVLLPLVSSQCVNLTTRTQLPPAYTNSFTRGVYYPDKVFRSSVLHSTQDLFLPFFSNVTWFHAIHVSGTNGTKRFDNPVLPFNDGVYFASTEKSNIIRGWIFGTTLDSKTQSLLIVNNATNVVIKVCEFQFCNDPFLGVYYHKNNKSWMESEFRVYSSANNCTFEYVSQPFLMDLEGKQGNFKNLREFVFKNIDGYFKIYSKHTPINLVRDLPQGFSALEPLVDLPIGINITRFQTLLALHRSYLTPGDSSSGWTAGAAAYYVGYLQPRTFLLKYNENGTITDAVDCALDPLSETKCTLKSFTVEKGIYQTSNFRVQPTESIVRFPNITNLCPFGEVFNATRFASVYAWNRKRISNCVADYSVLYNSASFSTFKCYGVSPTKLNDLCFTNVYADSFVIRGDEVRQIAPGQTGKIADYNYKLPDDFTGCVIAWNSNNLDSKVGGNYNYLYRLFRKSNLKPFERDISTEIYQAGSTPCNGVEGFNCYFPLQSYGFQPTNGVGYQPYRVVVLSFELLHAPATVCGPKKSTNLVKNKCVNFNFNGLTGTGVLTESNKKFLPFQQFGRDIADTTDAVRDPQTLEILDITPCSFGGVSVITPGTNTSNQVAVLYQDVNCTEVPVAIHADQLTPTWRVYSTGSNVFQTRAGCLIGAEHVNNSYECDIPIGAGICASYQTQTNSPRRARSVASQSIIAYTMSLGAENSVAYSNNSIAIPTNFTISVTTEILPVSMTKTSVDCTMYICGDSTECSNLLLQYGSFCTQLNRALTGIAVEQDKNTQEVFAQVKQIYKTPPIKDFGGFNFSQILPDPSKPSKRSFIEDLLFNKVTLADAGFIKQYGDCLGDIAARDLICAQKFNGLTVLPPLLTDEMIAQYTSALLAGTITSGWTFGAGAALQIPFAMQMAYRFNGIGVTQCVLYENQKLIANQFNSAIGKIQDSLSSTASALGKLQDVVNQNAQALNTLVKQLSSNFGAISSVLNDILSRLDKVEAEVQIDRLITGRLQSLQTYVTQQLIRAAEIRASANLAATKMSECVLGQSKRVDFCGKGYHLMSFPQSAPHGVVFLHVTYVPAQEKNFTTAPAICHDGKAHFPREGVFVSNGTHWFVTQRNFYEPQIITTDNTFVCGNCDVVIGIVNNTVYDPLQPELESFKEELDKYFKNHTSPDVDLGDISGINASVVNIQKEIDRLNEVAKNLNESLIDLQELGKYEQYIKGGSGYIPEAPRDGQAYVRKDGEWVLLSTFL

SEQ ID NO: 13760 - protein, 1241 aa, Artificial Sequence
  SARS-CoV-2/2019-nCoV/USA-CruiseA-18/2020__MT159716.1 spike protein (1-1211)(N914C_S1123C) Foldon construct
MFVFLVLLPLVSSQCVNLTTRTQLPPAYTNSFTRGVYYPDKVFRSSVLHSTQDLFLPFFSNVTWFHAIHVSGTNGTKRFDNPVLPFNDGVYFASTEKSNIIRGWIFGTTLDSKTQSLLIVNNATNVVIKVCEFQFCNDPFLGVYYHKNNKSWMESELRVYSSANNCTFEYVSQPFLMDLEGKQGNFKNLREFVFKNIDGYFKIYSKHTPINLVRDLPQGFSALEPLVDLPIGINITRFQTLLALHRSYLTPGDSSSGWTAGAAAYYVGYLQPRTFLLKYNENGTITDAVDCALDPLSETKCTLKSFTVEKGIYQTSNFRVQPTESIVRFPNITNLCPFGEVFNATRFASVYAWNRKRISNCVADYSVLYNSASFSTFKCYGVSPTKLNDLCFTNVYADSFVIRGDEVRQIAPGQTGKIADYNYKLPDDFTGCVIAWNSNNLDSKVGGNYNYLYRLFRKSNLKPFERDISTEIYQAGSTPCNGVEGFNCYFPLQSYGFQPTNGVGYQPYRVVVLSFELLHAPATVCGPKKSTNLVKNKCVNFNFNGLTGTGVLTESNKKFLPFQQFGRDIADTTDAVRDPQTLEILDITPCSFGGVSVITPGTNTSNQVAVLYQDVNCTEVPVAIHADQLTPTWRVYSTGSNVFQTRAGCLIGAEHVNNSYECDIPIGAGICASYQTQTNSPRRARSVASQSIIAYTMSLGAENSVAYSNNSIAIPTNFTISVTTEILPVSMTKTSVDCTMYICGDSTECSNLLLQYGSFCTQLNRALTGIAVEQDKNTQEVFAQVKQIYKTPPIKDFGGFNFSQILPDPSKPSKRSFIEDLLFNKVTLADAGFIKQYGDCLGDIAARDLICAQKFNGLTVLPPLLTDEMIAQYTSALLAGTITSGWTFGAGAALQIPFAMQMAYRFNGIGVTQCVLYENQKLIANQFNSAIGKIQDSLSSTASALGKLQDVVNQNAQALNTLVKQLSSNFGAISSVLNDILSRLDKVEAEVQIDRLITGRLQSLQTYVTQQLIRAAEIRASANLAATKMSECVLGQSKRVDFCGKGYHLMSFPQSAPHGVVFLHVTYVPAQEKNFTTAPAICHDGKAHFPREGVFVSNGTHWFVTQRNFYEPQIITTDNTFVCGNCDVVIGIVNNTVYDPLQPELDSFKEELDKYFKNHTSPDVDLGDISGINASVVNIQKEIDRLNEVAKNLNESLIDLQELGKYEQYIKGGSGYIPEAPRDGQAYVRKDGEWVLLSTFL

SEQ ID NO: 13761 - protein, 1241 aa, Artificial Sequence
  SARS-CoV-2/SARS-CoV-2/Yunnan-01/human/2020/CHN__MT049951.1 spike protein (1-1211)(N914C_S1123C) Foldon construct
MFVFLVLLPLVSSQCVNLTTRTQLPPANTNSFTRGVYYPDKVFRSSVLHSTQDLFLPFFSNVTWFHAIHVSGTNGTKRFDNPVLPFNDGVYFASTEKSNIIRGWIFGTTLDSKTQSLLIVNNATNVVIKVCEFQFCNDPFLGVYYHKNNKSWMESEFRVYSSANNCTFEYVSQPFLMDLEGKQGNFKNLREFVFKNIDGYFKIYSKHTPINLVRDLPQGFSALEPLVDLPIGINITRFQTLLALHRSYLTPGDSSSGWTAGAAAYYVGYLQPRTFLLKYNENGTITDAVDCALDPLSETKCTLKSFTVEKGIYQTSNFRVQPTESIVRFPNITNLCPFGEVFNATRFASVYAWNRKRISNCVADYSVLYNSASFSTFKCYGVSPTKLNDLCFTNVYADSFVIRGDEVRQIAPGQTGKIADYNYKLPDDFTGCVIAWNSNNLDSKVGGNYNYLYRLFRKSNLKPFERDISTEIYQAGSTPCNGVEGFNCYFPLQSYGFQPTNGVGYQPYRVVVLSFELLHAPATVCGPKKSTNLVKNKCVNFNFNGLTGTGVLTESNKKFLPFQQFGRDIADTTDAVRDPQTLEILDITPCSFGGVSVITPGTNTSNQVAVLYQDVNCTEVPVAIHADQLTPTWRVYSTGSNVFQTRAGCLIGAEHVNNSYECDIPIGAGICASYQTQTNSPRRARSVASQSIIAYTMSLGAENSVAYSNNSIAIPTNFTISVTTEILPVSMTKTSVDCTMYICGDSTECSNLLLQYGSFCTQLNRALTGIAVEQDKNTQEVFAQVKQIYKTPPIKDFGGFNFSQILPDPSKPSKRSFIEDLLFNKVTLADAGFIKQYGDCLGDIAARDLICAQKFNGLTVLPPLLTDEMIAQYTSALLAGTITSGWTFGAGAALQIPFAMQMAYRFNGIGVTQCVLYENQKLIANQFNSAIGKIQDSLSSTASALGKLQDVVNQNAQALNTLVKQLSSNFGAISSVLNDILSRLDKVEAEVQIDRLITGRLQSLQTYVTQQLIRAAEIRASANLAATKMSECVLGQSKRVDFCGKGYHLMSFPQSAPHGVVFLHVTYVPAQEKNFTTAPAICHDGKAHFPREGVFVSNGTHWFVTQRNFYEPQIITTDNTFVCGNCDVVIGIVNNTVYDPLQPELDSFKEELDKYFKNHTSPDVDLGDISGINASVVNIQKEIDRLNEVAKNLNESLIDLQELGKYEQYIKGGSGYIPEAPRDGQAYVRKDGEWVLLSTFL

SEQ ID NO: 13762 - protein, 1241 aa, Artificial Sequence
  SARS-CoV-2/USA/WA-UW292/2020__EPI_ISL_418077 spike protein (1-1211)(N914C_S1123C) Foldon construct
MFVFLVLLPLVSSQCVNLTTRTQLPPAYTNSFTRGVYYPDKVFRSSVLHSTQDLFLPFFSNVTWFHAIHVSGTNGTKRFDNPVLPFNDGVYFASTEKSNIIRGWIFGTTLDSKTQSLLIVNNATNVVIKVCEFQFCNDPFLGVYYHKNNKSWMESEFRVYSSANNCTFEYVSQPFLMDLEGKQGNFKNLREFVFKNIDGYFKIYSKHTPINLVRDLPQGFSALEPLVDLPIGINITRFQTLLALHRSYLTPGDSSSGWTAGAAAYYVGYLQPRTFLLKYNENGTITDAVDCALDPLSETKCTLKSFTVEKGIYQTSNFRVQPTESIVRFPNITNLCPFGEVFNATRFASVYAWNRKRISNCVADYSVLYNSASFSTFKCYGVSPTKLNDLCFTNVYADSFVIRGDEVRQIAPGQTGKIADYNYKLPDDFTGCVIAWNSNNLDSKVGGNYNYLYRLFRKSNLKPFERDISTEIYQASSTPCNGVEGFNCYFPLQSYGFQPTNGVGYQPYRVVVLSFELLHAPATVCGPKKSTNLVKNKCVNFNFNGLTGTGVLTESNKKFLPFQQFGRDIADTTDAVRDPQTLEILDITPCSFGGVSVITPGTNTSNQVAVLYQDVNCTEVPVAIHADQLTPTWRVYSTGSNVFQTRAGCLIGAEHVNNSYECDIPIGAGICASYQTQTNSPRRARSVASQSIIAYTMSLGAENSVAYSNNSIAIPTNFTISVTTEILPVSMTKTSVDCTMYICGDSTECSNLLLQYGSFCTQLNRALTGIAVEQDKNTQEVFAQVKQIYKTPPIKDFGGFNFSQILPDPSKPSKRSFIEDLLFNKVTLADAGFIKQYGDCLGDIAARDLICAQKFNGLTVLPPLLTDEMIAQYTSALLAGTITSGWTFGAGAALQIPFAMQMAYRFNGIGVTQCVLYENQKLIANQFNSAIGKIQDSLSSTASALGKLQDVVNQNAQALNTLVKQLSSNFGAISSVLNDILSRLDKVEAEVQIDRLITGRLQSLQTYVTQQLIRAAEIRASANLAATKMSECVLGQSKRVDFCGKGYHLMSFPQSAPHGVVFLHVTYVPAQEKNFTTAPAICHDGKAHFPREGVFVSNGTHWFVTQRNFYEPQIITTDNTFVCGNCDVVIGIVNNTVYDPLQPELDSFKEELDKYFKNHTSPDVDLGDISGINASVVNIQKEIDRLNEVAKNLNESLIDLQELGKYEQYIKGGSGYIPEAPRDGQAYVRKDGEWVLLSTFL

SEQ ID NO: 13763 - protein, 1241 aa, Artificial Sequence
  SARS-CoV-2/Iceland/192/2020__EPI_ISL_417819 spike protein (1-1211)(N914C_S1123C) Foldon construct
MFVFFVLLPLVSSQCVNLTTRTQLPPAYTNSFTRGVYYPDKVFRSSVLHSTQDLFLPFFSNVTWFHAIHVSGTNGTKRFDNPVLPFNDGVYFASTEKSNIIRGWIFGTTLDSKTQSLLIVNNATNVVIKVCEFQFCNDPFLGVYYHKNNKSWMESEFRVYSSANNCTFEYVSQPFLMDLEGKQGNFKNLREFVFKNIDGYFKIYSKHTPINLVRDLPQGFSALEPLVDLPIGINITRFQTLLALHRSYLTPGDSSSGWTAGAAAYYVGYLQPRTFLLKYNENGTITDAVDCALDPLSETKCTLKSFTVEKGIYQTSNFRVQPTESIVRFPNITNLCPFGEVFNATRFASVYAWNRKRISNCVADYSVLYNSASFSTFKCYGVSPTKLNDLCFTNVYADSFVIRGDEVRQIAPGQTGKIADYNYKLPDDFTGCVIAWNSNNLDSKVGGNYNYLYRLFRKSNLKPFERDISTEIYQAGSTPCNGVEGFNCYFPLQSYGFQPTNGVGYQPYRVVVLSFELLHAPATVCGPKKSTNLVKNKCVNFNFNGLTGTGVLTESNKKFLPFQQFGRDIADTTDAVRDPQTLEILDITPCSFGGVSVITPGTNTSNQVAVLYQGVNCTEVPVAIHADQLTPTWRVYSTGSNVFQTRAGCLIGAEHVNNSYECDIPIGAGICASYQTQTNSPRRARSVASQSIIAYTMSLGAENSVAYSNNSIAIPTNFTISVTTEILPVSMTKTSVDCTMYICGDSTECSNLLLQYGSFCTQLNRALTGIAVEQDKNTQEVFAQVKQIYKTPPIKDFGGFNFSQILPDPSKPSKRSFIEDLLFNKVTLADAGFIKQYGDCLGDIAARDLICAQKFNGLTVLPPLLTDEMIAQYTSALLAGTITSGWTFGAGAALQIPFAMQMAYRFNGIGVTQCVLYENQKLIANQFNSAIGKIQDSLSSTASALGKLQDVVNQNAQALNTLVKQLSSNFGAISSVLNDILSRLDKVEAEVQIDRLITGRLQSLQTYVTQQLIRAAEIRASANLAATKMSECVLGQSKRVDFCGKGYHLMSFPQSAPHGVVFLHVTYVPAQEKNFTTAPAICHDGKAHFPREGVFVSNGTHWFVTQRNFYEPQIITTDNTFVCGNCDVVIGIVNNTVYDPLQPELDSFKEELDKYFKNHTSPDVDLGDISGINASVVNIQKEIDRLNEVAKNLNESLIDLQELGKYEQYIKGGSGYIPEAPRDGQAYVRKDGEWVLLSTFL

SEQ ID NO: 13764 - protein, 1241 aa, Artificial Sequence
  SARS-CoV-2/Belgium/ULG-6939/2020__EPI_ISL_417020 spike protein (1-1211)(N914C_S1123C) Foldon construct
MFVFLVLLPLVSSQCVNLTTRTQLPPAYTNSFTRGVYYPDKVFRSSVLHSTQDLFLPFFSNVTWFHAIHVSGTNGTKRFDNPVLPFNDGVYFASTEKSNIIRGWIFGTTLDSKTQSLLIVNNATNVVIKVCEFQFCNDPFLGVYYHKNNKSWMESEFRVYSSANNCTFEYVSQPFLMDLEGKQGNFKNLREFVFKNIDGYFKIYSKHTPINLVRDLPQGFSALEPLVDLPIGINITRFQTLLALHRSYLTPGDSSSGWTAGAAAYYVGYLQPRTFLLKYNENGTITDAVDCALDPLSETKCTLKSFTVEKGIYQTSNFRVQPTESIVRFPNITNLCPFGEVFNATRFASVYAWNRKRISNCVADYSVLYNSASFSTFKCYGVSPTKLNDLCFTNVYADSFVIRGDEVRQIAPGQTGKIADYNYKLPDDFTGCVIAWNSNNLDSKVGGNYNYLYRLFRKSNLKPFERDISTEIYQAGSTPCNGVEGFNCYFPLQSYGFQPTNGVGYQPYRVVVLSFELLHAPATVCGPKKSTNLVKNKCVNFNFNGLTGTGVLTESNKKFLPFQQFGRDIADTTDAVRDPQTLEILDITPCSFGGVSVITPGTNTSNQVAVLYQGVNCTEVPVAIHADQLTPTWRVYSTGSNVFQTRAGCLIGAEHVNNSYECDIPIGAGICASYQTQTNSPRRARSVASQSIIAYTMSLGAENSVVYSNNSIAIPTNFTISVTTEILPVSMTKTSVDCTMYICGDSTECSNLLLQYGSFCTQLNRALTGIAVEQDKNTQEVFAQVKQIYKTPPIKDFGGFNFSQILPDPSKPSKRSFIEDLLFNKVTLADAGFIKQYGDCLGDIAARDLICAQKFNGLTVLPPLLTDEMIAQYTSALLAGTITSGWTFGAGAALQIPFAMQMAYRFNGIGVTQCVLYENQKLIANQFNSAIGKIQDSLSSTASALGKLQDVVNQNAQALNTLVKQLSSNFGAISSVLNDILSRLDKVEAEVQIDRLITGRLQSLQTYVTQQLIRAAEIRASANLAATKMSECVLGQSKRVDFCGKGYHLMSFPQSAPHGVVFLHVTYVPAQEKNFTTAPAICHDGKAHFPREGVFVSNGTHWFVTQRNFYEPQIITTDNTFVCGNCDVVIGIVNNTVYDPLQPELDSFKEELDKYFKNHTSPDVDLGDISGINASVVNIQKEIDRLNEVAKNLNESLIDLQELGKYEQYIKGGSGYIPEAPRDGQAYVRKDGEWVLLSTFL

SEQ ID NO: 13765 - protein, 1241 aa, Artificial Sequence
  SARS-CoV-2/France/HF2496/2020__EPI_ISL_418231 spike protein (1-1211)(N914C_S1123C) Foldon construct
MFVFLVLLPLVSSQCVNLTTRTQLPPAYTNSFTRGVYYPDKVFRSSVLHSTQDLFLPFFSNVTWFHAIHVSGTNGTKRFDNPVLPFNDGVYFASTEKSNIIRGWIFGTTLDSKTQSLLIVNNATNVVIKVCEFQFCNDPFLGVYYHKNNKSWMESEFRVYSSANNCTFEYVSQPFLMDLEGKQGNFKNLREFVFKNIDGYFKIYSKHTPINLVRDLPQGFSALEPLVDLPIGINITRFQTLLALHRSYLTPGDSSSGWTAGAAAYYVGYLQPRTFLLKYNENGTITDAVDCALDPLSETKCTLKSFTVEKGIYQTSNFRVQPTESIVRFPNITNLCPFGEVFNATRFASVYAWNRKRISNCVADYSVLYNSASFSTFKCYGVSPTKLNDLCFTNVYADSFVIRGDEVRQIAPGQTGKIADYNYKLPDDFTGCVIAWNSNNLDSKVGGNYNYLYRLFRKSNLKPFERDISTEIYQAGSTPCNGVEGFNCYFPLQSYGFQPTNGVGYQPYRVVVLSFELLHAPATVCGPKKSTNLVKNKCVNFNFNGLTGTGVLTESNKKFLPFQQFGRDIADTTDAVRDPQTLEILDITPCSFGGVSVITPGTNTSNQVAVLYQGVNCTEVPVAIHADQLTPTWRVYSTGSNVFQTRAGCLIGAEHVNNSYECDIPIGAGICASYQTQTNSPRRARSVASQSIIAYTMSLGAENSVAYSNNSIAIPTNFTISVTTEILPVSMTKTSVDCTMYICGDSTECSNLLLQYGSFCTQLNRALTGIAVEQDKNTQEVFAQVKQIYKTPPIKDFGGFNFSQILPDPSKPSKRSFIEDLLFNKVTLADAGFIKQYGDCLGDIVARDLICAQKFNGLTVLPPLLTDEMIAQYTSALLAGTITSGWTFGAGAALQIPFAMQMAYRFNGIGVTQCVLYENQKLIANQFNSAIGKIQDSLSSTASALGKLQDVVNQNAQALNTLVKQLSSNFGAISSVLNDILSRLDKVEAEVQIDRLITGRLQSLQTYVTQQLIRAAEIRASANLAATKMSECVLGQSKRVDFCGKGYHLMSFPQSAPHGVVFLHVTYVPAQEKNFTTAPAICHDGKAHFPREGVFVSNGTHWFVTQRNFYEPQIITTDNTFVCGNCDVVIGIVNNTVYDPLQPELDSFKEELDKYFKNHTSPDVDLGDISGINASVVNIQKEIDRLNEVAKNLNESLIDLQELGKYEQYIKGGSGYIPEAPRDGQAYVRKDGEWVLLSTFL

SEQ ID NO: 13766 - protein, 1241 aa, Artificial Sequence
  SARS-CoV-2/USA/WA-UW291/2020__EPI_ISL_418076 spike protein (1-1211)(N914C_S1123C) Foldon construct
MFVFLVLLPLVSSQCVNLTTRTQLPPAYTNSFTRGVYYPDKVFRSSVLHSTQDLFLPFFSNVTWFHAIHVSGTNGTKRFDNPVLPFNDGVYFASTEKSNIIRGWIFGTTLDSKTQSLLIVNNATNVVIKVCEFQFCNDPFLGVYYHKNNKSWMESEFRVYSSANNCTFEYVSQPFLMDLEGKQGNFKNLREFVFKNIDGYFKIYSKHTPINLVRDLPQGFSALEPLVDLPIGINITRFQTLLALHRSYLTPGDSSSGWTAGAAAYYVGYLQPRTFLLKYNENGTITDAVDCALDPLSETKCTLKSFTVEKGIYQTSNFRVQPTESIVRFPNITNLCPFGEVFNATRFASVYAWNRKRISNCVADYSVLYNSASFSTFKCYGVSPTKLNDLCFTNVYADSFVIRGDEVRQIAPGQTGKIADYNYKLPDDFTGCVIAWNSNNLDSKVGGNYNYLYRLFRKSNLKPFERDISTEIYQAGSTPCNGVEGFNCYFPLQSYGFQPTNGVGYQPYRVVVLSFELLHAPATVCGPKKSTNLVKNKCVNFNFNGLTGTGVLTESNKKFLPFQQFGRDIADTTDAVRDPQTLEILDITPCSFGGVSVITPGTNTSNQVAVLYQGVNCTEVPVAIHADQLTPTWRVYSTGSNVFQTRAGCLIGAEHVNNSYECDIPIGAGICASYQTQTNSPRRARSVASQSIIAYTMSLGAENSVAYSNNSIAIPTNFTISVTTEILPVSMTKTSVDCTMYICGDSTECSNLLLQYGSFCTQLNRALTGIAVEQDKNTQEVFAQVKQIYKTPPIKDFGGFNFSQILPDPSKPSKRSFIEDLLFNKVTLADAGFIKQYGDCLGDIAARDLICAQKFNGLTVLPPLLTDEMIAQYTSALLAGTITSGWTFGAGAALQIPFAMQMAYRFNGIGVTQCVLYENQKLIANQFNSAIGKIQYSLSSTASALGKLQDVVNQNAQALNTLVKQLSSNFGAISSVLNDILSRLDKVEAEVQIDRLITGRLQSLQTYVTQQLIRAAEIRASANLAATKMSECVLGQSKRVDFCGKGYHLMSFPQSAPHGVVFLHVTYVPAQEKNFTTAPAICHDGKAHFPREGVFVSNGTHWFVTQRNFYEPQIITTDNTFVCGNCDVVIGIVNNTVYDPLQPELDSFKEELDKYFKNHTSPDVDLGDISGINASVVNIQKEIDRLNEVAKNLNESLIDLQELGKYEQYIKGGSGYIPEAPRDGQAYVRKDGEWVLLSTFL

SEQ ID NO: 13767 - protein, 1241 aa, Artificial Sequence; identical to SEQ ID NO: 13730
  SARS-CoV-2/Portugal/PT0034/2020__EPI_ISL_418019 spike protein (1-1211)(N914C_S1123C) Foldon construct

SEQ ID NO: 13768 - protein, 1241 aa, Artificial Sequence
  SARS-CoV-2/Iceland/202/2020__EPI_ISL_417750 spike protein (1-1211)(N914C_S1123C) Foldon construct
MFVFLVLLPLVSSQCVNLTTRTQLPPAYTNSFTRGVYYPDKVFRSSVLHSTQDLFLPFFSNVTWFHAIHVSGTNGTKRFDNPVLPFNDGVYFASTEKSNIIRGWIFGTTLDSKTQSLLIVNNATNVVIKVCEFQFCNDPFLGVYYHKNNKSWMESEFRVYSSANNCTFEYVSQPFLMDLEGKQGNFKNLREFVFKNIDGYFKIYSKHTPINLVRDLPQGFSALEPLVDLPIGINITRFQTLLALHRSYLTPGDSSSGWTAGAAAYYVGYLQPRTFLLKYNENGTITDAVDCALDPLSETKCTLKSFTVEKGIYQTSNFRVQPTESIVRFPNITNLCPFGEVFNATRFASVYAWNRKRISNCVADYSVLYNSASFSTFKCYGVSPTKLNDLCFTNVYADSFVIRGDEVRQIAPGQTGKIADYNYKLPDDFTGCVIAWNSNNLDSKVGGNYNYLYRLFRKSNLKPFERDISTEIYQAGSTPCNGVEGFNCYFPLQSYGFQPTNGVGYQPYRVVVLSFELLHAPATVCGPKKSTNLVKNKCVNFNFNGLTGTGVLTESNKKFLPFQQFGRDIADTTDAVRDPQTLEILDITPCSFGGVSVITPGTNTSNQVAVLYQDVNCTEVPVAIHADQLTPTWRVYSTGSNVFQTRAGCLIGAEHVNNSYECDIPIGAGICASYQTQTNSPRRARSVASQSIIAYTMSLGAENSVAYSNNSIAIPTNFTISVTTEILPVSMTKTSVDCTMYICGDSTECSNLLLQYGSFCTQLNRALTGIAVEQDKNTQEVFAQVKQIYKTPPIKDFGGFNFSQILPDPSKPSKRSFIEDLLFNKVTLADAGFIKQYGDCLGDIAARDLICAQKFNGLTVLPPLLTDEMIAQYTSALLAGTITSGWTFGAGAALQIPFAMQMAYRFNGIGVTQCVLYENQKLIANQFNSAIGKIQDSLSSTASALGKLQDVVNQNAQALNTLVKQLSSNFGAISSVLNDILSRLDKVEAEVQIDRLITGRLQSLQTYVTQQLIRAAEIRASANLAATKMSECVLGQSKRVDFCGKGYHLMSFPQSAPHGVVFLHVTYVPAQEKNFTTAPAICHDGKAHFPREGVFVSNGTHWFVTQRNFYEPQIITTDNTFVCGNCDVVIGIVNNTVYDPLQPELDSFKEELDKYFKNHTSPDVDLGDIPGINASVVNIQKEIDRLNEVAKNLNESLIDLQELGKYEQYIKGGSGYIPEAPRDGQAYVRKDGEWVLLSTFL

SEQ ID NO: 13769 - protein, 1241 aa, Artificial Sequence
  SARS-CoV-2/USA/WA-UW261/2020__EPI_ISL_418046 spike protein (1-1211)(N914C_S1123C) Foldon construct
MFVFLVLLPLVSSQCVNLTTRTQLPPAYTNSFTRGVYYPDKVFRSSVLHSTQDLFLPFFSNVTWFHAIHVSGTNGTKRFDNPVLPFNDGVYFASTEKSNIIRGWIFGTTLDSKTQSLLIVNNATNVVIKVCEFQFCNDPFLGVYYHKNNKSWMESEFRVYSSANNCTFEYVSQPFLMDLEGKQGNFKNLREFVFKNIDGYFKIYSKHTPINLVRDLPQGFSALEPLVDLPIGINITRFQTLLALHRSYLTPGDSSSGWTAGAAAYYVGYLQPRTFLLKYNENGTITDAVDCALDPLSETKCTLKSFTVEKGIYQTSNFRVQPTESIVRFPNITNLCPFGEVFNATRFTSVYAWNRKRISNCVADYSVLYNSASFSTFKCYGVSPTKLNDLCFTNVYADSFVIRGDEVRQIAPGQTGKIADYNYKLPDDFTGCVIAWNSNNLDSKVGGNYNYLYRLFRKSNLKPFERDISTEIYQAGSTPCNGVEGFNCYFPLQSYGFQPTNGVGYQPYRVVVLSFELLHAPATVCGPKKSTNLVKNKCVNFNFNGLTGTGVLTESNKKFLPFQQFGRDIADTTDAVRDPQTLEILDITPCSFGGVSVITPGTNTSNQVAVLYQDVNCTEVPVAIHADQLTPTWRVYSTGSNVFQTRAGCLIGAEHVNNSYECDIPIGAGICASYQTQTNSPRRARSVASQSIIAYTMSLGAENSVAYSNNSIAIPTNFTISVTTEILPVSMTKTSVDCTMYICGDSTECSNLLLQYGSFCTQLNRALTGIAVEQDKNTQEVFAQVKQIYKTPPIKDFGGFNFSQILPDPSKPSKRSFIEDLLFNKVTLADAGFIKQYGDCLGDIAARDLICAQKFNGLTVLPPLLTDEMIAQYTSALLAGTITSGWTFGAGAALQIPFAMQMAYRFNGIGVTQCVLYENQKLIANQFNSAIGKIQDSLSSTASALGKLQDVVNQNAQALNTLVKQLSSNFGAISSVLNDILSRLDKVEAEVQIDRLITGRLQSLQTYVTQQLIRAAEIRASANLAATKMSECVLGQSKRVDFCGKGYHLMSFPQSAPHGVVFLHVTYVPAQEKNFTTAPAICHDGKAHFPREGVFVSNGTHWFVTQRNFYEPQIITTDNTFVCGNCDVVIGIVNNTVYDPLQPELDSFKEELDKYFKNHTSPDVDLGDISGINASVVNIQKEIDRLNEVAKNLNESLIDLQELGKYEQYIKGGSGYIPEAPRDGQAYVRKDGEWVLLSTFL

SEQ ID NO: 13770 - protein, 1241 aa, Artificial Sequence
  SARS-CoV-2/Portugal/PT0035/2020__EPI_ISL_418020 spike protein (1-1211)(N914C_S1123C) Foldon construct
MFVFLVLLPLVSSQCVNLTTRTQLPPAYTNSFTRGVYYPDKVFRSSVLHSTQDLFLPFFSNVTWFHAIHVSGTNGTKRFDNPVLPFNDGVYFASTEKSNIIRGWIFGTTLDSKTQSLLIVNNATNVVIKVCEFQFCNDPFLGVYYHKNNKSWMESEFRVYSSANNCTFEYVSQPFLMDLEGKQGNFKNLREFVFKNIDGYFKIYSKHTPINLVRDLPQGFSALEPLVDLPIGINITRFQTLLALHRSYLTPGDSSSGWTAGAAAYYVGYLQPRTFLLKYNENGTITDAVDCALDPLSETKCTLKSFTVEKGIYQTSNFRVQPTESIVRFPNITNLCPFGEVFNATRFASVYAWNRKRISNCVADYSVLYNSASFSTFKCYGVSPTKLNDLCFTNVYADSFVIRGDEVRQIAPGQTGKIADYNYKLPDDFTGCVIAWNSNNLDSKVGGNYNYLYRLFRKSNLKPFERDISTEIYQAGSTPCNGVEGFNCYFPLQSYGFQPTNGVGYQPYRVVVLSFELLHAPATVCGPKKSTNLVKNKCVNFNFNGLTGTGVLTESNKKFLPFQQFGRDIADTTDAVRDPQTLEILDITPCSFGGVSVITPGTNTSNQVAVLYQDVNCTEVPVAIHADQLTPTWRVYSTGSNVFQTRAGCLIGAEHVNNSYECDIPIGAGICASYQTQTNSPRRARSVASQSIIAYTMSLGAENSVAYSNNSIAIPTNFTISVTTEILPVSMTKTSVDCTMYICGDSTECSNLLLQYGSFCTQLNRALTGIAVEQDKNTQEVFAQVKQIYKTPPIKDFGGFNFSQILPDPSKPSKRSFIEDLLFNKVTLADAGFIKQYGDCLGDISARDLICAQKFNGLTVLPPLLTDEMIAQYTSALLAGTITSGWTFGAGAALQIPFAMQMAYRFNGIGVTQCVLYENQKLIANQFNSAIGKIQDSLSSTASALGKLQDVVNQNAQALNTLVKQLSSNFGAISSVLNDILSRLDKVEAEVQIDRLITGRLQSLQTYVTQQLIRAAEIRASANLAATKMSECVLGQSKRVDFCGKGYHLMSFPQSAPHGVVFLHVTYVPAQEKNFTTAPAICHDGKAHFPREGVFVSNGTHWFVTQRNFYEPQIITTDNTFVCGNCDVVIGIVNNTVYDPLQPELDSFKEELDKYFKNHTSPDVDLGDISGINASVVNIQKEIDRLNEVAKNLNESLIDLQELGKYEQYIKGGSGYIPEAPRDGQAYVRKDGEWVLLSTFL

SEQ ID NO: 13771 - protein, 1241 aa, Artificial Sequence
  SARS-CoV-2/USA/NY-NYUMC7/2020__EPI_ISL_418192 spike protein (1-1211)(N914C_S1123C) Foldon construct
MFVFLVLLPLVSSQCVNLTTRTQLPPAYTNSFTRGVYYPDKVFRSSVLHSTQDLFLPFFSNVTWFHAIHVSGTNGTKRFDNPVLPFNDGVYFASTEKSNIIRGWIFGTTLDSKTQSLLIVNNATNVVIKVCEFQFCNDPFLGVYHHKNNKSWMESEFRVYSSANNCTFEYVSQPFLMDLEGKQGNFKNLREFVFKNIDGYFKIYSKHTPINLVRDLPQGFSALEPLVDLPIGINITRFQTLLALHRSYLTPGDSSSGWTAGAAAYYVGYLQPRTFLLKYNENGTITDAVDCALDPLSETKCTLKSFTVEKGIYQTSNFRVQPTESIVRFPNITNLCPFGEVFNATRFASVYAWNRKRISNCVADYSVLYNSASFSTFKCYGVSPTKLNDLCFTNVYADSFVIRGDEVRQIAPGQTGKIADYNYKLPDDFTGCVIAWNSNNLDSKVGGNYNYLYRLFRKSNLKPFERDISTEIYQAGSTPCNGVEGFNCYFPLQSYGFQPTNGVGYQPYRVVVLSFELLHAPATVCGPKKSTNLVKNKCVNFNFNGLTGTGVLTESNKKFLPFQQFGRDIADTTDAVRDPQTLEILDITPCSFGGVSVITPGTNTSNQVAVLYQGVNCTEVPVAIHADQLTPTWRVYSTGSNVFQTRAGCLIGAEHVNNSYECDIPIGAGICASYQTQTNSPRRARSVASQSIIAYTMSLGAENSVAYSNNSIAIPTNFTISVTTEILPVSMTKTSVDCTMYICGDSTECSNLLLQYGSFCTQLNRALTGIAVEQDKNTQEVFAQVKQIYKTPPIKDFGGFNFSQILPDPSKPSKRSFIEDLLFNKVTLADAGFIKQYGDCLGDIAARDLICAQKFNGLTVLPPLLTDEMIAQYTSALLAGTITSGWTFGAGAALQIPFAMQMAYRFNGIGVTQCVLYENQKLIANQFNSAIGKIQDSLSSTASALGKLQDVVNQNAQALNTLVKQLSSNFGAISSVLNDILSRLDKVEAEVQIDRLITGRLQSLQTYVTQQLIRAAEIRASANLAATKMSECVLGQSKRVDFCGKGYHLMSFPQSAPHGVVFLHVTYVPAQEKNFTTAPAICHDGKAHFPREGVFVSNGTHWFVTQRNFYEPQIITTDNTFVCGNCDVVIGIVNNTVYDPLQPELDSFKEELDKYFKNHTSPDVDLGDISGINASVVNIQKEIDRLNEVAKNLNESLIDLQELGKYEQYIKGGSGYIPEAPRDGQAYVRKDGEWVLLSTFL

SEQ ID NO: 13772 - protein, 1241 aa, Artificial Sequence
  SARS-CoV-2/Iceland/189/2020__EPI_ISL_417709 spike protein (1-1211)(N914C_S1123C) Foldon construct
MFVFLVLLPLVSSQCVNLTTRTQLPPAYTNSFTRGVYYPDKVFRSSVLHSTQDLFLPFFSNVTWFHAIHVSGTNGTKRFDNPVLPFNDGVYFASTEKSNIIRGWIFGTTLDSKTQSLLIVNNATNVVIKVCEFQFCNDPFLGVYYHKNNKSWMESEFRVYSSANNCTFEYVSQPFLMDLEGKQGNFKNLREFVFKNIDGYFKIYSKHTPINLVRDLPQGFSALEPLVDLPIGINITRFQTLLALHRSYLTPGDSSSGWTAGAAAYYVGYLQPRTFLLKYNENGTITDAVDCALDPLSETKCTLKSFTVEKGIYQTSNFRVQPTESIVRFPNITNLCPFGEVFNATRFASVYAWNRKRISNCVADYSVLYNSASFSTFKCYGVSPTKLNDLCFTNVYADSFVIRGDEVRQIAPGQTGKIADYNYKLPDDFTGCVIAWNSNNLDSKVGGNYNYLYRLFRKSNLKPFERDISTEIYQAGSTPCNGVEGFNCYFPLQSYGFQPTNGVGYQPYRVVVLSFELLHAPATVCGPKKSTNLVKNKCVNFNFNGLTGTGVLTESNKKFLPFQQFGRDIADTTDAVRDPQTLEILDITPCSFGGVSVITPGTNTSNQVAVLYQGVNCTEVPVAIHADQLTPTWRVYSTGSNVFQTRAGCLIGAEHVNNSYECDIPIGAGICASYQTQTNSPRRARSVASQSIIAYTMSLGAENSVAYSNNSIAIPTNFTISVTTEILPVSMTKTSVDCTMYICGDSTECSNLLLQYGSFCTQLNRALTGIAVEQDKNTQEVFAQVKQIYKTPPIKDFGGFNFSQILPDPSKPSKRSFIEDLLFNKVTLADAGFTKQYGDCLGDIAARDLICAQKFNGLTVLPPLLTDEMIAQYTSALLAGTITSGWTFGAGAALQIPFAMQMAYRFNGIGVTQCVLYENQKLIANQFNSAIGKIQDSLSSTASALGKLQDVVNQNAQALNTLVKQLSSNFGAISSVLNDILSRLDKVEAEVQIDRLITGRLQSLQTYVTQQLIRAAEIRASANLAATKMSECVLGQSKRVDFCGKGYHLMSFPQSAPHGVVFLHVTYVPAQEKNFTTAPAICHDGKAHFPREGVFVSNGTHWFVTQRNFYEPQIITTDNTFVCGNCDVVIGIVNNTVYDPLQPELDSFKEELDKYFKNHTSPDVDLGDISGINASVVNIQKEIDRLNEVAKNLNESLIDLQELGKYEQYIKGGSGYIPEAPRDGQAYVRKDGEWVLLSTFL

SEQ ID NO: 13773 - protein, 1241 aa, Artificial Sequence
  SARS-CoV-2/Australia/NSW56/2020__EPI_ISL_417408 spike protein (1-1211)(N914C_S1123C) Foldon construct
MFVFLVLLPLVSSQCVNLTTRTQLPPAYTNSFTRGVYYPDKVFRSSVLHSTQDLFLPFFSNVTWFHAIHVSGTNGTKRFDNPVLPFNDGVYFASTEKSNIIRGWIFGTTLDSKTQSLLIVNNATNVVIKVCEFQFCNDPFLGVYYHKNNKSWMESEFRVYSSANNCTFEYVSQPFLMDLEGKQGNFKNLREFVFKNIDGYFKIYSKHTPINLVRDLPQGFSALEPLVDLPIGINITRFQTLLALHRSYLTPGDSSSGWTAGAAAYYVGYLQPRTFLLKYNENGTITDAVDCALDPLSETKCTLKSFTVEKGIYQTSNFRVQPTESIVRFPNITNLCPFGEVFNATRFASVYAWNRKRISNCVADYSVLYNSASFSTFKCYGVSPTKLNDLCFTNVYADSFVIRGDEVRQIAPGQTGKIADYNYKLPDDFTGCVIAWNSNNLDSKVGGNYNYLYRLFRKSNLKPFERDISTEIYQAGSTPCNGVEGFNCYFPLQSYGFQPTNGVGYQPYRVVVLSFELLHAPATVCGPKKSTNLVKNKCVNFNFNGLTGTGVLTESNKKFLPFQQFGRDIADTTDAVRDPQTLEILDITPCSFGGVSVITPGTNTSNQVAVLYQDVNCTEVPVAIHADQLTPTWRVYSTGSNVFQTRAGCLIGAEHVNNSYECDIPIGAGICASYQTQTNSPRRARSVASQSIIAYTMSLGAENSVAYSNNSIAIPTNFTISVTTEILPVSMTKTSVDCTMYICGDSTECSNLLLQYGSFCTQLNRALTGIAVEQDKNTQEVFAQVKQIYKTPPIKDFGGFNFSQILPDSSKPSKRSFIEDLLFNKVTLADAGFIKQYGDCLGDIAARDLICAQKFNGLTVLPPLLTDEMIAQYTSALLAGTITSGWTFGAGAALQIPFAMQMAYRFNGIGVTQCVLYENQKLIANQFNSAIGKIQDSLSSTASALGKLQDVVNQNAQALNTLVKQLSSNFGAISSVLNDILSRLDKVEAEVQIDRLITGRLQSLQTYVTQQLIRAAEIRASANLAATKMSECVLGQSKRVDFCGKGYHLMSFPQSAPHGVVFLHVTYVPAQEKNFTTAPAICHDGKAHFPREGVFVSNGTHWFVTQRNFYEPQIITTDNTFVCGNCDVVIGIVNNTVYDPLQPELDSFKEELDKYFKNHTSPDVDLGDISGINASVVNIQKEIDRLNEVAKNLNESLIDLQELGKYEQYIKGGSGYIPEAPRDGQAYVRKDGEWVLLSTFL

SEQ ID NO: 13774 - protein, 1241 aa, Artificial Sequence
  SARS-CoV-2/Iceland/280/2020__EPI_ISL_417608 spike protein (1-1211)(N914C_S1123C) Foldon construct
MFVFLVLLPLVSSQCVNLTTRTQLPPAYTNSFTRGVYYPDKVFRSSVLHSTQDLFLPFFSNVTWFHAIHVSGTNGTKRFDNPVLPFNDGVYFASTEKSNIIRGWIFGTTLDSKTQSLLIVNNATNVVIKVCEFQFCNDPFLGVYYHKNNKSWMESEFRVYSSANNCTFEYVSQPFLMDLEGKQGNFKNLREFVFKNIDGYFKIYSKHTPINLVRDLPQGFSALEPLVDLPIGINITRFQTLLALHRSYLTPGDSSSGWTAGAAAYYVGYLQPRTFLLKYNENGTITDAVDCALDPLSETKCTLKSFTVEKGIYQTSNFRVQPTESIVRFPNITNLCPFGEVFNATRFASVYAWNRKRISNCVADYSVLYNSASFSTFKCYGVSPTKLNDLCFTNVYADSFVIRGDEVRQIAPGQTGKIADYNYKLPDDFTGCVIAWNSNNLDSKVGGNYNYLYRLFRKSNLKPFERDISTEIYQAGSTPCNGVEGFNCYFPLQSYGFQPTNGVGYQPYRVVVLSFELLHAPATVCGPKKSTNLVKNKCVNFNFNGLTGTGVLTESNKKFLPFQQFGRDIADTTDAVRDPQTLEILDITPCSFGGVSVITPGTNTSNQVAVLYQGVNCTEVPVAIHADQLTPTWRVYSTGSNVFQTRAGCLIGAEHVNNSYECDIPIGAGICASYHTQTNSPRRARSVASQSIIAYTMSLGAENSVAYSNNSIAIPTNFTISVTTEILPVSMTKTSVDCTMYICGDSTECSNLLLQYGSFCTQLNRALTGIAVEQDKNTQEVFAQVKQIYKTPPIKDFGGFNFSQILPDPSKPSKRSFIEDLLFNKVTLADAGFIKQYGDCLGDIAARDLICAQKFNGLTVLPPLLTDEMIAQYTSALLAGTITSGWTFGAGAALQIPFAMQMAYRFNGIGVTQCVLYENQKLIANQFNSAIGKIQDSLSSTASALGKLQDVVNQNAQALNTLVKQLSSNFGAISSVLNDILSRLDKVEAEVQIDRLITGRLQSLQTYVTQQLIRAAEIRASANLAATKMSECVLGQSKRVDFCGKGYHLMSFPQSAPHGVVFLHVTYVPAQEKNFTTAPAICHDGKAHFPREGVFVSNGTHWFVTQRNFYEPQIITTDNTFVCGNCDVVIGIVNNTVYDPLQPELDSFKEELDKYFKNHTSPDVDLGDISGINASVVNIQKEIDRLNEVAKNLNESLIDLQELGKYEQYIKGGSGYIPEAPRDGQAYVRKDGEWVLLSTFL

SEQ ID NO: 13775 - protein, 1241 aa, Artificial Sequence; identical to SEQ ID NO: 13730
  SARS-CoV-2/Iceland/247/2020__EPI_ISL_417575 spike protein (1-1211)(N914C_S1123C) Foldon construct

SEQ ID NO: 13776 - protein, 1241 aa, Artificial Sequence
  SARS-CoV-2/Iceland/238/2020__EPI_ISL_417566 spike protein (1-1211)(N914C_S1123C) Foldon construct
MFVFLVLLPLVSSQCVNLTTRTQLPPAYTNSFTRGVYYPDKVFRSSVLHSTQDLFLPFFSNVTWFHAIHVSGTNGTKRFDNPVLPFNDGVYFASTEKSNIIRGWIFGTTLDSKTQSLLIVNNATNVVIKVCEFQFCNDPFLGVYYHKNNKSWMESEFRVYSSANNCTFEYVSQPFLMDLEGKQGNFKNLREFVFKNIDGYFKIYSKHTPINLVRDLPQGFSALEPLVDLPIGINITRFQTLLALHRSYLTPGDSSSGWTAGAAAYYVGYLQPRTFLLKYNENGTITDAVDCALDPLSETKCTLKSFTVEKGIYQTSNFRVQPTESIVRFPNITNLCPFGEVFNATRFASVYAWNRKRISNCVADYSVLYNSASFSTFKCYGVSPTKLNDLCFTNVYADSFVIRGDEVRQIAPGQTGKIADYNYKLPDDFTGCVIAWNSNNLDSKVGGNYNYLYRLFRKSNLKPFERDISTEIYQAGSTPCNGVEGFNCYFPLQSYGFQPTNGVGYQPYRVVVLSFELLHAPATVCGPKKSTNLVKNKCVNFNFNGLTGTGVLTESNKKFLPFQQFGRDIADTTDAVRDPQTLEILDITPCSFGGVSVITPGTNTSNQVAVLYQGVNCTEVPVAIHADQLTPTWRVYSTGSNVFQTRAGCLIGAEHVNNSYECDIPIGAGICASYQTQTNSPRRARSVASQSIIAYTMSLGAENSVAYSNNSIAIPTNFTISVTTEILPVSMTKTSVDCTMYICGDSTECSNLLLQYGSFCTQLNRALTGIAVEQDKNTQEVFAQVKQIYKTPPIKDFGGFNFSQILPDPSKPSKRSFIEDLLFNKVTLADVGFIKQYGDCLGDIAARDLICAQKFNGLTVLPPLLTDEMIAQYTSALLAGTITSGWTFGAGAALQIPFAMQMAYRFNGIGVTQCVLYENQKLIANQFNSAIGKIQDSLSSTASALGKLQDVVNQNAQALNTLVKQLSSNFGAISSVLNDILSRLDKVEAEVQIDRLITGRLQSLQTYVTQQLIRAAEIRASANLAATKMSECVLGQSKRVDFCGKGYHLMSFPQSAPHGVVFLHVTYVPAQEKNFTTAPAICHDGKAHFPREGVFVSNGTHWFVTQRNFYEPQIITTDNTFVCGNCDVVIGIVNNTVYDPLQPELDSFKEELDKYFKNHTSPDVDLGDISGINASVVNIQKEIDRLNEVAKNLNESLIDLQELGKYEQYIKGGSGYIPEAPRDGQAYVRKDGEWVLLSTFL

SEQ ID NO: 13777 - protein, 1241 aa, Artificial Sequence
  SARS-CoV-2/Greece/16/2020__EPI_ISL_418265 spike protein (1-1211)(N914C_S1123C) Foldon construct
MFVFLVLLPLVSSQCVNLTTRTQLPPAYTNSFTRGVYYPDKVFRSSVLHSTQDLFLPFFSNVTWFHAIHVSGTNGTKRFDNPVLPFNDGVYFASTEKSNIIRGWIFGTTLDSKTQSLLIVNNATNVVIKVCEFQFCNDPFLGVYYHKNNKSWMESEFRVYSSANNCTFEYVSQPFLMDLEGKQGNFKNLREFVFKNVDGYFKIYSKHTPINLVRDLPQGFSALEPLVDLPIGINITRFQTLLALHRSYLTPGDSSSGWTAGAAAYYVGYLQPRTFLLKYNENGTITDAVDCALDPLSETKCTLKSFTVEKGIYQTSNFRVQPTESIVRFPNITNLCPFGEVFNATRFASVYAWNRKRISNCVADYSVLYNSASFSTFKCYGVSPTKLNDLCFTNVYADSFVIRGDEVRQIAPGQTGKIADYNYKLPDDFTGCVIAWNSNNLDSKVGGNYNYLYRLFRKSNLKPFERDISTEIYQAGSTPCNGVEGFNCYFPLQSYGFQPTNGVGYQPYRVVVLSFELLHAPATVCGPKKSTNLVKNKCVNFNFNGLTGTGVLTESNKKFLPFQQFGRDIADTTDAVRDPQTLEILDITPCSFGGVSVITPGTNTSNQVAVLYQDVNCTEVPVAIHADQLTPTWRVYSTGSNVFQTRAGCLIGAEHVNNSYECDIPIGAGICASYQTQTNSPRRARSVASQSIIAYTMSLGAENSVAYSNNSIAIPTNFTISVTTEILPVSMTKTSVDCTMYICGDSTECSNLLLQYGSFCTQLNRALTGIAVEQDKNTQEVFAQVKQIYKTPPIKDFGGFNFSQILPDPSKPSKRSFIEDLLFNKVTLADAGFIKQYGDCLGDIAARDLICAQKFNGLTVLPPLLTDEMIAQYTSALLAGTITSGWTFGAGAALQIPFAMQMAYRFNGIGVTQCVLYENQKLIANQFNSAIGKIQDSLSSTASALGKLQDVVNQNAQALNTLVKQLSSNFGAISSVLNDILSRLDKVEAEVQIDRLITGRLQSLQTYVTQQLIRAAEIRASANLAATKMSECVLGQSKRVDFCGKGYHLMSFPQSAPHGVVFLHVTYVPAQEKNFTTAPAICHDGKAHFPREGVFVSNGTHWFVTQRNFYEPQIITTDNTFVCGNCDVVIGIVNNTVYDPLQPELDSFKEELDKYFKNHTSPDVDLGDISGINASVVNIQKEIDRLNEVAKNLNESLIDLQELGKYEQYIKGGSGYIPEAPRDGQAYVRKDGEWVLLSTFL

SEQ ID NO: 13778 - protein, 1241 aa, Artificial Sequence
  SARS-CoV-2/Iceland/319/2020__EPI_ISL_417648 spike protein (1-1211)(N914C_S1123C) Foldon construct
MFVFLVLLPLVSSQCVNLTTRTQLPPAYTNSFTRGVYYPDKVFRSSVLHSTQDLFLPFFSNVTWFHAIHVSGTNGTKRFDNPVLPFNDGVYFASTEKSNIIRGWIFGTTLDSKTQSLLIVNNATNVVIKVCEFQFCNDPFLGVYYHKNNKSWMESEFRVYSSANNCTFEYVSQPFLIDLEGKQGNFKNLREFVFKNIDGYFKIYSKHTPINLVRDLPQGFSALEPLVDLPIGINITRFQTLLALHRSYLTPGDSSSGWTAGAAAYYVGYLQPRTFLLKYNENGTITDAVDCALDPLSETKCTLKSFTVEKGIYQTSNFRVQPTESIVRFPNITNLCPFGEVFNATRFASVYAWNRKRISNCVADYSVLYNSASFSTFKCYGVSPTKLNDLCFTNVYADSFVIRGDEVRQIAPGQTGKIADYNYKLPDDFTGCVIAWNSNNLDSKVGGNYNYLYRLFRKSNLKPFERDISTEIYQAGSTPCNGVEGFNCYFPLQSYGFQPTNGVGYQPYRVVVLSFELLHAPATVCGPKKSTNLVKNKCVNFNFNGLTGTGVLTESNKKFLPFQQFGRDIADTTDAVRDPQTLEILDITPCSFGGVSVITPGTNTSNQVAVLYQGVNCTEVPVAIHADQLTPTWRVYSTGSNVFQTRAGCLIGAEHVNNSYECDIPIGAGICASYQTQTNSPRRARSVASQSIIAYTMSLGAENSVAYSNNSIAIPTNFTISVTTEILPVSMTKTSVDCTMYICGDSTECSNLLLQYGSFCTQLNRALTGIAVEQDKNTQEVFAQVKQIYKTPPIKDFGGFNFSQILPDPSKPSKRSFIEDLLFNKVTLADAGFIKQYGDCLGDIAARDLICAQKFNGLTVLPPLLTDEMIAQYTSALLAGTITSGWTFGAGAALQIPFAMQMAYRFNGIGVTQCVLYENQKLIANQFNSAIGKIQDSLSSTASALGKLQDVVNQNAQALNTLVKQLSSNFGAISSVLNDILSRLDKVEAEVQIDRLITGRLQSLQTYVTQQLIRAAEIRASANLAATKMSECVLGQSKRVDFCGKGYHLMSFPQSAPHGVVFLHVTYVPAQEKNFTTAPAICHDGKAHFPREGVFVSNGTHWFVTQRNFYEPQIITTDNTFVCGNCDVVIGIVNNTVYDPLQPELDSFKEELDKYFKNHTSPDVDLGDISGINASVVNIQKEIDRLNEVAKNLNESLIDLQELGKYEQYIKGGSGYIPEAPRDGQAYVRKDGEWVLLSTFL

SEQ ID NO: 13779 - protein, 1241 aa, Artificial Sequence
  SARS-CoV-2/Congo/94/2020__EPI_ISL_417947 spike protein (1-1211)(N914C_S1123C) Foldon construct
MFVFLVLLPLVSSQCVNLTTRTQLPPAYTNSFTRGVYYPDKVFRSSVLHSTQDLFLPFFSNVTWFHAIHVSGTNGTKRFDNPVLPFNDGVYFASTEKSNIIRGWIFGTTLDSKTQSLLIVNNATNVVIKVCEFQFCNDPFLGVYYHKNNKSWMESEFRVYSSANNCTFEYVSQPFLMDLEGKQGNFKNLREFVFKNIDGYFKIYSKHTPINLVRDLPQGFSALEPLVDLPIGINITRFQTLLALHRSYLTPGDSSSGWTAGAAAYYVGYLQPRTFLLKYNENGTITDAVDCALDPLSETKCTLKSFTVEKGIYQTSNFRVQPTESIVRFPNITNLCPFGEVFNATRFASVYAWNRKRISNCVADYSVLYNSASFSTFKCYGVSPTKLNDLCFTNVYADSFVIRGDEVRQIAPGQTGKIADYNYKLPDDFTGCVIAWNSNNLDSKVGGNYNYLYRLFRKSNLKPFERDISTEIYQAGSTPCNGVEGFNCYFPLQSYGFQPTNGVGYQPYRVVVLSFELLHAPATVCGPKKSTNLVKNKCVNFNFNGLTGTGVLTESNKKFLPFQQFGRDIADTTDAVRDPQTLEILDITPCSFGGVSVITPGTNTSNQVAVLYQGVNCTEVPVAIHADQLTPTWRVYSTGSNVFQTRAGCLIGAEHVNNSYECDIPIGAGICASYQTQTNSPRRARSVASQSIIAYTMSLGAENSVAYSNNSIAIPTNFTISVTTEILPVSMTKTSVDCTMYICGDSTECSNLLLQYGSFCTQLNRALTGIAVEQDKNTQEVFAQVKQIYKTPPIKDFGGFNFSQILPDPSKPSKRSFIEDILFNKVTLADAGFIKQYGDCLGDIAARDLICAQKFNGLTVLPPLLTDEMIAQYTSALLAGTITSGWTFGAGAALQIPFAMQMAYRFNGIGVTQCVLYENQKLIANQFNSAIGKIQDSLSSTASALGKLQDVVNQNAQALNTLVKQLSSNFGAISSVLNDILSRLDKVEAEVQIDRLITGRLQSLQTYVTQQLIRAAEIRASANLAATKMSECVLGQSKRVDFCGKGYHLMSFPQSAPHGVVFLHVTYVPAQEKNFTTAPAICHDGKAHFPREGVFVSNGTHWFVTQRNFYEPQIITTDNTFVCGNCDVVIGIVNNTVYDPLQPELDSFKEELDKYFKNHTSPDVDLGDISGINASVVNIQKEIDRLNEVAKNLNESLIDLQELGKYEQYIKGGSGYIPEAPRDGQAYVRKDGEWVLLSTFL

SEQ ID NO: 13780 - protein, 1241 aa, Artificial Sequence
  SARS-CoV-2/Congo/158/2020__EPI_ISL_417950 spike protein (1-1211)(N914C_S1123C) Foldon construct
MFVFLVLLPLVSSQCVNLTTRTQLPPAYTNSFTRGVYYPDKVFRSSVLHSTQDLFLPFFSNVTWFHAIHVSGTNGTKRFDNPVLPFNDGVYFASTEKSNIIRGWIFGTTLDSKTQSLLIVNNATNVVIKVCEFQFCNDPFLGVYYHKNNKSWMESEFRVYSSANNCTFEYVSQPFLMDLEGKQGNFKNLREFVFKNIDGYFKIYSKHTPINLVRDLPQGFSALEPLVDLPIGINITRFQTLLALHRSYLTPGDSSSGWTAGAAAYYVGYLQPRTFLLKYNENGTITDAVDCALDPLSETKCTLKSFTVEKGIYQTSNFRVQPTESIVRFPNITNLCPFGEVFNATRFASVYAWNRKRISNCVADYSVLYNSASFSTFKCYGVSPTKLNDLCFTNVYADSFVIRGDEVRQIAPGQTGKIADYNYKLPDDFTGCVIAWNSNNLDSKVGGNYNYLYRLFRKSNLKPFERDISTEIYQAGSTPCNGVEGFNCYFPLQSYGFQPTNGVGYQPYRVVVLSFELLHAPATVCGPKKSTNLVKNKCVNFNFNGLTGTGVLTESNKKFLPFQQFGRDIADTTDAVRDPQTLEILDITPCSFGGVSVITPGTNTSNQVAVLYQDVNCTEVPVAIHADQLTPTWRVYSTGSNVFQTRAGCLIGAEHVNNSYECDIPIGAGICASYQTQTNSPRRARSVASQSIIAYTMSLGAENSVAYSNNSIAIPTNFTISVTTEILPVSMTKTSVDCTMYICGDSTECSNLLLQYGSFCTQLNRALTGIAVEQDKNTQEVFAQVKQIYKTPPIKDFGGFNFSQILPDPSKPSKRSFIEDLLFNKVTLADAGFIKQYGDCLGDIAARDLICAQKFNGLTVLPPLLTDEMIAQYTSALLAGTITSGWTFGAGAALQIPFAMQMAYRFNGIGVTQCVLYENQKLIANQFNSAIGKIQDSLSSTASALGKLQDVVNQNAQALNTLVKQLSSNFGAISSVLNDILSRLDKVEAEVQIDRLITGRLQSLQTYVTQQLIRAAEIRASANLAATKMSECVLGQSKRVDFCGKGYHLMSFPQSAPHGVVFLHVTYVPAQEKNFTTAPAICHDGKAHFPREGVFVSNGTHWFVTQRNFYEPQIITTDNTFLCGNCDVVIGIVNNTVYDPLQPELDSFKEELDKYFKNHTSPDVDLGDISGINASVVNIQKEIDRLNEVAKNLNESLIDLQELGKYEQYIKGGSGYIPEAPRDGQAYVRKDGEWVLLSTFL

SEQ ID NO: 13781 - protein, 1241 aa, Artificial Sequence
  SARS-CoV-2/USA/UT-00034/2020__EPI_ISL_417977 spike protein (1-1211)(N914C_S1123C) Foldon construct
MFVFLVLLPLVSSQCVNLTTRTQLPPAYTNSFTRGVYYPDKVFRSSVLHSTQDLFLPFFSNVTWFHAIHVSGTNGTKRFDNPVLPFNDGVYFASTEKSNIIRGWIFGTTLDSKTQSLLIVNNATNVVIKVCEFQFCNDPFLGVYYYKNNKSWMESEFRVYSSANNCTFEYVSQPFLMDLEGKQGNFKNLREFVFKNIDGYFKIYSKHTPINLVRDLPQGFSALEPLVDLPIGINITRFQTLLALHRSYLTPGDSSSGWTAGAAAYYVGYLQPRTFLLKYNENGTITDAVDCALDPLSETKCTLKSFTVEKGIYQTSNFRVQPTESIVRFPNITNLCPFGEVFNATRFASVYAWNRKRISNCVADYSVLYNSASFSTFKCYGVSPTKLNDLCFTNVYADSFVIRGDEVRQIAPGQTGKIADYNYKLPDDFTGCVIAWNSNNLDSKVGGNYNYLYRLFRKSNLKPFERDISTEIYQAGSTPCNGVEGFNCYFPLQSYGFQPTNGVGYQPYRVVVLSFELLHAPATVCGPKKSTNLVKNKCVNFNFNGLTGTGVLTESNKKFLPFQQFGRDIADTTDAVRDPQTLEILDITPCSFGGVSVITPGTNTSNQVAVLYQGVNCTEVPVAIHADQLTPTWRVYSTGSNVFQTRAGCLIGAEHVNNSYECDIPIGAGICASYQTQTNSPRRARSVASQSIIAYTMSLGAENSVAYSNNSIAIPTNFTISVTTEILPVSMTKTSVDCTMYICGDSTECSNLLLQYGSFCTQLNRALTGIAVEQDKNTQEVFAQVKQIYKTPPIKDFGGFNFSQILPDPSKPSKRSFIEDLLFNKVTLADAGFIKQYGDCLGDIAARDLICAQKFNGLTVLPPLLTDEMIAQYTSALLAGTITSGWTFGAGAALQIPFAMQMAYRFNGIGVTQCVLYENQKLIANQFNSAIGKIQDSLSSTASALGKLQDVVNQNAQALNTLVKQLSSNFGAISSVLNDILSRLDKVEAEVQIDRLITGRLQSLQTYVTQQLIRAAEIRASANLAATKMSECVLGQSKRVDFCGKGYHLMSFPQSAPHGVVFLHVTYVPAQEKNFTTAPAICHDGKAHFPREGVFVSNGTHWFVTQRNFYEPQIITTDNTFVCGNCDVVIGIVNNTVYDPLQPELDSFKEELDKYFKNHTSPDVDLGDISGINASVVNIQKEIDRLNEVAKNLNESLIDLQELGKYEQYIKGGSGYIPEAPRDGQAYVRKDGEWVLLSTFL

SEQ ID NO: 13782 - protein, 1241 aa, Artificial Sequence
  SARS-CoV-2/USA/UT-00033/2020__EPI_ISL_417976 spike protein (1-1211)(N914C_S1123C) Foldon construct
MFVFLVLLPLVSSQCVNLTTRTQLPPAYTNSFTRGVYYPDKVFRSSVLHSTQDLFLPFFSNVTWFHAIHVSGTNGTKRFDNPVLPFNDGVYFASTEKSNIIRGWIFGTTLDSKTQSLLIVNNATNVVIKVCEFQFCNDPFLGVYYHKNNKSWMESEFRVYSSANNCTFEYVSQPFLMDLEGKQGNFKNLREFVFKNIDGYFKIYSKHTPINLVRDLPQGFSALEPLVDLPIGINITRFQTLLALHRSYLTPGDSSSGLTAGAAAYYVGYLQPRTFLLKYNENGTITDAVDCALDPLSETKCTLKSFTVEKGIYQTSNFRVQPTESIVRFPNITNLCPFGEVFNATRFASVYAWNRKRISNCVADYSVLYNSASFSTFKCYGVSPTKLNDLCFTNVYADSFVIRGDEVRQIAPGQTGKIADYNYKLPDDFTGCVIAWNSNNLDSKVGGNYNYLYRLFRKSNLKPFERDISTEIYQAGSTPCNGVEGFNCYFPLQSYGFQPTNGVGYQPYRVVVLSFELLHAPATVCGPKKSTNLVKNKCVNFNFNGLTGTGVLTESNKKFLPFQQFGRDIADTTDAVRDPQTLEILDITPCSFGGVSVITPGTNTSNQVAVLYQGVNCTEVPVAIHADQLTPTWRVYSTGSNVFQTRAGCLIGAEHVNNSYECDIPIGAGICASYQTQTNSPRRARSVASQSIIAYTMSLGAENSVAYSNNSIAIPTNFTISVTTEILPVSMTKTSVDCTMYICGDSTECSNLLLQYGSFCTQLNRALTGIAVEQDKNTQEVFAQVKQIYKTPPIKDFGGFNFSQILPDPSKPSKRSFIEDLLFNKVTLADAGFIKQYGDCLGDIAARDLICAQKFNGLTVLPPLLTDEMIAQYTSALLAGTITSGWTFGAGAALQIPFAMQMAYRFNGIGVTQCVLYENQKLIANQFNSAIGKIQDSLSSTASALGKLQDVVNQNAQALNTLVKQLSSNFGAISSVLNDILSRLDKVEAEVQIDRLITGRLQSLQTYVTQQLIRAAEIRASANLAATKMSECVLGQSKRVDFCGKGYHLMSFPQSAPHGVVFLHVTYVPAQEKNFTTAPAICHDGKAHFPREGVFVSNGTHWFVTQRNFYEPQIITTDNTFVCGNCDVVIGIVNNTVYDPLQPELDSFKEELDKYFKNHTSPDVDLGDISGINASVVNIQKEIDRLNEVAKNLNESLIDLQELGKYEQYIKGGSGYIPEAPRDGQAYVRKDGEWVLLSTFL

SEQ ID NO: 13783 - protein, 1241 aa, Artificial Sequence
  SARS-CoV-2/USA/WI-13/2020__EPI_ISL_417516 spike protein (1-1211)(N914C_S1123C) Foldon construct
MFVFLVLLPLVSSQCVNLTTRTQLPPAYTNSFTRGVYYPDKVFRSSVLHSTQDLFLPFFSNVTWFHAIHVSGTNGTKRFDNPVLPFNDGVYFASTEKSNIIRGWIFGTTLDSKTQSLLIVNNATNVVIKVCEFQFCNDPFLGVYYHKNNKSWMESEFRVYSSANNCTFEYVSQPFLMDLEGKQGNFKNLREFVFKNIDGYFKIYSKHTPINLVRDLPQGFSALEPLVDLPIGINITRFQTLLALHRSYLTPGDSSSGWTAGAAAYYVGYLQPRTFLLKYNENGTITDAVDCALDPLSETKCTLKSFTVEKGIYQTSNFRVLPTESIVRFPNITNLCPFGEVFNATRFASVYAWNRKRISNCVADYSVLYNSASFSTFKCYGVSPTKLNDLCFTNVYADSFVIRGDEVRQIAPGQTGKIADYNYKLPDDFTGCVIAWNSNNLDSKVGGNYNYLYRLFRKSNLKPFERDISTEIYQAGSTPCNGVEGFNCYFPLQSYGFQPTNGVGYQPYRVVVLSFELLHAPATVCGPKKSTNLVKNKCVNFNFNGLTGTGVLTESNKKFLPFQQFGRDIADTTDAVRDPQTLEILDITPCSFGGVSVITPGTNTSNQVAVLYQGVNCTEVPVAIHADQLTPTWRVYSTGSNVFQTRAGCLIGAEHVNNSYECDIPIGAGICASYQTQTNSPRRARSVASQSIIAYTMSLGAENSVAYSNNSIAIPTNFTISVTTEILPVSMTKTSVDCTMYICGDSTECSNLLLQYGSFCTQLNRALTGIAVEQDKNTQEVFAQVKQIYKTPPIKDFGGFNFSQILPDPSKPSKRSFIEDLLFNKVTLADAGFIKQYGDCLGDIAARDLICAQKFNGLTVLPPLLTDEMIAQYTSALLAGTITSGWTFGAGAALQIPFAMQMAYRFNGIGVTQCVLYENQKLIANQFNSAIGKIQDSLSSTASALGKLQDVVNQNAQALNTLVKQLSSNFGAISSVLNDILSRLDKVEAEVQIDRLITGRLQSLQTYVTQQLIRAAEIRASANLAATKMSECVLGQSKRVDFCGKGYHLMSFPQSAPHGVVFLHVTYVPAQEKNFTTAPAICHDGKAHFPREGVFVSNGTHWFVTQRNFYEPQIITTDNTFVCGNCDVVIGIVNNTVYDPLQPELDSFKEELDKYFKNHTSPDVDLGDISGINASVVNIQKEIDRLNEVAKNLNESLIDLQELGKYEQYIKGGSGYIPEAPRDGQAYVRKDGEWVLLSTFL

SEQ ID NO: 13784 - protein, 1240 aa, Artificial Sequence
  SARS-CoV-2/India/1-27/2020__EPI_ISL_413522 spike protein (1-1210)(N913C_S1122C) Foldon construct
MFVFLVLLPLVSSQCVNLTTRTQLPPAYTNSFTRGVYYPDKVFRSSVLHSTQDLFLPFFSNVTWFHAIHVSGTNGTKRFDNPVLPFNDGVYFASTEKSNIIRGWIFGTTLDSKTQSLLIVNNATNVVIKVCEFQFCNDPFLGVYHKNNKSWMESEFRVYSSANNCTFEYVSQPFLMDLEGKQGNFKNLREFVFKNIDGYFKIYSKHTPINLVRDLPQGFSALEPLVDLPIGINITRFQTLLALHRSYLTPGDSSSGWTAGAAAYYVGYLQPRTFLLKYNENGTITDAVDCALDPLSETKCTLKSFTVEKGIYQTSNFRVQPTESIVRFPNITNLCPFGEVFNATRFASVYAWNRKRISNCVADYSVLYNSASFSTFKCYGVSPTKLNDLCFTNVYADSFVIRGDEVIQIAPGQTGKIADYNYKLPDDFTGCVIAWNSNNLDSKVGGNYNYLYRLFRKSNLKPFERDISTEIYQAGSTPCNGVEGFNCYFPLQSYGFQPTNGVGYQPYRVVVLSFELLHAPATVCGPKKSTNLVKNKCVNFNFNGLTGTGVLTESNKKFLPFQQFGRDIADTTDAVRDPQTLEILDITPCSFGGVSVITPGTNTSNQVAVLYQDVNCTEVPVAIHADQLTPTWRVYSTGSNVFQTRAGCLIGAEHVNNSYECDIPIGAGICASYQTQTNSPRRARSVASQSIIAYTMSLGAENSVAYSNNSIAIPTNFTISVTTEILPVSMTKTSVDCTMYICGDSTECSNLLLQYGSFCTQLNRALTGIAVEQDKNTQEVFAQVKQIYKTPPIKDFGGFNFSQILPDPSKPSKRSFIEDLLFNKVTLADAGFIKQYGDCLGDIAARDLICAQKFNGLTVLPPLLTDEMIAQYTSALLAGTITSGWTFGAGAALQIPFAMQMAYRFNGIGVTQCVLYENQKLIANQFNSAIGKIQDSLSSTASALGKLQDVVNQNAQALNTLVKQLSSNFGAISSVLNDILSRLDKVEAEVQIDRLITGRLQSLQTYVTQQLIRAAEIRASANLAATKMSECVLGQSKRVDFCGKGYHLMSFPQSAPHGVVFLHVTYVPAQEKNFTTAPAICHDGKAHFPREGVFVSNGTHWFVTQRNFYEPQIITTDNTFVCGNCDVVIGIVNNTVYDPLQPELDSFKEELDKYFKNHTSPDVDLGDISGINASVVNIQKEIDRLNEVAKNLNESLIDLQELGKYEQYIKGGSGYIPEAPRDGQAYVRKDGEWVLLSTFL

SEQ ID NO: 13785 - protein, 1235 aa, Artificial Sequence
  SARS-CoV-2/pangolin/Guangxi/P4L/2017__EPI_ISL_410538 spike protein (1-1205)(N908C_S1117C) Foldon construct
MFVFLFVLPLVSSQCVNLTTRTGIPPGYTNSSTRGVYYPDKVFRSSILHLTQDLFLPFFSNVTWFNTINYQGGFKKFDNPVLPFNDGVYFASTEKSNIIRGWIFGTTLDARTQSLLIVNNATNVVIKVCEFQFCTDPFLGVYYHNNNKTWVENEFRVYSSANNCTFEYISQPFLMDLEGKQGNFKNLREFVFKNVDGYFKIYSKHTPIDLVRDLPRGFAALEPLVDLPIGINITRFQTLLALHRSYLTPGNLESGWTTGAAAYYVGYLQQRTFLLSYNQNGTITDAVDCSLDPLSETKCTLKSLTVEKGIYQTSNFRVQPTISIVRFPNITNLCPFGEVFNASKFASVYAWNRKRISNCVADYSVLYNSTSFSTFKCYGVSPTKLNDLCFTNVYADSFVVKGDEVRQIAPGQTGVIADYNYKLPDDFTGCVIAWNSVKQDALTGGNYGYLYRLFRKSKLKPFERDISTEIYQAGSTPCNGQVGLNCYYPLERYGFHPTTGVNYQPFRVVVLSFELLNGPATVCGPKLSTTLVKDKCVNFNFNGLTGTGVLTTSKKQFLPFQQFGRDISDTTDAVRDPQTLEILDITPCSFGGVSVITPGTNTSNQVAVLYQDVNCTEVPMAIHAEQLTPAWRVYSAGANVFQTRAGCLVGAEHVNNSYECDIPVGAGICASYHSMSSLRSVNQRSIIAYTMSLGAENSVAYSNNSIAIPTNFTISVTTEILPVSMTKTSVDCTMYICGDSIECSNLLLQYGSFCTQLNRALTGIAVEQDKNTQEVFAQVKQIYKTPPIKDFGGFNFSQILPDPSKPSKRSFIEDLLFNKVTLADAGFIKQYGDCLGDIAARDLICAQKFNGLTVLPPLLTDEMIAQYTSALLAGTITSGWTFGAGAALQIPFAMQMAYRFNGIGVTQCVLYENQKLIANQFNSAIGKIQDSLSSTASALGKLQDVVNQNAQALNTLVKQLSSNFGAISSVLNDILSRLDKVEAEVQIDRLITGRLQSLQTYVTQQLIRAAEIRASANLAATKMSECVLGQSKRVDFCGKGYHLMSFPQSAPHGVVFLHVTYVPAQEKNFTTAPAICHEGKAHFPREGVFVSNGTHWFITQRNFYEPQIITTDNTFVCGSCDVVIGIVNNTVYDPLQPELDSFKEELDKYFKNHTSPDVDLGDISGINASVVNIQKEIDRLNEVAKNLNESPIDLQELGKYEQYIKGGSGYIPEAPRDGQAYVRKDGEWVLLSTFL

SEQ ID NO: 13786 - protein, 1235 aa, Artificial Sequence
  SARS-CoV-2/pangolin/Guangxi/P5L/2017__EPI_ISL_410540 spike protein (1-1205)(N908C_S1117C) Foldon construct
MFVFLFVLPLVSSQCVNLTTRTGIPPGYTNSSTRGVYYPDKVFRSSILHLTQDLFLPFFSNVTWFNTINYQGGFKKFDNPVLPFNDGVYFASTEKSNIIRGWIFGTTLDARTQSLLIVNNATNVVIKVCEFQFCTDPFLGVYYHNNNKTWVENEFRVYSSANNCTFEYISQPFLMDLEGKQGNFKNLREFVFKNVDGYFKIYSKHTPIDLVRDLPRGFAALEPLVDLPIGINITRFQTLLALHRSYLTPGKLESGWTTGAAAYYVGYLQQRTFLLSYNQNGTITDAVDCSLDPLSETKCTLKSLTVEKGIYQTSNFRVQPTISIVRFPNITNLCPFGEVFNASKFASVYAWNRKRISNCVADYSVLYNSTSFSTFKCYGVSPTKLNDLCFTNVYADSFVVKGDEVRQIAPGQTGVIADYNYKLPDDFTGCVIAWNSVKQDALTGGNYGYLYRLFRKSKLKPFERDISTEIYQAGSTPCNGQVGLNCYYPLERYGFHPTTGVNYQPFRVVVLSFELLNGPATVCGPKLSTTLVKDKCVNFNFNGLTGTGVLTTSKKQFLPFQQFGRDISDTTDAVRDPQTLEILDITPCSFGGVSVITPGTNTSNQVAVLYQDVNCTEVPMAIHAEQLTPAWRVYSAGANVFQTRAGCLVGAEHVNNSYECDIPVGAGICASYHSMSSFRSVNQRSIIAYTMSLGAENSVAYSNNSIAIPTNFTISVTTEILPVSMTKTSVDCTMYICGDSIECSNLLLQYGSFCTQLNRALTGIAVEQDKNTQEVFAQVKQIYKTPPIKDFGGFNFSQILPDPSKPSKRSFIEDLLFNKVTLADAGFIKQYGDCLGDIAARDLICAQKFNGLTVLPPLLTDEMIAQYTSALLAGTITSGWTFGAGAALQIPFAMQMAYRFNGIGVTQCVLYENQKLIANQFNSAIGKIQDSLSSTASALGKLQDVVNQNAQALNTLVKQLSSNFGAISSVLNDILSRLDKVEAEVQIDRLITGRLQSLQTYVTQQLIRAAEIRASANLAATKMSECVLGQSKRVDFCGKGYHLMSFPQSAPHGVVFLHVTYVPAQEKNFTTAPAICHEGKAHFPREGVFVSNGTHWFITQRNFYEPQIITTDNTFVCGSCDVVIGIVNNTVYDPLQPELDSFKEELDKYFKNHTSPDVDLGDISGINASVVNIQKEIDRLNEVAKNLNESLIDLQELGKYEQYIKGGSGYIPEAPRDGQAYVRKDGEWVLLSTFL

SEQ ID NO: 13787 - protein, 1235 aa, Artificial Sequence
  SARS-CoV-2/pangolin/Guangxi/P5E/2017__EPI_ISL_410541 spike protein (1-1205)(N908C_S1117C) Foldon construct
MFVFLFVLPLVSSQCVNLTTRTGIPPGYTNSSTRGVYYPDKVFRSSILHLTQDLFLPFFSNVTWFNTITYQGGSKKFDNPVLPFNDGVYFASTEKSNIIRGWIFGTTLDARTQSLLIVNNATNVVIKVCEFQFCTDPFLGVYYHNNNKTWVENEFRVYSSANNCTFEYISQPFLMDLEGKQGNFKNLREFVFKNVDGYFKIYSKHTPIDLVRDLPRGFAALEPLVDLPIGINITRFQTLLALHRSYLTPGKLESGWTTGAAAYYVGYLQQRTFLLSYNQNGTITDAVDCSLDPLSETKCTLKSLTVEKGIYQTSNFRVQPTISIVRFPNITNLCPFGEVFNASKFASVYAWNRKRISNCVADYSVLYNSTSFSTFKCYGVSPTKLNDLCFTNVYADSFVVKGDEVRQIAPGQTGVIADYNYKLPDDFTGCVIAWNSVKQDALTGDNYGYLYRLFRKSKLKPFERDISTEIYQAGSTPCNGQVGLNCYYPLERYGFHPTTGVNYQPFRVVVLSFELLNGPATVCGPKLSTTLVKDKCVNFNFNGLTGTGVLTTSKKQFLPFQQFGRDISDTTDAVRDPQTLEILDITPCSFGGVSVITPGTNTSNQVAVLYQDVNCTEVPMAIHAEQLTPAWRVYSAGANVFQTRAGCLVGAEHVNNSYECDIPVGAGICASYHSMSSFRSVNQRSIIAYTMSLGAENSVAYSNNSIAIPTNFTISVTTEILPVSMTKTSVDCTMYICGDSIECSNLLLQYGSFCTQLNRALTGIAVEQDKNTQEVFAQVKQIYKTPPIKDFGGFNFSQILPDPSKPSKRSFIEDLLFNKVTLADAGFIKQYGDCLGDIAARDLICAQKFNGLTVLPPLLTDEMIAQYTSALLAGTITSGWTFGAGAALQIPFAMQMAYRFNGIGVTQCVLYENQKLIANQFNSAIGKIQDSLSSTASALGKLQDVVNQNAQALNTLVKQLSSNFGAISSVLNDILSRLDKVEAEVQIDRLITGRLQSLQTYVTQQLIRAAEIRASANLAATKMSECVLGQSKRVDFCGKGYHLMSFPQSAPHGVVFLHVTYVPAQEKNFTTAPAICHEGKAHFPREGVFVSNGTHWFITQRNFYEPQIITTDNTFVCGSCDVVIGIVNNTVYDPLQPELDSFKEELDKYFKNHTSPDVDLGDISGINASVVNIQKEIDRLNEVAKNLNESLIDLQELGKYEQYIKGGSGYIPEAPRDGQAYVRKDGEWVLLSTFL

SEQ ID NO: 13788 - protein, 1233 aa, Artificial Sequence
  SARS-CoV-2/pangolin/Guangxi/P1E/2017__EPI_ISL_410539 spike protein (1-1203)(N906C_S1115C) Foldon construct
MFVFLFVLPLVSSQCVNLTTRTGIQPGYTNSSTRGVYYPDKVFRSSILHLTQDLFLPFFSNVTWFNTINYQGGFKKFDNPVLPFNDGVYFASTEKSNIIRGWIFGTTLDARTQSLLIVNNATNVVIKVCEFQFCTDPFLGVYYHNNNKTWVENEFRVYSSANNCTFEYISQPFLMDLEGKQGNFKNLREFVFKNVDGYFKIYSKHTPIDLVRDLPRGFAALEPLVDLPIGINITRFQTLLALHRSYLTPGKLESGWTTGAAAYYVGYLQQRTFLLSYNQNGTITDAVDCSLDPLSETKCTLKSLTVEKGIYQTSNFRVQPTISIVRFPNITNLCPFGEVFNASKFASVYAWNRKRISNCVADYSVLYNSTSFSTFKCYGVSPTKLNDLCFTNVYADSFVVKGDEVRQIAPGQTGVIADYNYKLPDDFTGCVIAWNSVKQDALTGGNYLYRLFRKSKLKPFERDISTEIYQAGSTPCNGQVGLNCYYPLERYGFHPTTGVNYQPFRVVVLSFELLNGPATVCGPKLSTTLVKDKCVNFNFNGLTGTGVLTTSKKQFLPFQQFGRDISDTTDAVRDPQTLEILDITPCSFGGVSVITPGTNTSNQVAVLYQDVNCTEVPMAIHAEQLTPAWRVYSAGANVFQTRAGCLVGAEHVNNSYECDIPVGAGICASYHSMSSLRSVNQRSIIAYTMSLGAENSVAYSNNSIAIPTNFTISVTTEILPVSMTKTSVDCTMYICGDSIECSNLLLQYGSFCTQLNRALTGIAVEQDKNTQEVFAQVKQIYKTPPIKDFGGFNFSQILPDPSKPSKRSFIEDLLFNKVTLADAGFIKQYGDCLGDIAARDLICAQKFNGLTVLPPLLTDEMIAQYTSALLAGTITSGWTFGAGAALQIPFAMQMAYRFNGIGVTQCVLYENQKLIANQFNSAIGKIQDSLSSTASALGKLQDVVNQNAQALNTLVKQLSSNFGAISSVLNDILSRLDKVEAEVQIDRLITGRLQSLQTYVTQQLIRAAEIRASANLAATKMSECVLGQSKRVDFCGKGYHLMSFPQSAPHGVVFLHVTYVPAQEKNFTTAPAICHEGKAHFPREGVFVSNGTHWFITQRNFYEPQIITTDNTFVCGSCDVVIGIVNNTVYDPLQPELDSFKEELDKYFKNHTSPDVDLGDISGINASVVNIQKEIDRLNEVAKNLNESLIDLQELGKYEQYIKGGSGYIPEAPRDGQAYVRKDGEWVLLSTFL

SEQ ID NO: 13789 - protein, 1365 aa, Artificial Sequence
  SARS-CoV-2/Wuhan/WIV05/2019__EPI_ISL_402128 spike protein (1-1211)(N914C_S1123C) WhcAg construct
MFVFLVLLPLVSSQCVNLTTRTQLPPAYTNSFTRGVYYPDKVFRSSVLHSTQDLFLPFFSNVTWFHAIHVSGTNGTKRFDNPVLPFNDGVYFASTEKSNIIRGWIFGTTLDSKTQSLLIVNNATNVVIKVCEFQFCNDPFLGVYYHKNNKSWMESEFRVYSSANNCTFEYVSQPFLMDLEGKQGNFKNLREFVFKNIDGYFKIYSKHTPINLVRDLPQGFSALEPLVDLPIGINITRFQTLLALHRSYLTPGDSSSGWTAGAAAYYVGYLQPRTFLLKYNENGTITDAVDCALDPLSETKCTLKSFTVEKGIYQTSNFRVQPTESIVRFPNITNLCPFGEVFNATRFASVYAWNRKRISNCVADYSVLYNSASFSTFKCYGVSPTKLNDLCFTNVYADSFVIRGDEVRQIAPGQTGKIADYNYKLPDDFTGCVIAWNSNNLDSKVGGNYNYLYRLFRKSNLKPFERDISTEIYQAGSTPCNGVEGFNCYFPLQSYGFQPTNGVGYQPYRVVVLSFELLHAPATVCGPKKSTNLVKNKCVNFNFNGLTGTGVLTESNKKFLPFQQFGRDIADTTDAVRDPQTLEILDITPCSFGGVSVITPGTNTSNQVAVLYQDVNCTEVPVAIHADQLTPTWRVYSTGSNVFQTRAGCLIGAEHVNNSYECDIPIGAGICASYQTQTNSPRRARSVASQSIIAYTMSLGAENSVAYSNNSIAIPTNFTISVTTEILPVSMTKTSVDCTMYICGDSTECSNLLLQYGSFCTQLNRALTGIAVEQDKNTQEVFAQVKQIYKTPPIKDFGGFNFSQILPDPSKPSKRSFIEDLLFNKVTLADAGFIKQYGDCLGDIAARDLICAQKFNGLTVLPPLLTDEMIAQYTSALLAGTITSGWTFGAGAALQIPFAMQMAYRFNGIGVTQCVLYENQKLIANQFNSAIGKIQDSLSSTASALGKLQDVVNQNAQALNTLVKQLSSNFGAISSVLNDILSRLDKVEAEVQIDRLITGRLQSLQTYVTQQLIRAAEIRASANLAATKMSECVLGQSKRVDFCGKGYHLMSFPQSAPHGVVFLHVTYVPAQEKNFTTAPAICHDGKAHFPREGVFVSNGTHWFVTQRNFYEPQIITTDNTFVCGNCDVVIGIVNNTVYDPLQPELDSFKEELDKYFKNHTSPDVDLGDISGINASVVNIQKEIDRLNEVAKNLNESLIDLQELGKYEQYIKGGGGSDIDPYKEFGSSYQLLNFLPLDFFPDLNALVDTATALYEEELTGREHCSPHHTAIRQALVCWDELTKLIAWMSSNITSEQVRTIIVNHVNDTWGLKVRQSLWFHLSCLTFGQHTVQEFLVSFGVWIRTPAPYRPPNAPILSTLPEHTVIC

SEQ ID NO: 13790 - protein, 1361 aa, Artificial Sequence
  SARS-CoV-2/bat/Yunnan/RaTG13/2013__EPI_ISL_402131 spike protein (1-1207)(N910C_S1119C) WhcAg construct
MFVFLVLLPLVSSQCVNLTTRTQLPPAYTNSSTRGVYYPDKVFRSSVLHLTQDLFLPFFSNVTWFHAIHVSGTNGIKRFDNPVLPFNDGVYFASTEKSNIIRGWIFGTTLDSKTQSLLIVNNATNVVIKVCEFQFCNDPFLGVYYHKNNKSWMESEFRVYSSANNCTFEYVSQPFLMDLEGKQGNFKNLREFVFKNIDGYFKIYSKHTPINLVRDLPPGFSALEPLVDLPIGINITRFQTLLALHRSYLTPGDSSSGWTAGAAAYYVGYLQPRTFLLKYNENGTITDAVDCALDPLSETKCTLKSFTVEKGIYQTSNFRVQPTDSIVRFPNITNLCPFGEVFNATTFASVYAWNRKRISNCVADYSVLYNSTSFSTFKCYGVSPTKLNDLCFTNVYADSFVITGDEVRQIAPGQTGKIADYNYKLPDDFTGCVIAWNSKHIDAKEGGNFNYLYRLFRKANLKPFERDISTEIYQAGSKPCNGQTGLNCYYPLYRYGFYPTDGVGHQPYRVVVLSFELLNAPATVCGPKKSTNLVKNKCVNFNFNGLTGTGVLTESNKKFLPFQQFGRDIADTTDAVRDPQTLEILDITPCSFGGVSVITPGTNASNQVAVLYQDVNCTEVPVAIHADQLTPTWRVYSTGSNVFQTRAGCLIGAEHVNNSYECDIPIGAGICASYQTQTNSRSVASQSIIAYTMSLGAENSVAYSNNSIAIPTNFTISVTTEILPVSMTKTSVDCTMYICGDSTECSNLLLQYGSFCTQLNRALTGIAVEQDKNTQEVFAQVKQIYKTPPIKDFGGFNFSQILPDPSKPSKRSFIEDLLFNKVTLADAGFIKQYGDCLGDIAARDLICAQKFNGLTVLPPLLTDEMIAQYTSALLAGTITSGWTFGAGAALQIPFAMQMAYRFNGIGVTQCVLYENQKLIANQFNSAIGKIQDSLSSTASALGKLQDVVNQNAQALNTLVKQLSSNFGAISSVLNDILSRLDKVEAEVQIDRLITGRLQSLQTYVTQQLIRAAEIRASANLAATKMSECVLGQSKRVDFCGKGYHLMSFPQSAPHGVVFLHVTYVPAQEKNFTTAPAICHDGKAHFPREGVFVSNGTHWFVTQRNFYEPQIITTDNTFVCGSCDVVIGIVNNTVYDPLQPELDSFKEELDKYFKNHTSPDVDLGDISGINASVVNIQKEIDRLNEVAKNLNESLIDLQELGKYEQYIKGGGGSDIDPYKEFGSSYQLLNFLPLDFFPDLNALVDTATALYEEELTGREHCSPHHTAIRQALVCWDELTKLIAWMSSNITSEQVRTIIVNHVNDTWGLKVRQSLWFHLSCLTFGQHTVQEFLVSFGVWIRTPAPYRPPNAPILSTLPEHTVIC

SEQ ID NO: 13791 - protein, 1365 aa, Artificial Sequence
  SARS-CoV-2/Wuhan/HBCDC-HB-01/2019__EPI_ISL_402132 spike protein (1-1211)(N914C_S1123C) WhcAg construct
MFVFLVLLPLVSSQCVNLTTRTQLPPAYTNSITRGVYYPDKVFRSSVLHSTQDLFLPFFSNVTWFHAIHVSGTNGTKRFDNPVLPFNDGVYFASTEKSNIIRGWIFGTTLDSKTQSLLIVNNATNVVIKVCEFQFCNDPFLGVYYHKNNKSWMESEFRVYSSANNCTFEYVSQPFLMDLEGKQGNFKNLREFVFKNIDGYFKIYSKHTPINLVRDLPQGFSALEPLVDLPIGINITRFQTLLALHRSYLTPGDSSSGWTAGAAAYYVGYLQPRTFLLKYNENGTITDAVDCALDPLSETKCTLKSFTVEKGIYQTSNFRVQPTESIVRFPNITNLCPFGEVFNATRFASVYAWNRKRISNCVADYSVLYNSASFSTFKCYGVSPTKLNDLCFTNVYADSFVIRGDEVRQIAPGQTGKIADYNYKLPDDFTGCVIAWNSNNLDSKVGGNYNYLYRLFRKSNLKPFERDISTEIYQAGSTPCNGVEGFNCYFPLQSYGFQPTNGVGYQPYRVVVLSFELLHAPATVCGPKKSTNLVKNKCVNFNFNGLTGTGVLTESNKKFLPFQQFGRDIADTTDAVRDPQTLEILDITPCSFGGVSVITPGTNTSNQVAVLYQDVNCTEVPVAIHADQLTPTWRVYSTGSNVFQTRAGCLIGAEHVNNSYECDIPIGAGICASYQTQTNSPRRARSVASQSIIAYTMSLGAENSVAYSNNSIAIPTNFTISVTTEILPVSMTKTSVDCTMYICGDSTECSNLLLQYGSFCTQLNRALTGIAVEQDKNTQEVFAQVKQIYKTPPIKDFGGFNFSQILPDPSKPSKRSFIEDLLFNKVTLADAGFIKQYGDCLGDIAARDLICAQKFNGLTVLPPLLTDEMIAQYTSALLAGTITSGWTFGAGAALQIPFAMQMAYRFNGIGVTQCVLYENQKLIANQFNSAIGKIQDSLSSTASALGKLQDVVNQNAQALNTLVKQLSSNFGAISSVLNDILSRLDKVEAEVQIDRLITGRLQSLQTYVTQQLIRAAEIRASANLAATKMSECVLGQSKRVDFCGKGYHLMSFPQSAPHGVVFLHVTYVPAQEKNFTTAPAICHDGKAHFPREGVFVSNGTHWFVTQRNFYEPQIITTDNTFVCGNCDVVIGIVNNTVYDPLQPELDSFKEELDKYFKNHTSPDVDLGDISGINASVVNIQKEIDRLNEVAKNLNESLIDLQELGKYEQYIKGGGGSDIDPYKEFGSSYQLLNFLPLDFFPDLNALVDTATALYEEELTGREHCSPHHTAIRQALVCWDELTKLIAWMSSNITSEQVRTIIVNHVNDTWGLKVRQSLWFHLSCLTFGQHTVQEFLVSFGVWIRTPAPYRPPNAPILSTLPEHTVIC

SEQ ID NO: 13792 - protein, 1365 aa, Artificial Sequence
  SARS-CoV-2/Guangdong/20SF028/2020__EPI_ISL_403936 spike protein (1-1211)(N914C_S1123C) WhcAg construct
MFVFLVLLPLVSSQCVNLTTRTQLPPAYTNSFTRGVYYPDKVFRSSVLYSTQDLFLPFFSNVTWFHAIHVSGTNGTKRFDNPVLPFNDGVYFASTEKSNIIRGWIFGTTLDSKTQSLLIVNNATNVVIKVCEFQFCNDPFLGVYYHKNNKSWMESEFRVYSSANNCTFEYVSQPFLMDLEGKQGNFKNLREFVFKNIDGYFKIYSKHTPINLVRDLPQGFSALEPLVDLPIGINITRFQTLLALHRSYLTPGDSSSGWTAGAAAYYVGYLQPRTFLLKYNENGTITDAVDCALDPLSETKCTLKSFTVEKGIYQTSNFRVQPTESIVRFPNITNLCPFGEVFNATRFASVYAWNRKRISNCVADYSVLYNSASFSTFKCYGVSPTKLNDLCFTNVYADSFVIRGDEVRQIAPGQTGKIADYNYKLPDDFTGCVIAWNSNNLDSKVGGNYNYLYRLFRKSNLKPFERDISTEIYQAGSTPCNGVEGFNCYFPLQSYGFQPTNGVGYQPYRVVVLSFELLHAPATVCGPKKSTNLVKNKCVNFNFNGLTGTGVLTESNKKFLPFQQFGRDIADTTDAVRDPQTLEILDITPCSFGGVSVITPGTNTSNQVAVLYQDVNCTEVPVAIHADQLTPTWRVYSTGSNVFQTRAGCLIGAEHVNNSYECDIPIGAGICASYQTQTNSPRRARSVASQSIIAYTMSLGAENSVAYSNNSIAIPTNFTISVTTEILPVSMTKTSVDCTMYICGDSTECSNLLLQYGSFCTQLNRALTGIAVEQDKNTQEVFAQVKQIYKTPPIKDFGGFNFSQILPDPSKPSKRSFIEDLLFNKVTLADAGFIKQYGDCLGDIAARDLICAQKFNGLTVLPPLLTDEMIAQYTSALLAGTITSGWTFGAGAALQIPFAMQMAYRFNGIGVTQCVLYENQKLIANQFNSAIGKIQDSLSSTASALGKLQDVVNQNAQALNTLVKQLSSNFGAISSVLNDILSRLDKVEAEVQIDRLITGRLQSLQTYVTQQLIRAAEIRASANLAATKMSECVLGQSKRVDFCGKGYHLMSFPQSAPHGVVFLHVTYVPAQEKNFTTAPAICHDGKAHFPREGVFVSNGTHWFVTQRNFYEPQIITTDNTFVCGNCDVVIGIVNNTVYDPLQPELDSFKEELDKYFKNHTSPDVDLGDISGINASVVNIQKEIDRLNEVAKNLNESLIDLQELGKYEQYIKGGGGSDIDPYKEFGSSYQLLNFLPLDFFPDLNALVDTATALYEEELTGREHCSPHHTAIRQALVCWDELTKLIAWMSSNITSEQVRTIIVNHVNDTWGLKVRQSLWFHLSCLTFGQHTVQEFLVSFGVWIRTPAPYRPPNAPILSTLPEHTVIC

SEQ ID NO: 13793 - protein, 1365 aa, Artificial Sequence
  SARS-CoV-2/Shenzhen/SZTH-001/2020__EPI_ISL_406592 spike protein (1-1211)(N914C_S1123C) WhcAg construct
MFVFLVLLPLVSSQCVNLTTRTQLPPAYTNSFTRGVYYPDKVFRSSVLHSTQDLFLPFFSNVTWFHAIHVSGTNGTKRFDNPVLPFNDGVYFASTEKSNIIRGWIFGTTLDSKTQSLLIVNNATNVVIKVCEFQFCNDPFLGVYYHKNNKSWMESEFRVYSSANNCTFEYVSQPFLMDLEGKQGNFKNLREFVFKNIDGYFKIYSKHTPINLVRDLPQGFSALEPLVDLPIGINITRFQTLLALHRSYLTPGDSSSGWTAGAAAYYVGYLQPRTFLLKYNENGTITDAVDCALDPLSETKCTLKSFTVEKGIYQTSNFRVQPTESIVRFPNITNLCPFGEVFNATRFASVYAWNRKRISNCVADYSVLYNSASFSTFKCYGVSPTKLNDLCFTNVYADSFVIRGDEVRQIAPGQTGKIADYNYKLPDDFTGCVIAWNSNNLDSKVGGNYNYLYRLFRKSNLKPFERDISTEIYQAGSTPCNGVEGFNCYFPLQSYGFQPTNGVGYQPYRVVVLSFELLHAPATVCGPKKSTNLVKNKCVNFNFNGLTGTGVLTESNKKFLPFQQFGRDIADTTDAVRDPQTLEILDITPCSFGGVSVITPGTNTSNQVAVLYQDVNCTEVPVAIHADQLTPTWRVYSTGSNVFQTRAGCLIGAEHVNNSYECDIPIGAGICASYQTQTNSPRRARSVASQSIIAYTMSLGAENSVAYSNNSIAIPTNFTISVTTEILPVSMTKTSVDCTMYICGDSTECSNLLLQYGSFCTQLNRALTGIAVEQDKNTQEVFAQVKQIYKTPPIKDFGGFNFSQILPDPSKPSKRSFIEDLLFNKVTLADAGFIKQYGDCLGDIAARDLICAQKFNGLTVLPPLLTDEMIAQYTSALLAGTITSGWTFGAGAALQIPFAMQMAYRFNGIGVTQCVLYENQKLIANQFNSAIGKIQDSLSSTASALGKLQDVVNQNAQALNTLVKQLSSNFGAISSVLNDILSRLDKVEAEVQIDRLITGRLQSLQTYVTQQLIRAAEIRASANLAATKMSECVLGQSKRVDFCGKGYHLMSFPQSAPHGVVFLHVTYVPAQEKNFTTAPAICHDGKAHFPREGVFVSNGTHWFVTQRNFYEPQIITTDNTFVCGNCDVLIGIVNNTVYDPLQPELDSFKEELDKYFKNHTSPDVDLGDISGINASVVNIQKEIDRLNEVAKNLNESLIDLQELGKYEQYIKGGGGSDIDPYKEFGSSYQLLNFLPLDFFPDLNALVDTATALYEEELTGREHCSPHHTAIRQALVCWDELTKLIAWMSSNITSEQVRTIIVNHVNDTWGLKVRQSLWFHLSCLTFGQHTVQEFLVSFGVWIRTPAPYRPPNAPILSTLPEHTVIC

SEQ ID NO: 13794 - protein, 1365 aa, Artificial Sequence
  SARS-CoV-2/Shenzhen/SZTH-004/2020__EPI_ISL_406595 spike protein (1-1211)(N914C_S1123C) WhcAg construct
MFVFLVLLPLVSSQCVNLTTRTQLPPAYTNSFTRGVYYPDKVFRSSVLHSTQDLFLPFFSNVTWFHAIHVSGTNGTKRFDNPVLPFNDGVYFASTEKSNIIRGWIFGTTLDSKTQSLLIVNNATNVVIKVCEFQFCNDPFLGVYYHKNNKSWMESEFRVYSSANNCTFEYVSQPFLMDLEGKQGNFKNLREFVFKNIDGYFKIYSKHTPINLVRDLPQGFSALEPLVDLPIGINITRFQTLLALHRSYLTPGDSSSGWTAGAAAYYVGYLQPRTFLLKYNENGTITDAVDCALDPLSETKCTLKSFTVEKGIYQTSNFRVQPTESIVRFPNITNLCPFGEVFNATRFASVYAWDRKRISNCVAYYSVLYNSASFSTFKCYGVSPTKLNDLCFTNVYADSFVIRGDEVRQIAPGQTGKIADYNYKLPDDFTGCVIAWNSNNLDSKVGGNYNYLYRLFRKSNLKPFERDISTEIYQAGSTPCNGVEGFNCYFPLQSYGFQPTNGVGYQPYRVVVLSFELLHAPATVCGPKKSTNLVKNKCVNFNFNGLTGTGVLTESNKKFLPFQQFGRDIADTTDAVRDPQTLEILDITPCSFGGVSVITPGTNTSNQVAVLYQDVNCTEVPVAIHADQLTPTWRVYSTGSNVFQTRAGCLIGAEHVNNSYECDIPIGAGICASYQTQTNSPRRARSVASQSIIAYTMSLGAENSVAYSNNSIAIPTNFTISVTTEILPVSMTKTSVDCTMYICGDSTECSNLLLQYGSFCTQLNRALTGIAVEQDKNTQEVFAQVKQIYKTPPIKDFGGFNFSQILPDPSKPSKRSFIEDLLFNKVTLADAGFIKQYGDCLGDIAARDLICAQKFNGLTVLPPLLTDEMIAQYTSALLAGTITSGWTFGAGAALQIPFAMQMAYRFNGIGVTQCVLYENQKLIANQFNSAIGKIQDSLSSTASALGKLQDVVNQNAQALNTLVKQLSSNFGAISSVLNDILSRLDKVEAEVQIDRLITGRLQSLQTYVTQQLIRAAEIRASANLAATKMSECVLGQSKRVDFCGKGYHLMSFPQSAPHGVVFLHVTYVPAQEKNFTTAPAICHDGKAHFPREGVFVSNGTHWFVTQRNFYEPQIITTDNTFVCGNCDVVIGIVNNTVYDPLQPELDSFKEELDKYFKNHTSPDVDLGDISGINASVVNIQKEIDRLNEVAKNLNESLIDLQELGKYEQYIKGGGGSDIDPYKEFGSSYQLLNFLPLDFFPDLNALVDTATALYEEELTGREHCSPHHTAIRQALVCWDELTKLIAWMSSNITSEQVRTIIVNHVNDTWGLKVRQSLWFHLSCLTFGQHTVQEFLVSFGVWIRTPAPYRPPNAPILSTLPEHTVIC

SEQ ID NO: 13795 - protein, 1365 aa, Artificial Sequence
  SARS-CoV-2/France/IDF0372/2020__EPI_ISL_406596 spike protein (1-1211)(N914C_S1123C) WhcAg construct
MFVFLVLLPLVSSQCVNLTTRTQLPPAYTNSFTRGVYYPDKVFRSSVLHSTQDLFLPFFSNVTWFHAIHVSGTNGTKRFDNPVLPFNDGVYFASTEKSNIIRGWIFGTTLDSKTQSLLIVNNATNVVIKVCEFQFCNDPFLGVYYHKNNKSWMESEFRVYSSANNCTFEYVSQPFLMDLEGKQGNFKNLREFVFKNIDGYFKIYSKHTPINLVRDLPQGFSALEPLVDLPIGINITRFQTLLALHRSYLTPGDSSSGWTAGAAAYYVGYLQPRTFLLKYNENGTITDAVDCALDPLSETKCTLKSFTVEKGIYQTSNFRVQPTESIVRFPNITNLCPFGEVFNATRFASVYAWNRKRISNCVADYSFLYNSASFSTFKCYGVSPTKLNDLCFTNVYADSFVIRGDEVRQIAPGQTGKIADYNYKLPDDFTGCVIAWNSNNLDSKVGGNYNYLYRLFRKSNLKPFERDISTEIYQAGSTPCNGVEGFNCYFPLQSYGFQPTNGVGYQPYRVVVLSFELLHAPATVCGPKKSTNLVKNKCVNFNFNGLTGTGVLTESNKKFLPFQQFGRDIADTTDAVRDPQTLEILDITPCSFGGVSVITPGTNTSNQVAVLYQDVNCTEVPVAIHADQLTPTWRVYSTGSNVFQTRAGCLIGAEHVNNSYECDIPIGAGICASYQTQTNSPRRARSVASQSIIAYTMSLGAENSVAYSNNSIAIPTNFTISVTTEILPVSMTKTSVDCTMYICGDSTECSNLLLQYGSFCTQLNRALTGIAVEQDKNTQEVFAQVKQIYKTPPIKDFGGFNFSQILPDPSKPSKRSFIEDLLFNKVTLADAGFIKQYGDCLGDIAARDLICAQKFNGLTVLPPLLTDEMIAQYTSALLAGTITSGWTFGAGAALQIPFAMQMAYRFNGIGVTQCVLYENQKLIANQFNSAIGKIQDSLSSTASALGKLQDVVNQNAQALNTLVKQLSSNFGAISSVLNDILSRLDKVEAEVQIDRLITGRLQSLQTYVTQQLIRAAEIRASANLAATKMSECVLGQSKRVDFCGKGYHLMSFPQSAPHGVVFLHVTYVPAQEKNFTTAPAICHDGKAHFPREGVFVSNGTHWFVTQRNFYEPQIITTDNTFVCGNCDVVIGIVNNTVYDPLQPELDSFKEELDKYFKNHTSPDVDLGDISGINASVVNIQKEIDRLNEVAKNLNESLIDLQELGKYEQYIKGGGGSDIDPYKEFGSSYQLLNFLPLDFFPDLNALVDTATALYEEELTGREHCSPHHTAIRQALVCWDELTKLIAWMSSNITSEQVRTIIVNHVNDTWGLKVRQSLWFHLSCLTFGQHTVQEFLVSFGVWIRTPAPYRPPNAPILSTLPEHTVIC

SEQ ID NO: 13796 - protein, 1365 aa, Artificial Sequence
  SARS-CoV-2/Australia/VIC01/2020__EPI_ISL_406844 spike protein (1-1211)(N914C_S1123C) WhcAg construct
MFVFLVLLPLVSSQCVNLTTRTQLPPAYTNSFTRGVYYPDKVFRSSVLHSTQDLFLPFFSNVTWFHAIHVSGTNGTKRFDNPVLPFNDGVYFASTEKSNIIRGWIFGTTLDSKTQSLLIVNNATNVVIKVCEFQFCNDPFLGVYYHKNNKSWMESEFRVYSSANNCTFEYVSQPFLMDLEGKQGNFKNLREFVFKNIDGYFKIYSKHTPINLVRDLPQGFSALEPLVDLPIGINITRFQTLLALHRRYLTPGDSSSGWTAGAAAYYVGYLQPRTFLLKYNENGTITDAVDCALDPLSETKCTLKSFTVEKGIYQTSNFRVQPTESIVRFPNITNLCPFGEVFNATRFASVYAWNRKRISNCVADYSVLYNSASFSTFKCYGVSPTKLNDLCFTNVYADSFVIRGDEVRQIAPGQTGKIADYNYKLPDDFTGCVIAWNSNNLDSKVGGNYNYLYRLFRKSNLKPFERDISTEIYQAGSTPCNGVEGFNCYFPLQSYGFQPTNGVGYQPYRVVVLSFELLHAPATVCGPKKSTNLVKNKCVNFNFNGLTGTGVLTESNKKFLPFQQFGRDIADTTDAVRDPQTLEILDITPCSFGGVSVITPGTNTSNQVAVLYQDVNCTEVPVAIHADQLTPTWRVYSTGSNVFQTRAGCLIGAEHVNNSYECDIPIGAGICASYQTQTNSPRRARSVASQSIIAYTMSLGAENSVAYSNNSIAIPTNFTISVTTEILPVSMTKTSVDCTMYICGDSTECSNLLLQYGSFCTQLNRALTGIAVEQDKNTQEVFAQVKQIYKTPPIKDFGGFNFSQILPDPSKPSKRSFIEDLLFNKVTLADAGFIKQYGDCLGDIAARDLICAQKFNGLTVLPPLLTDEMIAQYTSALLAGTITSGWTFGAGAALQIPFAMQMAYRFNGIGVTQCVLYENQKLIANQFNSAIGKIQDSLSSTASALGKLQDVVNQNAQALNTLVKQLSSNFGAISSVLNDILSRLDKVEAEVQIDRLITGRLQSLQTYVTQQLIRAAEIRASANLAATKMSECVLGQSKRVDFCGKGYHLMSFPQSAPHGVVFLHVTYVPAQEKNFTTAPAICHDGKAHFPREGVFVSNGTHWFVTQRNFYEPQIITTDNTFVCGNCDVVIGIVNNTVYDPLQPELDSFKEELDKYFKNHTSPDVDLGDISGINASVVNIQKEIDRLNEVAKNLNESLIDLQELGKYEQYIKGGGGSDIDPYKEFGSSYQLLNFLPLDFFPDLNALVDTATALYEEELTGREHCSPHHTAIRQALVCWDELTKLIAWMSSNITSEQVRTIIVNHVNDTWGLKVRQSLWFHLSCLTFGQHTVQEFLVSFGVWIRTPAPYRPPNAPILSTLPEHTVIC

SEQ ID NO: 13797 - protein, 1365 aa, Artificial Sequence
  SARS-CoV-2/Germany/BavPat1/2020__EPI_ISL_406862 spike protein (1-1211)(N914C_S1123C) WhcAg construct
MFVFLVLLPLVSSQCVNLTTRTQLPPAYTNSFTRGVYYPDKVFRSSVLHSTQDLFLPFFSNVTWFHAIHVSGTNGTKRFDNPVLPFNDGVYFASTEKSNIIRGWIFGTTLDSKTQSLLIVNNATNVVIKVCEFQFCNDPFLGVYYHKNNKSWMESEFRVYSSANNCTFEYVSQPFLMDLEGKQGNFKNLREFVFKNIDGYFKIYSKHTPINLVRDLPQGFSALEPLVDLPIGINITRFQTLLALHRSYLTPGDSSSGWTAGAAAYYVGYLQPRTFLLKYNENGTITDAVDCALDPLSETKCTLKSFTVEKGIYQTSNFRVQPTESIVRFPNITNLCPFGEVFNATRFASVYAWNRKRISNCVADYSVLYNSASFSTFKCYGVSPTKLNDLCFTNVYADSFVIRGDEVRQIAPGQTGKIADYNYKLPDDFTGCVIAWNSNNLDSKVGGNYNYLYRLFRKSNLKPFERDISTEIYQAGSTPCNGVEGFNCYFPLQSYGFQPTNGVGYQPYRVVVLSFELLHAPATVCGPKKSTNLVKNKCVNFNFNGLTGTGVLTESNKKFLPFQQFGRDIADTTDAVRDPQTLEILDITPCSFGGVSVITPGTNTSNQVAVLYQGVNCTEVPVAIHADQLTPTWRVYSTGSNVFQTRAGCLIGAEHVNNSYECDIPIGAGICASYQTQTNSPRRARSVASQSIIAYTMSLGAENSVAYSNNSIAIPTNFTISVTTEILPVSMTKTSVDCTMYICGDSTECSNLLLQYGSFCTQLNRALTGIAVEQDKNTQEVFAQVKQIYKTPPIKDFGGFNFSQILPDPSKPSKRSFIEDLLFNKVTLADAGFIKQYGDCLGDIAARDLICAQKFNGLTVLPPLLTDEMIAQYTSALLAGTITSGWTFGAGAALQIPFAMQMAYRFNGIGVTQCVLYENQKLIANQFNSAIGKIQDSLSSTASALGKLQDVVNQNAQALNTLVKQLSSNFGAISSVLNDILSRLDKVEAEVQIDRLITGRLQSLQTYVTQQLIRAAEIRASANLAATKMSECVLGQSKRVDFCGKGYHLMSFPQSAPHGVVFLHVTYVPAQEKNFTTAPAICHDGKAHFPREGVFVSNGTHWFVTQRNFYEPQIITTDNTFVCGNCDVVIGIVNNTVYDPLQPELDSFKEELDKYFKNHTSPDVDLGDISGINASVVNIQKEIDRLNEVAKNLNESLIDLQELGKYEQYIKGGGGSDIDPYKEFGSSYQLLNFLPLDFFPDLNALVDTATALYEEELTGREHCSPHHTAIRQALVCWDELTKLIAWMSSNITSEQVRTIIVNHVNDTWGLKVRQSLWFHLSCLTFGQHTVQEFLVSFGVWIRTPAPYRPPNAPILSTLPEHTVIC

SEQ ID NO: 13798 - protein, 1365 aa, Artificial Sequence
  SARS-CoV-2/Wuhan/HBCDC-HB-02/2020__EPI_ISL_412978 spike protein (1-1211)(N914C_S1123C) WhcAg construct
MFVFLVLLPLVSSQCVNLTTRTQLPPAYTNSFTRGVYYPDKVFRSSVLHSTQDLFLPFFSNVTWFHAIHVSGTNGTKRFDNPVLPFNDGVYFASTEKSNIIRGWIFGTTLDSKTQSLLIVNNATNVVIKVCEFQFCNDPFLGVYYHKNNKSWMESEFRVYSSANNCTFEYVSQPFLMDLEGKQGNFKNLREFVFKNIDGYFKIYSKHTPINLVRDLPQGFSALEPLVDLPIGINITRFQTLLALHRSYLTPGDSSSGWTAGAAAYYVGYLQPRTFLLKYNENGTITDAVDCALDPLSETKCTLKSFTVEKGIYQTSNFRVQPTESIVRFPNITNLCPFGEVFNATRFASVYAWNRKRISNCVADYSVLYNSASFSTFKCYGVSPTKLNDLCFTNVYADSFVIRGDEVRQIAPGQTGKIADYNYKLPDDFTGCVIAWNSNNLDSKVGGNYNYLYRLFRKSNLKPFERDISTEIYQAGSTPCNGVEGFNCYFPLQSYGFQPTNGVGYQPYRVVVLSFELLHAPATVCGPKKSTNLVKNKCVNFNFNGLTGTGVLTESNKKFLPFQQFGRDIADTTDAVRDPQTLEILDITPCSFGGVSVITPGTNTSNQVAVLYQDVNCTEVPVAIHADQLTPTWRVYSTGSNVFQTRAGCLIGAEHVNNSYECDIPIGAGICASYQTQTNSPRRARSVASQSIIAYTMSLGAENSVAYSNNSIAIPTNFTISVTTEILPVSMTKTSVDCTMYICGDSTECSNFLLQYGSFCTQLNRALTGIAVEQDKNTQEVFAQVKQIYKTPPIKDFGGFNFSQILPDPSKPSKRSFIEDLLFNKVTLADAGFIKQYGDCLGDIAARDLICAQKFNGLTVLPPLLTDEMIAQYTSALLAGTITSGWTFGAGAALQIPFAMQMAYRFNGIGVTQCVLYENQKLIANQFNSAIGKIQDSLSSTASALGKLQDVVNQNAQALNTLVKQLSSNFGAISSVLNDILSRLDKVEAEVQIDRLITGRLQSLQTYVTQQLIRAAEIRASANLAATKMSECVLGQSKRVDFCGKGYHLMSFPQSAPHGVVFLHVTYVPAQEKNFTTAPAICHDGKAHFPREGVFVSNGTHWFVTQRNFYEPQIITTDNTFVCGNCDVVIGIVNNTVYDPLQPELDSFKEELDKYFKNHTSPDVDLGDISGINASVVNIQKEIDRLNEVAKNLNESLIDLQELGKYEQYIKGGGGSDIDPYKEFGSSYQLLNFLPLDFFPDLNALVDTATALYEEELTGREHCSPHHTAIRQALVCWDELTKLIAWMSSNITSEQVRTIIVNHVNDTWGLKVRQSLWFHLSCLTFGQHTVQEFLVSFGVWIRTPAPYRPPNAPILSTLPEHTVIC

SEQ ID NO: 13799 - protein, 1365 aa, Artificial Sequence
  SARS-CoV-2/Australia/QLD02/2020__EPI_ISL_407896 spike protein (1-1211)(N914C_S1123C) WhcAg construct
MFVFLVLLPLVSSQCVNLTTRTQLPPAYTNSFTRGVYYPDKVFRSSVLHSTQDLFLPFFSNVTWFHAIHVSGTNGTKRFDNPVLPFNDGVYFASTEKSNIIRGWIFGTTLDSKTQSLLIVNNATNVVIKVCEFQFCNDPFLGVYYHKNNKSWMESEFRVYSSANNCTFEYVSQPFLMDLEGKQGNFKNLREFVFKNIDGYFKIYSKHTPINLVRDLPQGFSALEPLVDLPIGINITRFQTLLALHRSYLTPGDSSSGWTAGAAAYYVGYLQPRTFLLKYNENGTITDAVDCALDPLSETKCTLKSFTVEKGIYQTSNFRVQPTESIVRFPNITNLCPFGEVFNATRFASVYAWNRKRISNCVADYSVLYNSASFSTFKCYGVSPTKLNDLCFTNVYADSFVIRGDEVRQIAPGQTGKIADYNYKLPDDFTGCVIAWNSNNLDSKVGGNYNYLYRLFRKSNLKPFERDISTEIYQAGSTPCNGVEGFNCYFPLQSYGFQPTNGVGYQPYRVVVLSFELLHAPATVCGPKKSTNLVKNKCVNFNFNGLTGTGVLTESNKKFLPFQQFGRDIADTTDAVRDPQTLEILDITPCSFGGVSVITPGTNTSNQVAVLYQDVNCTEVPVAIHADQLTPTWRVYSTGSNVFQTRAGCLIGAEHVNNSYECDIPIGAGICASYQTQTNSPRRARSVASQSIIAYTMSLGAENSVAYSNNSIAIPTNFTISVTTEILPVSMTKTSVDCTMYICGDSTECSNLLLQYGSFCTQLNRALTGIAVEQDKNTQEVFAQVKQIYKTPPIKDFGGFNFSQILPDPSKPSKRSFIEDLLFNKVTLADAGFIKQYGDCLGDIAARDLICAQKFNGLTVLPPLLTDEMIAQYTSALLAGTITSGWTFGAGAALQIPFAMQMAYRFNGIGVTQCVLYENQKLIANQFNSAIGKIQDSLSSTASALGKLQDVVNQNAQALNTLVKQLSSNFGAISSVLNDILSRLDKVEAEVQIDRLITGRLQSLQTYVTQQLIRAAEIRASANLAATKMSECVLGQSKRVDFCGKGYHLMSFPQSAPHGVVFLHVTYVPAQEKNFTTAPAICHDGKAHFPREGVFVSNGTHWFVTQRNFYEPQIITTDNTFVCGNCDVVIGIVNNTVYDPLQLELDSFKEELDKYFKNHTSPDVDLGDISGINASVVNIQKEIDRLNEVAKNLNESLIDLQELGKYEQYIKGGGGSDIDPYKEFGSSYQLLNFLPLDFFPDLNALVDTATALYEEELTGREHCSPHHTAIRQALVCWDELTKLIAWMSSNITSEQVRTIIVNHVNDTWGLKVRQSLWFHLSCLTFGQHTVQEFLVSFGVWIRTPAPYRPPNAPILSTLPEHTVIC

SEQ ID NO: 13800 - protein, 1365 aa, Artificial Sequence
  SARS-CoV-2/India/1-31/2020__EPI_ISL_413523 spike protein (1-1211)(N914C_S1123C) WhcAg construct
MFVFLVLLPLVSSQCVNLTTRTQLPPAYTNSFTRGVYYPDKVFRSSVLHSTQDLFLPFFSNVTWFHAIHVSGTNGTKRFDNPVLPFNDGVYFASTEKSNIIRGWIFGTTLDSKTQSLLIVNNATNVVIKVCEFQFCNDPFLGVYYHKNNKSWMESEFRVYSSANNCTFEYVSQPFLMDLEGKQGNFKNLREFVFKNIDGYFKIYSKHTPINLVRDLPQGFSALEPLVDLPIGINITRFQTLLALHRSYLTPGDSSSGWTAGAAAYYVGYLQPRTFLLKYNENGTITDAVDCALDPLSETKCTLKSFTVEKGIYQTSNFRVQPTESIVRFPNITNLCPFGEVFNATRFASVYAWNRKRISNCVADYSVLYNSASFSTFKCYGVSPTKLNDLCFTNVYADSFVIRGDEVRQIAPGQTGKIADYNYKLPDDFTGCVIAWNSNNLDSKVGGNYNYLYRLFRKSNLKPFERDISTEIYQAGSTPCNGVEGFNCYFPLQSYGFQPTNGVGYQPYRVVVLSFELLHAPATVCGPKKSTNLVKNKCVNFNFNGLTGTGVLTESNKKFLPFQQFGRDIADTTDAVRDPQTLEILDITPCSFGGVSVITPGTNTSNQVAVLYQDVNCTEVPVAIHADQLTPTWRVYSTGSNVFQTRAGCLIGAEHVNNSYECDIPIGAGICASYQTQTNSPRRARSVASQSIIAYTMSLGAENSVAYSNNSIAIPTNFTISVTTEILPVSMTKTSVDCTMYICGDSTECSNLLLQYGSFCTQLNRALTGIAVEQDKNTQEVFAQVKQIYKTPPIKDFGGFNFSQILPDPSKPSKRSFIEDLLFNKVTLADAGFIKQYGDCLGDIAARDLICAQKFNGLTVLPPLLTDEMIAQYTSALLAGTITSGWTFGAGAALQIPFAMQMAYRFNGIGVTQCVLYENQKLIANQFNSVIGKIQDSLSSTASALGKLQDVVNQNAQALNTLVKQLSSNFGAISSVLNDILSRLDKVEAEVQIDRLITGRLQSLQTYVTQQLIRAAEIRASANLAATKMSECVLGQSKRVDFCGKGYHLMSFPQSAPHGVVFLHVTYVPAQEKNFTTAPAICHDGKAHFPREGVFVSNGTHWFVTQRNFYEPQIITTDNTFVCGNCDVVIGIVNNTVYDPLQPELDSFKEELDKYFKNHTSPDVDLGDISGINASVVNIQKEIDRLNEVAKNLNESLIDLQELGKYEQYIKGGGGSDIDPYKEFGSSYQLLNFLPLDFFPDLNALVDTATALYEEELTGREHCSPHHTAIRQALVCWDELTKLIAWMSSNITSEQVRTIIVNHVNDTWGLKVRQSLWFHLSCLTFGQHTVQEFLVSFGVWIRTPAPYRPPNAPILSTLPEHTVIC

SEQ ID NO: 13801 - protein, 1365 aa, Artificial Sequence
  SARS-CoV-2/Guangdong/GD2020087-P0008/2020__EPI_ISL_413863 spike protein (1-1211)(N914C_S1123C) WhcAg construct
MFVFLVLLPLVSSQCVNLTTRTQLPPAYTNSFTRGVYYPDKVFRSSVLHSTQDLFLPFFSNVTWFHAIHVSGTNGTKRFDNPVLPFNDGVYFASTEKSNIIRGWIFGTTLDSKTQSLLIVNNATNVVIKVCEFQFCNDPFLGVYYHKNNKSWMESEFRVYSSANNCTFEYVSQPFLMDLEGKQGNFKNLREFVFKNIDGYFKIYSKHTPINLVRDLPQGFSALEPLVDLPIGINITRFQTLLALHRSYLTPGDSSSGWTAGAAAYYVGYLQPRTFLLKYNENGTITDAVDCALDPLSETKCTLKSFTVEKGIYQTSNFRVQPTESIVRFPNITNLCPFGEVFNATRFASVYAWNRKRISNCVADYSVLYNSASFSTFKCYGVSPTKLNDLCFTNVYADSFVIRGDEVREIAPGQTGKIADYNYKLPDDFTGCVIAWNSNNLDSKVGGNYNYLYRLFRKSNLKPFERDISTEIYQAGSTPCNGVEGFNCYFPLQSYGFQPTNGVGYQPYRVVVLSFELLHAPATVCGPKKSTNLVKNKCVNFNFNGLTGTGVLTESNKKFLPFQQFGRDIADTTDAVRDPQTLEILDITPCSFGGVSVITPGTNTSNQVAVLYQDVNCTEVPVAIHADQLTPTWRVYSTGSNVFQTRAGCLIGAEHVNNSYECDIPIGAGICASYQTQTNSPRRARSVASQSIIAYTMSLGAENSVAYSNNSIAIPTNFTISVTTEILPVSMTKTSVDCTMYICGDSTECSNLLLQYGSFCTQLNRALTGIAVEQDKNTQEVFAQVKQIYKTPPIKDFGGFNFSQILPDPSKPSKRSFIEDLLFNKVTLADAGFIKQYGDCLGDIAARDLICAQKFNGLTVLPPLLTDEMIAQYTSALLAGTITSGWTFGAGAALQIPFAMQMAYRFNGIGVTQCVLYENQKLIANQFNSAIGKIQDSLSSTASALGKLQDVVNQNAQALNTLVKQLSSNFGAISSVLNDILSRLDKVEAEVQIDRLITGRLQSLQTYVTQQLIRAAEIRASANLAATKMSECVLGQSKRVDFCGKGYHLMSFPQSAPHGVVFLHVTYVPAQEKNFTTAPAICHDGKAHFPREGVFVSNGTHWFVTQRNFYEPQIITTDNTFVCGNCDVVIGIVNNTVYDPLQPELDSFKEELDKYFKNHTSPDVDLGDISGINASVVNIQKEIDRLNEVAKNLNESLIDLQELGKYEQYIKGGGGSDIDPYKEFGSSYQLLNFLPLDFFPDLNALVDTATALYEEELTGREHCSPHHTAIRQALVCWDELTKLIAWMSSNITSEQVRTIIVNHVNDTWGLKVRQSLWFHLSCLTFGQHTVQEFLVSFGVWIRTPAPYRPPNAPILSTLPEHTVIC

SEQ ID NO: 13802 - protein, 1365 aa, Artificial Sequence
  SARS-CoV-2/Sweden/01/2020__EPI_ISL_411951 spike protein (1-1211)(N914C_S1123C) WhcAg construct
MFVFLVLLPLVSSQCVNLTTRTQLPPAYTNSFTRGVYYPDKVFRSSVLHSTQDLFLPFFSNVTWFHAIHVSGTNGTKRFDNPVLPFNDGVYFASTEKSNIIRGWIFGTTLDSKTQSLLIVNNATNVVIKVCEFQFCNDPFLGVYYHKNNKSWMESEFRVYSSANNCTFEYVSQPFLMDLEGKQGNFKNLREFVFKNIDGYFKIYSKHTPINLVRDLPQGFSALEPLVDLPIGINITRFQTLLALHRSYLTPGDSSSGWTAGAAAYYVGYLQPRTFLLKYNENGTITDAVDCALDPLSETKCTLKSFTVEKGIYQTSNFRVQPTESIVRFPNITNLCPFGEVFNATRFASVYAWNRKRISNCVADYSVLYNSASFSTFKCYGVSPTKLNDLCFTNVYADSFVIRGDEVRQIAPGQTGKIADYNYKLPDDFTGCVIAWNSNNLDSKVGGNYNYLYRLFRKSNLKPFERDISTEIYQAGSTPCNGVEGFNCYFPLQSYGFQPTNGVGYQPYRVVVLSFELLHAPATVCGPKKSTNLVKNKCVNFNFNGLTGTGVLTESNKKFLPFQQFGRDIADTTDAVRDPQTLEILDITPCSFGGVSVITPGTNTSNQVAVLYQDVNCTEVPVAIHADQLTPTWRVYSTGSNVFQTRAGCLIGAEHVNNSYECDIPIGAGICASYQTQTNSPRRARSVASQSIIAYTMSLGAENSVAYSNNSIAIPTNFTISVTTEILPVSMTKTSVDCTMYICGDSTECSNLLLQYGSFCTQLNRALTGIAVEQDKNTQEVFAQVKQIYKTPPIKDCGGFNFSQILPDPSKPSKRSFIEDLLFNKVTLADAGFIKQYGDCLGDIAARDLICAQKFNGLTVLPPLLTDEMIAQYTSALLAGTITSGWTFGAGAALQIPFAMQMAYRFNGIGVTQCVLYENQKLIANQFNSAIGKIQDSLSSTASALGKLQDVVNQNAQALNTLVKQLSSNFGAISSVLNDILSRLDKVEAEVQIDRLITGRLQSLQTYVTQQLIRAAEIRASANLAATKMSECVLGQSKRVDFCGKGYHLMSFPQSAPHGVVFLHVTYVPAQEKNFTTAPAICHDGKAHFPREGVFVSNGTHWFVTQRNFYEPQIITTDNTFVCGNCDVVIGIVNNTVYDPLQPELDSFKEELDKYFKNHTSPDVDLGDISGINASVVNIQKEIDRLNEVAKNLNESLIDLQELGKYEQYIKGGGGSDIDPYKEFGSSYQLLNFLPLDFFPDLNALVDTATALYEEELTGREHCSPHHTAIRQALVCWDELTKLIAWMSSNITSEQVRTIIVNHVNDTWGLKVRQSLWFHLSCLTFGQHTVQEFLVSFGVWIRTPAPYRPPNAPILSTLPEHTVIC

SEQ ID NO: 13803 - protein, 1365 aa, Artificial Sequence
  SARS-CoV-2/Tianmen/HBCDC-HB-07/2020__EPI_ISL_412983 spike protein (1-1211)(N914C_S1123C) WhcAg construct
MFVFLVLLPLVSSQCVNLTTRTQLPPAYTNSFTRGVYYPDKVFRSSVLHSTQDLFLPFFSNVTWFHAIHVSGTNGTKRFDNPVLPFNDGVYFASTEKSNIIRGWIFGTTLDSKTQSLLIVNNATNVVIKVCEFQFCNDPFLGVYYHKNNKSWMESEFRVYSSANNCTFEYVSQPFLMDLEGKQGNFKNLREFVFKNIDGYFKIYSKHTPINLVRDLPQGFSALEPLVDLPIGINITRFQTLLALHRSYLTPGDSSSGWTAGAAAYYVGYLQPRTFLLKYNENGTITDAVDCALDPLSETKCTLKSFTVEKGIYQTSNFRVQPTESIVRFPNITNLCPFGEVFNATRFASVYAWNRKRISNCVADYSVLYNSASFSTFKCYGVSPTKLNDLCFTNVYADSFVIRGDEVRQIAPGQTGKIADYNYKLPDDFTGCVIAWNSNNLDSKVGGNYNYLYRLFRKSNLKPFERDISTEIYQAGSTPCNGVEGFNCYFPLQSYGFQPTNGVGYQPYRVVVLSFELLHAPATVCGPKKSTNLVKNKCVNFNFNGLTGTGVLTESNKKFLPFQQFGRDIADTTDAVRDPQTLEILDITPCSFGGVSVITPGTNTSNQVAVLYQDLNCTEVPVAIHADQLTPTWRVYSTGSNVFQTRAGCLIGAEHVNNSYECDIPIGAGICASYQTQTNSPRRARSVASQSIIAYTMSLGAENSVAYSNNSIAIPTNFTISVTTEILPVSMTKTSVDCTMYICGDSTECSNLLLQYGSFCTQLNRALTGIAVEQDKNTQEVFAQVKQIYKTPPIKDFGGFNFSQILPDPSKPSKRSFIEDLLFNKVTLADAGFIKQYGDCLGDIAARDLICAQKFNGLTVLPPLLTDEMIAQYTSALLAGTITSGWTFGAGAALQIPFAMQMAYRFNGIGVTQCVLYENQKLIANQFNSAIGKIQDSLSSTASALGKLQDVVNQNAQALNTLVKQLSSNFGAISSVLNDILSRLDKVEAEVQIDRLITGRLQSLQTYVTQQLIRAAEIRASANLAATKMSECVLGQSKRVDFCGKGYHLMSFPQSAPHGVVFLHVTYVPAQEKNFTTAPAICHDGKAHFPREGVFVSNGTHWFVTQRNFYEPQIITTDNTFVCGNCDVVIGIVNNTVYDPLQPELDSFKEELDKYFKNHTSPDVDLGDISGINASVVNIQKEIDRLNEVAKNLNESLIDLQELGKYEQYIKGGGGSDIDPYKEFGSSYQLLNFLPLDFFPDLNALVDTATALYEEELTGREHCSPHHTAIRQALVCWDELTKLIAWMSSNITSEQVRTIIVNHVNDTWGLKVRQSLWFHLSCLTFGQHTVQEFLVSFGVWIRTPAPYRPPNAPILSTLPEHTVIC

SEQ ID NO: 13804 - protein, 1365 aa, Artificial Sequence
  SARS-CoV-2/Hong Kong/case42_VM20002493/2020__EPI_ISL_414527 spike protein (1-1211)(N914C_S1123C) WhcAg construct
MFVFLVLLPLVSSQCVNLTTRTQLPPAYTNSFTRGVYYPDKVFRSSVLHSTQDLFLPFFSNVTWFHAIHVSGTNGTKRFDNPVLPFNDGVYFASTEKSNIIRGWIFGTTLDSKTQSLLIVNNATNVVIKVCEFQFCNDPFLGVYYHKNNKSWMESEFRVYSSANNCTFEYVSQPFLMDLEGKQGNFKNLREFVFKNIDGYFKIYSKHTPINLVRDLPQGFSALEPLVDLPIGINITRFQTLLALHRSYLTPGDSSSGWTAGAAAYYVGYLQPRTFLLKYNENGTITDAVDCALDPLSETKCTLKSFTVEKGIYQTSNFRVQPTESIVRFPNITNLCPFGEVFNATRFASVYAWNRKRISNCVADYSVLYNSASFSTFKCYGVSPTKLNDLCFTNVYADSFVIRGDEVRQIAPGQTGKIADYNYKLPDDFTGCVIAWNSNNLDSKVGGNYNYLYRLFRKSNLKPFERDISTEIYQAGSTPCNGVEGFNCYFPLQSYGFQPTNGVGYQPYRVVVLSFELLHAPATVCGPKKSTNLVKNKCVNFNFNGLTGTGVLTESNKKFLPFQQFGRDIADTTDAVRDPQTLEILDITPCSFGGVSVITPGTNTSNQVAVLYQDVNCTEVPVAIHADQLTPTWRVYSTGSNVFQTRAGCLIGAEHVNNSYECDIPIGAGICASYQTQTNSPRRARSVASQSIIAYTMSLGAENSVAYSNNSIAIPTNFAISVTTEILPVSMTKTSVDCTMYICGDSTECSNLLLQYGSFCTQLNRALTGIAVEQDKNTQEVFAQVKQIYKTPPIKDFGGFNFSQILPDPSKPSKRSFIEDLLFNKVTLADAGFIKQYGDCLGDIAARDLICAQKFNGLTVLPPLLTDEMIAQYTSALLAGTITSGWTFGAGAALQIPFAMQMAYRFNGIGVTQCVLYENQKLIANQFNSAIGKIQDSLSSTASALGKLQDVVNQNAQALNTLVKQLSSNFGAISSVLNDILSRLDKVEAEVQIDRLITGRLQSLQTYVTQQLIRAAEIRASANLAATKMSECVLGQSKRVDFCGKGYHLMSFPQSAPHGVVFLHVTYVPAQEKNFTTAPAICHDGKAHFPREGVFVSNGTHWFVTQRNFYEPQIITTDNTFVCGNCDVVIGIVNNTVYDPLQPELDSFKEELDKYFKNHTSPDVDLGDISGINASVVNIQKEIDRLNEVAKNLNESLIDLQELGKYEQYIKGGGGSDIDPYKEFGSSYQLLNFLPLDFFPDLNALVDTATALYEEELTGREHCSPHHTAIRQALVCWDELTKLIAWMSSNITSEQVRTIIVNHVNDTWGLKVRQSLWFHLSCLTFGQHTVQEFLVSFGVWIRTPAPYRPPNAPILSTLPEHTVIC

SEQ ID NO: 13805 - protein, 1365 aa, Artificial Sequence
  SARS-CoV-2/USA/CruiseA-23/2020__EPI_ISL_414482 spike protein (1-1211)(N914C_S1123C) WhcAg construct
MFVFLVLLPLVSSQCVNLTTRTQLPPAYTNSFTRGVYYPDKVFRSSVLHSTQDLFLPFFSNVTWFHAIHVSGTNGTKRFDNPVLPFNDGVYFASTEKSNIIRGWIFGTTLDSKTQSLLIVNNATNVVIKVCEFQFCNDPFLGVYYHKNNKSWMESEFRVYSSANNCTFEYVSQPFLMDLEVKQGNFKNLREFVFKNIDGYFKIYSKHTPINLVRDLPQGFSALEPLVDLPIGINITRFQTLLALHRSYLTPGDSSSGWTAGAAAYYVGYLQPRTFLLKYNENGTITDAVDCALDPLSETKCTLKSFTVEKGIYQTSNFRVQPTESIVRFPNITNLCPFGEVFNATRFASVYAWNRKRISNCVADYSVLYNSASFSTFKCYGVSPTKLNDLCFTNVYADSFVIRGDEVRQIAPGQTGKIADYNYKLPDDFTGCVIAWNSNNLDSKVGGNYNYLYRLFRKSNLKPFERDISTEIYQAGSTPCNGVEGFNCYFPLQSYGFQPTNGVGYQPYRVVVLSFELLHAPATVCGPKKSTNLVKNKCVNFNFNGLTGTGVLTESNKKFLPFQQFGRDIADTTDAVRDPQTLEILDITPCSFGGVSVITPGTNTSNQVAVLYQDVNCTEVPVAIHADQLTPTWRVYSTGSNVFQTRAGCLIGAEHVNNSYECDIPIGAGICASYQTQTNSPRRARSVASQSIIAYTMSLGAENSVAYSNNSIAIPTNFTISVTTEILPVSMTKTSVDCTMYICGDSTECSNLLLQYGSFCTQLNRALTGIAVEQDKNTQEVFAQVKQIYKTPPIKDFGGFNFSQILPDPSKPSKRSFIEDLLFNKVTLADAGFIKQYGDCLGDIAARDLICAQKFNGLTVLPPLLTDEMIAQYTSALLAGTITSGWTFGAGAALQIPFAMQMAYRFNGIGVTQCVLYENQKLIANQFNSAIGKIQDSLSSTASALGKLQDVVNQNAQALNTLVKQLSSNFGAISSVLNDILSRLDKVEAEVQIDRLITGRLQSLQTYVTQQLIRAAEIRASANLAATKMSECVLGQSKRVDFCGKGYHLMSFPQSAPHGVVFLHVTYVPAQEKNFTTAPAICHDGKAHFPREGVFVSNGTHWFVTQRNFYEPQIITTDNTFVCGNCDVVIGIVNNTVYDPLQPELDSFKEELDKYFKNHTSPDVDLGDISGINASVVNIQKEIDRLNEVAKNLNESLIDLQELGKYEQYIKGGGGSDIDPYKEFGSSYQLLNFLPLDFFPDLNALVDTATALYEEELTGREHCSPHHTAIRQALVCWDELTKLIAWMSSNITSEQVRTIIVNHVNDTWGLKVRQSLWFHLSCLTFGQHTVQEFLVSFGVWIRTPAPYRPPNAPILSTLPEHTVIC

SEQ ID NO: 13806 - protein, 1365 aa, Artificial Sequence
  SARS-CoV-2/Hong Kong/case85_VM20002868/2020__EPI_ISL_414519 spike protein (1-1211)(N914C_S1123C) WhcAg construct
MFVFLVLVPLVSSQCVNLTTRTQLPPAYTNSFTRGVYYPDKVFRSSVLHSTQDLFLPFFSNVTWFHAIHVSGTNGTKRFDNPVLPFNDGVYFASTEKSNIIRGWIFGTTLDSKTQSLLIVNNATNVVIKVCEFQFCNDPFLGVYYHKNNKSWMESEFRVYSSANNCTFEYVSQPFLMDLEGKQGNFKNLREFVFKNIDGYFKIYSKHTPINLVRDLPQGFSALEPLVDLPIGINITRFQTLLALHRSYLTPGDSSSGWTAGAAAYYVGYLQPRTFLLKYNENGTITDAVDCALDPLSETKCTLKSFTVEKGIYQTSNFRVQPTESIVRFPNITNLCPFGEVFNATRFASVYAWNRKRISNCVADYSVLYNSASFSTFKCYGVSPTKLNDLCFTNVYADSFVIRGDEVRQIAPGQTGKIADYNYKLPDDFTGCVIAWNSNNLDSKVGGNYNYLYRLFRKSNLKPFERDISTEIYQAGSTPCNGVEGFNCYFPLQSYGFQPTNGVGYQPYRVVVLSFELLHAPATVCGPKKSTNLVKNKCVNFNFNGLTGTGVLTESNKKFLPFQQFGRDIADTTDAVRDPQTLEILDITPCSFGGVSVITPGTNTSNQVAVLYQDVNCTEVPVAIHADQLTPTWRVYSTGSNVFQTRAGCLIGAEHVNNSYECDIPIGAGICASYQTQTNSPRRARSVASQSIIAYTMSLGAENSVAYSNNSIAIPTNFTISVTTEILPVSMTKTSVDCTMYICGDSTECSNLLLQYGSFCTQLNRALTGIAVEQDKNTQEVFAQVKQIYKTPPIKDFGGFNFSQILPDPSKPSKRSFIEDLLFNKVTLADAGFIKQYGDCLGDIAARDLICAQKFNGLTVLPPLLTDEMIAQYTSALLAGTITSGWTFGAGAALQIPFAMQMAYRFNGIGVTQCVLYENQKLIANQFNSAIGKIQDSLSSTASALGKLQDVVNQNAQALNTLVKQLSSNFGAISSVLNDILSRLDKVEAEVQIDRLITGRLQSLQTYVTQQLIRAAEIRASANLAATKMSECVLGQSKRVDFCGKGYHLMSFPQSAPHGVVFLHVTYVPAQEKNFTTAPAICHDGKAHFPREGVFVSNGTHWFVTQRNFYEPQIITTDNTFVCGNCDVVIGIVNNTVYDPLQPELDSFKEELDKYFKNHTSPDVDLGDISGINASVVNIQKEIDRLNEVAKNLNESLIDLQELGKYEQYIKGGGGSDIDPYKEFGSSYQLLNFLPLDFFPDLNALVDTATALYEEELTGREHCSPHHTAIRQALVCWDELTKLIAWMSSNITSEQVRTIIVNHVNDTWGLKVRQSLWFHLSCLTFGQHTVQEFLVSFGVWIRTPAPYRPPNAPILSTLPEHTVIC

SEQ ID NO: 13807 - protein, 1365 aa, Artificial Sequence; identical to SEQ ID NO: 13797
  SARS-CoV-2/England/200990660/2020__EPI_ISL_414523 spike protein (1-1211)(N914C_S1123C) WhcAg construct

SEQ ID NO: 13808 - protein, 1365 aa, Artificial Sequence
  SARS-CoV-2/Australia/NSW09/2020__EPI_ISL_413595 spike protein (1-1211)(N914C_S1123C) WhcAg construct
MFVFLVLLPLVSSQCVNLTTRTQLPPAYTNSFTRGVYYPDKVFRSSVLHSTQDLFLPFFSNVTWFHAIHVSGTNGTKRFDNPVLPFNDGVYFASTEKSNIIRGWIFGTTLDSKTQSLLIVNNATNVVIKVCEFQFCNDPFLGVYYHKNNKSWMESEFRVYSSANNCTFEYVSQPFLMDLEGKQGNFKNLREFVFKNIDGYFKIYSKHTPINLVRDLPQGFSALEPLVDLPIGINITRFQTLLALHRSYLTPGDSSSGWTAGAAAYYVGYLQPRTFLLKYNENGTITDAVDCALDPLSETKCTLKSFTVEKGIYQTSNFRVQPTESIVRFPNITNLCPFGEVFNATRFASVYAWNRKRISNCVADYSVLYNSASFSTFKCYGVSPTKLNDLCFTNVYADSFVIRGDEVRQIAPGQTGKIADYNYKLPDDFTGCVIAWNSNNLDSKVGGNYNYLYRLFRKSNLKPFERDISTEIYQAGSTPCNGVEGFNCYFPLQSYGFQPTNGVGYQPYRVVVLSFELLHAPATVCGPKKSTNLVKNKCVNFNFNGLTGTGVLTESNKKFLPFQQFGRDIADTTDAVRDPQTLEILDITPCSFGGVSVITPGTNTSNQVAVLYQDVNCTEVPVAIHADQLTPTWRVYSTGSNVFQTRAGCLIGAEHVNNSYECDIPIGAGICASYQTQTNSPRRARSVASQSIIAYTMSLGAENSVAYSNNSIAIPTNFTISVTTEILPVSMTKTSVDCTMYICGDSTECSNLLLQYGSFCTQLNRALTGIAVEQDKNTQEVFAQVKQIYKTPPIKDFGGFNFSQILPDPSKPSKRSFIEDLLFNKVTLADAGFIKQYGDCLGDIAARDLICAQKFNGLTVLPPLLTDEMIAQYTSALLAGTITSGWTFGAGAALQIPFAMQMAYRFNGIGVTQCVLYENQKLIANQFNSAIGKIQDSLSFTASALGKLQDVVNQNAQALNTLVKQLSSNFGAISSVLNDILSRLDKVEAEVQIDRLITGRLQSLQTYVTQQLIRAAEIRASANLAATKMSECVLGQSKRVDFCGKGYHLMSFPQSAPHGVVFLHVTYVPAQEKNFTTAPAICHDGKAHFPREGVFVSNGTHWFVTQRNFYEPQIITTDNTFVCGNCDVVIGIVNNTVYDPLQPELDSFKEELDKYFKNHTSPDVDLGDISGINASVVNIQKEIDRLNEVAKNLNESLIDLQELGKYEQYIKGGGGSDIDPYKEFGSSYQLLNFLPLDFFPDLNALVDTATALYEEELTGREHCSPHHTAIRQALVCWDELTKLIAWMSSNITSEQVRTIIVNHVNDTWGLKVRQSLWFHLSCLTFGQHTVQEFLVSFGVWIRTPAPYRPPNAPILSTLPEHTVIC

SEQ ID NO: 13809 - protein, 1365 aa, Artificial Sequence; identical to SEQ ID NO: 13789
  SARS-CoV-2/Australia/NSW10/2020__EPI_ISL_413596 spike protein (1-1211)(N914C_S1123C) WhcAg construct

SEQ ID NO: 13810 - protein, 1365 aa, Artificial Sequence
  SARS-CoV-2/Switzerland/1000477797/2020__EPI_ISL_413023 spike protein (1-1211)(N914C_S1123C) WhcAg construct
MFVFLVLLPLVSSQCVNLTTRTQLPPAYTNSFTRGVYYPDKVFRSSVLHSTQDLFLPFFSNVTWFHAIHVSGTNGTKRFDNPVLPFNDGVYFASTEKSNIIRGWIFGTTLDSKTQSLLIVNNATNVVIKVCEFQFCNDPFLGVYYHKNNKSWMESEFRVYSSANNCTFEYVSQPFLMDLEGKQGNFKNLREFVFKNIDGYFNIYSKHTPINLVRDLPQGFSALEPLVDLPIGINITRFQTLLALHRSYLTPGDSSSGWTAGAAAYYVGYLQPRTFLLKYNENGTITDAVDCALDPLSETKCTLKSFTVEKGIYQTSNFRVQPTESIVRFPNITNLCPFGEVFNATRFASVYAWNRKRISNCVADYSVLYNSASFSTFKCYGVSPTKLNDLCFTNVYADSFVIRGDEVRQIAPGQTGKIADYNYKLPDDFTGCVIAWNSNNLDSKVGGNYNYLYRLFRKSNLKPFERDISTEIYQAGSTPCNGVEGFNCYFPLQSYGFQPTNGVGYQPYRVVVLSFELLHAPATVCGPKKSTNLVKNKCVNFNFNGLTGTGVLTESNKKFLPFQQFGRDIADTTDAVRDPQTLEILDITPCSFGGVSVITPGTNTSNQVAVLYQGVNCTEVPVAIHADQLTPTWRVYSTGSNVFQTRAGCLIGAEHVNNSYECDIPIGAGICASYQTQTNSPRRARSVASQSIIAYTMSLGAENSVAYSNNSIAIPTNFTISVTTEILPVSMTKTSVDCTMYICGDSTECSNLLLQYGSFCTQLNRALTGIAVEQDKNTQEVFAQVKQIYKTPPIKDFGGFNFSQILPDPSKPSKRSFIEDLLFNKVTLADAGFIKQYGDCLGDIAARDLICAQKFNGLTVLPPLLTDEMIAQYTSALLAGTITSGWTFGAGAALQIPFAMQMAYRFNGIGVTQCVLYENQKLIANQFNSAIGKIQDSLSSTASALGKLQDVVNQNAQALNTLVKQLSSNFGAISSVLNDILSRLDKVEAEVQIDRLITGRLQSLQTYVTQQLIRAAEIRASANLAATKMSECVLGQSKRVDFCGKGYHLMSFPQSAPHGVVFLHVTYVPAQEKNFTTAPAICHDGKAHFPREGVFVSNGTHWFVTQRNFYEPQIITTDNTFVCGNCDVVIGIVNNTVYDPLQPELDSFKEELDKYFKNHTSPDVDLGDISGINASVVNIQKEIDRLNEVAKNLNESLIDLQELGKYEQYIKGGGGSDIDPYKEFGSSYQLLNFLPLDFFPDLNALVDTATALYEEELTGREHCSPHHTAIRQALVCWDELTKLIAWMSSNITSEQVRTIIVNHVNDTWGLKVRQSLWFHLSCLTFGQHTVQEFLVSFGVWIRTPAPYRPPNAPILSTLPEHTVIC

SEQ ID NO: 13811 - protein, 1365 aa, Artificial Sequence
  SARS-CoV-2/Belgium/BA-02291/2020__EPI_ISL_415159 spike protein (1-1211)(N914C_S1123C) WhcAg construct
MFVFLVLLPLVSSQCVNLTTRTQLPPAYTNSFTRGVYYPDKVFRSSVLHSTQDLFLPFFSNVTWFHAIHVSGTNGTKRFDNPVLPFNDGVYFASTEKSNIIRGWIFGTTLDSKTQSLLIVNNATNVVIKVCEFQFCNDPFLGVYYHKNNKSWMESEFRVYSSANNCTFEYVSQPFLMDLEGKQGNFKNLREFVFKNIDGYFKIYSKHTPINLVRDLPQGFSALEPLVDLPIGINITRFQTLLALHRSYLTPGDSSSGWTAGAAAYYVGYLQPRTFLLKYNENGTITDAVDCALDPLSETKCTLKSFTVEKGIYQTSNFRVQPTESIVRFPNITNLCPFGEVFNATRFASVYAWNRKRISNCVADYSVLYNSASFSTFKCYGVSPTKLNDLCFTNVYADSFVIRGDEVRQIAPGQTGKIADYNYKLPDDFTGCVIAWNSNNLDSKVGGNYNYLYRLFRRSNLKPFERDISTEIYQAGSTPCNGVEGFNCYFPLQSYGFQPTNGVGYQPYRVVVLSFELLPAPATVCGPKKSTNLVKNKCVNFNFNGLTGTGVLTESNKKFLPFQQFGRDIADTTDAVRDPQTLEILDITPCSFGGVSVITPGTNTSNQVAVLYQGVNCTEVPVAIHADQLTPTWRVYSTGSNVFQTRAGCLIGAEHVNNSYECDIPIGAGICASYQTQTNSPRRARSVASQSIIAYTMSLGAENSVAYSNNSIAIPTNFTISVTTEILPVSMTKTSVDCTMYICGDSTECSNLLLQYGSFCTQLNRALTGIAVEQDKNTQEVFAQVKQIYKTPPIKDFGGFNFSQILPDPSKPSKRSFIEDLLFNKVTLADAGFIKQYGDCLGDIAARDLICAQKFNGLTVLPPLLTDEMIAQYTSALLAGTITSGWTFGAGAALQIPFAMQMAYRFNGIGVTQCVLYENQKLIANQFNSAIGKIQDSLSSAAPALGKLQDVVNQNAQALNTLVKQLSSNFGAISSVLNDILSRLDKVEAEVQIDRLITGRLQSLQTYVTQQLIRAAEIRASANLAATKMSECVLGQSKRVDFCGKGYHLMSFPQSAPHGVVFLHVTYVPAQEKNFTTAPAICHDGKAHFPREGVFVSNGTHWFVTQRNFYEPQIITTDNTFVCGNCDVVIGIVNNTVYDPLQPELDSFKEELDKYFKNHTSPDVDLGDISGINASVVNIQKEIDRLNEVAKNLNESLIDLQELGKYEQYIKGGGGSDIDPYKEFGSSYQLLNFLPLDFFPDLNALVDTATALYEEELTGREHCSPHHTAIRQALVCWDELTKLIAWMSSNITSEQVRTIIVNHVNDTWGLKVRQSLWFHLSCLTFGQHTVQEFLVSFGVWIRTPAPYRPPNAPILSTLPEHTVIC

SEQ ID NO: 13812 - protein, 1365 aa, Artificial Sequence
  SARS-CoV-2/USA/WA8-UW5/2020__EPI_ISL_413486 spike protein (1-1211)(N914C_S1123C) WhcAg construct
MFVFLVLLPLVSSQCVNLTTRTQLPPAYTNSFTRGVYYPDKVFRSSVLHSTQDLFLPFFSNVTWFHAIHVSGTNGTKRFDNPVLPFNDGVYFASTEKSNIIRGWIFGTTLDSKTQSLLIVNNATNVVIKVCEFQFCNDPFLGVYYHKNNKSWMESEFRVYSSANNCTFEYVSQPFLMDLEGKQGNFKNLREFVFKNIDGYFKIYSKHTPINLVRDLPQGFSALEPLVDLPIGINITRFQTLLALHRSYLTPGDSSSGWTAGAAAYYVGYLQPRTFLLKYNENGTITDAVDCALDPLSETKCTLKSFTVEKGIYQTSNFRVQPTESIVRFPNITNLCPFGEVFNATRFASVYAWNRKRISNCVADYSVLYNSASFSTFKCYGVSPTKLNDLCFTNVYADSFVIRGDEVRQIAPGQTGKIADYNYKLPDDFTGCVIAWNSNNLDSKVGGNYNYLYRLFRKSNLKPFERDISTEIYQAGSTPCNGVEGFNCYFPLQSYGFQPTNGVGYQPYRVVVLSFELLHAPATVCGPKKSTNLVKNKCVNFNFNGLTGTGVLTESNKKFLPFQQFGRDIADTTDAVRDPQTLEILDITPCSFGGVSVITPGTNTSNQVAVLYQDVNCTEVPVAIHADQLTPTWRVYSTGSNVFQTRAGCLIGAEYVNNSYECDIPIGAGICASYQTQTNSPRRARSVASQSIIAYTMSLGAENSVAYSNNSIAIPTNFTISVTTEILPVSMTKTSVDCTMYICGDSTECSNLLLQYGSFCTQLNRALTGIAVEQDKNTQEVFAQVKQIYKTPPIKDFGGFNFSQILPDPSKPSKRSFIEDLLFNKVTLADAGFIKQYGDCLGDIAARDLICAQKFNGLTVLPPLLTDEMIAQYTSALLAGTITSGWTFGAGAALQIPFAMQMAYRFNGIGVTQCVLYENQKLIANQFNSAIGKIQDSLSSTASALGKLQDVVNQNAQALNTLVKQLSSNFGAISSVLNDILSRLDKVEAEVQIDRLITGRLQSLQTYVTQQLIRAAEIRASANLAATKMSECVLGQSKRVDFCGKGYHLMSFPQSAPHGVVFLHVTYVPAQEKNFTTAPAICHDGKAHFPREGVFVSNGTHWFVTQRNFYEPQIITTDNTFVCGNCDVVIGIVNNTVYDPLQPELDSFKEELDKYFKNHTSPDVDLGDISGINASVVNIQKEIDRLNEVAKNLNESLIDLQELGKYEQYIKGGGGSDIDPYKEFGSSYQLLNFLPLDFFPDLNALVDTATALYEEELTGREHCSPHHTAIRQALVCWDELTKLIAWMSSNITSEQVRTIIVNHVNDTWGLKVRQSLWFHLSCLTFGQHTVQEFLVSFGVWIRTPAPYRPPNAPILSTLPEHTVIC

SEQ ID NO: 13813 - protein, 1365 aa, Artificial Sequence
  SARS-CoV-2/England/20102000506/2020__EPI_ISL_415147 spike protein (1-1211)(N914C_S1123C) WhcAg construct
MFVFLVLLPLVSSQCVNLTTRTQLPPAYTNSFTRGVYYPDKVFRSSVLHSTQDLFLPFFSNVTWFHAIHVSGTNGTKRFDNPVLPFNDGVYFASTEKSNIIRGWIFGTTLDSKTQSLLIVNNATNVVIKVCEFQFCNDPFLGVYYHKNNKSWMESEFRVYSSANNCTFEYVSQPFLMDLEGKQGNFKNLREFVFKNIDGYFKIYSKHTPINLVRDLPQGFSALEPLVDLPIGINITRFQTLLALHRSYLTPGDSSSGWTAGAAAYYVGYLQPRTFLLKYNENGTITDAVDCALDPLSETKCTLKSFTVEKGIYQTSNFRVQPTESIVRFPNITNLCPFGEVFNATRFASVYAWNRKRISNCVADYSVLYNSASFSTFKCYGVSPTKLNDLCFTNVYADSFVIRGDEVRQIAPGQTGKIADYNYKLPDDFTGCVIAWNSNNLDSKVGGNYNYLYRLFRKSNLKPFERDISTEIYQAGSTPCNGVEGFNCYFPLQSYGFQPTNGVGYQPYRVVVLSFELLHAPATVCGPKKSTNLVKNKCVNFNFNGLTGTGVLTESNKKFLPFQQFGRDIADTTDAVRDPQTLEILDITPCSFGGVSVITPGTNTSNQVAVLYQGVNCTEVPVAIHADQLTPTWRVYSTGSNVFQTRAGCLIGAEHVNNSYECDIPIGAGICASYQTQTNSPRRARSVASQSIIAYTMSLGAENSVAYSNNSIAIPTNFTISVTTEILPVSMTKTSVDCTMYICGDSTECSNLLLQYGSFCTQLNRALTGIAVEQDKNTQEVFAQVKQIYKTPPIKDFGGFNFSQILPDPSKPSKRSFIEDLLFNKVTLADAGFIKQYGYCLGDIAARDLICAQKFNGLTVLPPLLTDEMIAQYTSALLAGTITSGWTFGAGAALQIPFAMQMAYRFNGIGVTQCVLYENQKLIANQFNSAIGKIQDSLSSTASALGKLQDVVNQNAQALNTLVKQLSSNFGAISSVLNDILSRLDKVEAEVQIDRLITGRLQSLQTYVTQQLIRAAEIRASANLAATKMSECVLGQSKRVDFCGKGYHLMSFPQSAPHGVVFLHVTYVPAQEKNFTTAPAICHDGKAHFPREGVFVSNGTHWFVTQRNFYEPQIITTDNTFVCGNCDVVIGIVNNTVYDPLQPELDSFKEELDKYFKNHTSPDVDLGDISGINASVVNIQKEIDRLNEVAKNLNESLIDLQELGKYEQYIKGGGGSDIDPYKEFGSSYQLLNFLPLDFFPDLNALVDTATALYEEELTGREHCSPHHTAIRQALVCWDELTKLIAWMSSNITSEQVRTIIVNHVNDTWGLKVRQSLWFHLSCLTFGQHTVQEFLVSFGVWIRTPAPYRPPNAPILSTLPEHTVIC

SEQ ID NO: 13814 - protein, 1365 aa, Artificial Sequence
  SARS-CoV-2/Belgium/VAG-03013/2020__EPI_ISL_415155 spike protein (1-1211)(N914C_S1123C) WhcAg construct
MFVFLVLLPLVSSQCVNLTTRTQLPPAYTNSFTRGVYYPDKVFRSSVLHSTQDLFLPFFSNVTWFHAIHVSGTNGTKRFDNPVLPFNDGVYFASTEKSNIIRGWIFGTTLDSKTQSLLIVNNATNVVIKVCEFQFCNDPFLGVYYHKNNKSWMESEFRVYSSANNCTFEYVSQPFLMDLEGKQGNFKNLREFVFKNIDGYFKIYSKHTPINLVRDLPQGFSALEPLVDLPIGINITRFQTLLALHRSYLTPGDSSSGWTAGAAAYYVGYLQPRTFLLKYNENGTITDAVDCALDPLSETKCTLKSFTVEKGIYQTSNFRVQPTESIVRFPNITNLCPFGEVFNATRFASVYAWNRKRISNCVADYSVLYNSASFSTFKCYGVSPTKLNDLCFTNVYADSFVIRGDEVRQIAPGQTGKIADYNYKLPDDFTGCVIAWNSNNLDSKVGGNYNYLYRLFRKSNLKPFERDISTEIYQAGSTPCNGVEGFNCYFPLQSYGFQPTNGVGYQPYRVVVLSFELLHAPATVCGPKKSTNLVKNKCVNFNFNGLTGTGVLTESNKKFLPFQQFGRDIADTTDAVRDPQTLEILDITPCSFGGVSVITPGTNTSNQVAVLYQGVNCTEVPVAIHADQLTPTWRVYSTGSNVFQTRAGCLIGAEHVNNSYECDIPIGAGICASYQTQTNSPRRARSVASQSIIAYTMSLGAENSVAYSNNSIAIPTNFTISVTTEILPVSMTKTSVDCTMYICGDSTECSNLLLQYGSFCTQLNRALTGIAVEQDKNTQEVFAQVKQIYKTPPIKDFGGFNFSQILPDPSKPSKRSFIEDLLFNKVTLADAGFIKQYGDCLGDIAARDLICAQKFNGLTVLPPLLTDEMIAQYTSALLAGTITSGWTFGAGAALQIPFAMQMAYRFNGIGVTQCVLYENQKLIANQFNSAIGKIQDSLSSTATALGKLQDVVNQNAQALNTLVKQLSSNFGAISSVLNDILSRLDKVEAEVQIDRLITGRLQSLQTYVTQQLIRAAEIRASANLAATKMSECVLGQSKRVDFCGKGYHLMSFPQSAPHGVVFLHVTYVPAQEKNFTTAPAICHDGKAHFPREGVFVSNGTHWFVTQRNFYEPQIITTDNTFVCGNCDVVIGIVNNTVYDPLQPELDSFKEELDKYFKNHTSPDVDLGDISGINASVVNIQKEIDRLNEVAKNLNESLIDLQELGKYEQYIKGGGGSDIDPYKEFGSSYQLLNFLPLDFFPDLNALVDTATALYEEELTGREHCSPHHTAIRQALVCWDELTKLIAWMSSNITSEQVRTIIVNHVNDTWGLKVRQSLWFHLSCLTFGQHTVQEFLVSFGVWIRTPAPYRPPNAPILSTLPEHTVIC

SEQ ID NO: 13815 - protein, 1365 aa, Artificial Sequence
  SARS-CoV-2/Belgium/BC-03016/2020__EPI_ISL_415157 spike protein (1-1211)(N914C_S1123C) WhcAg construct
MFVFLVLLPLVSSQCVNLTTRTQLPPAYTNSFTRGVYYPDKVFRSSVLHSTQDLFLPFFSNVTWFHAIHVSGTNGTKRFDNPVLPFNDGVYFASTEKSNIIRGWIFGTTLDSKTQSLLIVNNATNVVIKVCEFQFCNDPFLGVYYHKNNKSWMESEFRVYSSANNCTFEYVSQPFLMDLEGKQGNFKNLREFVFKNIDGYFKIYSKHTPINLVRDLPQGFSALEPLVDLPIGINITRFQTLLALHRSYLTPGDSSSGWTAGAAAYYVGYLQPRTFLLKYNENGTITDAVDCALDPLSETKCTLKSFTVEKGIYQTSNFRVQPTESIVRFPNITNLCPFGEVFNATRFASVYAWNRKRISNCVADYSVLYNSASFSTFKCYGVSPTKLNDLCFTNVYADSFVIRGDEVRQIAPGQTGKIADYNYKLPDDFTGCVIAWNSNNLDSKVGGNYNYLYRLFRKSNLKPFERDISTEIYQAGSTPCNGVEGFNCYFPLQSYGFQPTNGVGYQPYRVVVLSFELLHAPATVCGPKKSTNLVKNKCVNFNFNGLTGTGVLTESNKKFLPFQQFGRDIADTTDAVRDPQTLEILDITPCSFGGVSVITPGTNTSNQVAVLYQGVNCTEVPVAIHADQLTPTWRVYSTGSNVFQTRAGCLIGAEHVNNSYECDIPIGAGICASYQTQTNSPRRARSVASQSIIAYTMSLGAENSVAYSNNSIAIPTNFTISVTTEILPVSMTKTSVDCTMYICGDSTECSNLLLQYGSFCTQLNRALTGIAVEQDKNTQEVFAQVKQIYKTPPIKDFGGFNFSQILPDPSKPSKRSFIEDLLFNKVTLADAGFIKQYGDCLGDIAARDLICAQKFNGLTVLPPLLTDEMIAQYTSALLAGTITSGWTFGAGAALQIPFAMQMAYRFNGIGVTQCVLYENQKLIANQFNSAIGKIQDSLSSTAPALGKLQDVVNQNAQALNTLVKQLSSNFGAISSVLNDILSRLDKVEAEVQIDRLITGRLQSLQTYVTQQLIRAAEIRASANLAATKMSECVLGQSKRVDFCGKGYHLMSFPQSAPHGVVFLHVTYVPAQEKNFTTAPAICHDGKAHFPREGVFVSNGTHWFVTQRNFYEPQIITTDNTFVCGNCDVVIGIVNNTVYDPLQPELDSFKEELDKYFKNHTSPDVDLGDISGINASVVNIQKEIDRLNEVAKNLNESLIDLQELGKYEQYIKGGGGSDIDPYKEFGSSYQLLNFLPLDFFPDLNALVDTATALYEEELTGREHCSPHHTAIRQALVCWDELTKLIAWMSSNITSEQVRTIIVNHVNDTWGLKVRQSLWFHLSCLTFGQHTVQEFLVSFGVWIRTPAPYRPPNAPILSTLPEHTVIC

SEQ ID NO: 13816 - protein, 1365 aa, Artificial Sequence
  SARS-CoV-2/Germany/BavPat3/2020__EPI_ISL_414521 spike protein (1-1211)(N914C_S1123C) WhcAg construct
MFVFLVLLPLVSSQCVNLTTRTQLPPAYTNSFTRGVYYPDKVFRSSVLHSTQDLFLPFFSNVTWFHAIHVSGTNGTKRFDNPVLPFNDGVYFASTEKSNIIRGWIFGTTLDSKTQSLLIVNNATNVVIKVCEFQFCNDPFLGVYYHKNNKSWMESEFRVYSSANNCTFEYVSQPFLMDLEGKQGNFKNLREFVFKNIDGYFKIYSKHTPINLVRDLPQGFSALEPLVDLPIGINITRFQTLLALHRSYLTPGDSSSGWTAGAAAYYVGYLQPRTFLLKYNENGTITDAVDCALDPLSETKCTLKSFTVEKGIYQTSNFRVQPTESIVRFPNITNLCPFGEVFNATRFASVYAWNRKRISNCVADYSVLYNSASFSTFKCYGVSPTKLNDLCFTNVYADSFVIRGDEVRQIAPGQTGKIADYNYKLPDDFTGCVIAWNSNNLDSKVGGNYNYLYRLFRKSNLKPFERDISTEIYQAGSTPCNGVEGFNCYFPLQSYGFQPTNGVGYQPYRVVVLSFELLHAPATVCGPKKSTNLVKNKCVNFNFNGLTGTGVLTESNKKFLPFQQFGRDIADTTDAVRDPQTLEILDITPCSFGGVSVITPGTNTSNQVAVLYQDVNCTEVPVAIHADQLTPTWRVYSTGSNVFQTRAGCLIGAEHVNNSYECDIPIGAGICASYQTQTNSPRRARSVASQSIIAYTMSLGAENSVAYSNNSIAIPTNFTISVTTEILPVSMTKTSVDCTMYICGDSTECSNLLLQYGSFCTQLNRALTGIAVEQDKNTQQVFAQVKQIYKTPPIKDFGGFNFSQILPDPSKPSKRSFIEDLLFNKVTLADAGFIKQYGDCLGDIAARDLICAQKFNGLTVLPPLLTDEMIAQYTSALLAGTITSGWTFGAGAALQIPFAMQMAYRFNGIGVTQCVLYENQKLIANQFNSAIGKIQDSLSSTASALGKLQDVVNQNAQALNTLVKQLSSNFGAISSVLNDILSRLDKVEAEVQIDRLITGRLQSLQTYVTQQLIRAAEIRASANLAATKMSECVLGQSKRVDFCGKGYHLMSFPQSAPHGVVFLHVTYVPAQEKNFTTAPAICHDGKAHFPREGVFVSNGTHWFVTQRNFYEPQIITTDNTFVCGNCDVVIGIVNNTVYDPLQPELDSFKEELDKYFKNHTSPDVDLGDISGINASVVNIQKEIDRLNEVAKNLNESLIDLQELGKYEQYIKGGGGSDIDPYKEFGSSYQLLNFLPLDFFPDLNALVDTATALYEEELTGREHCSPHHTAIRQALVCWDELTKLIAWMSSNITSEQVRTIIVNHVNDTWGLKVRQSLWFHLSCLTFGQHTVQEFLVSFGVWIRTPAPYRPPNAPILSTLPEHTVIC

SEQ ID NO: 13817 - protein, 1365 aa, Artificial Sequence
  SARS-CoV-2/France/HF1805/2020__EPI_ISL_414628 spike protein (1-1211)(N914C_S1123C) WhcAg construct
MFVFLVLLPLVSSQCVNLTTRTQLPPAYTNSFTRGVYYPDKVFRSSVLHSTQDLFLPFFSNVTWFHAIHVSGTNGTKRFDNPVLPFNDGVYFASTEKSNIIRGWIFGTTLDSKTQSLLIVNNATNVVIKVCEFQFCNDPFLGVYYHKNNKSWMESEFRVYSSANNCTFEYVSQPFLMDLEGKQGNFKNLREFVFKNIDGYFKIYSKHTPINLVRDLPQGFSALEPLVDLPIGINITRFQTLLALHRSYLTPGDSSSGWTAGAAAYYVGYLQPRTFLLKYNENGTITDAVDCALDPLSETKCTLKSFTVEKGIYQTSNFRVQPTESIVRFPNITNLCPFGEVFNATRFASVYAWNRKRISNCVADYSVLYNSASFSTFKCYGVSPTKLNDLCFTNVYADSFVIRGDEVRQIAPGQTGKIADYNYKLPDDFTGCVIAWNSNNLDSKVGGNYNYLYRLFRKSNLKPFERDISTEIYQAGSTPCNGVEGFNCYFPLQSYGFQPTNGVGYQPYRVVVLSFELLHAPATVCGPKKSTNLVKNKCVNFNFNGLTGTGVLTESNKKFLPFQQFGRDIADTTDAVRDPQTLEILDITPCSFGGVSVITPGTNTSNQVAVLYQGVNCTEVPVAIHADQLTPTWRVYSTGSNVFQTRAGCLIGAEHVNNSYECDIPIGAGICASYQTQTNSPRRARSVASQSIIAYTMSLGAENSVAYSNNSIAIPTNFTISVTTEILPVSMTKTSVDCTMYICGDSTECSNLLLQYGSFCTQLNRALTGIAVEQDKNTQEVFAQVKQIYKTPPIKDFGGFNFSQILPDPSKPSKRSFIEDLLFNKVTLADAGFIKQYGDCLGDIAARDLICAQKFNGLTVLPPLLTDEMIAQYTSALLAGTITSGWTFGAGAALQIPFAMQMAYRFNGIGVTQCVLYENQKLIANQFNSAIGKIQDSLSSTASALGKLQDVVNQNAQALNTLVKQLSSNFGAISSVLNDILSRLDKVEAEVQIDRLITGRLQSLQTYVTQQLIRAAEIRASANLAATKMSECVLGQSKRVDFCGKGYHLMSFPQSAPHGVVFLHVTYVPAQEKNFTTAPAICHDGKAHFPREGVFVSNGTHWFVTQRNFYEPQIITTDNTFVCGNCDVVIGVVNNTVYDPLQPELDSFKEELDKYFKNHTSPDVDLGDISGINASVVNIQKEIDRLNEVAKNLNESLIDLQELGKYEQYIKGGGGSDIDPYKEFGSSYQLLNFLPLDFFPDLNALVDTATALYEEELTGREHCSPHHTAIRQALVCWDELTKLIAWMSSNITSEQVRTIIVNHVNDTWGLKVRQSLWFHLSCLTFGQHTVQEFLVSFGVWIRTPAPYRPPNAPILSTLPEHTVIC

SEQ ID NO: 13818 - protein, 1365 aa, Artificial Sequence
  SARS-CoV-2/Netherlands/ZuidHolland_9/2020__EPI_ISL_414445 spike protein (1-1211)(N914C_S1123C) WhcAg construct
MFVFLVLLPLVSSQCVNLTTRTQLPPAYTNSFTRGVYYPDKVFRSSVLHSTQDLFLPFFSNVTWFHAIHVSGTNGTKRFDNPVLPFNDGVYFASTEKSNIIRGWIFGTTLDSKTQSLLIVNNATNVVIKVCEFQFCNDPFLGVYYHKNNKSWMESEFRVYSSANNCTFEYVSQPFLMDLEGKQGNFKNLREFVFKNIDGYFKIYSKHTPINLVRDLPQGFSALEPLVDLPIGINITRFQTLLALHRSYLTPGDSSSGWTAGAAAYYVGYLQPRTFLLKYNENGTITDAVDCALDPLSETKCTLKSFTVEKGIYQTSNFRVQPTESIVRFPNITNLCPFGEVFNATRFASVYAWNRKRISNCVADYSVLYNSASFSTFKCYGVSPTKLNDLCFTNVYADSFVIRGDEVRQIAPGQTGKIADYNYKLPDDFTGCVIAWNSNNLDSKVGGNYNYLYRLFRKSNLKPFERDISTEIYQAGSTPCNGVEGFNCYFPLQSYGFQPTNGVGYQPYRVVVLSFELLHAPATVCGPKKSTNLVKNKCVNFNFNGLTGTGVLTESNKKFLPFQQFGRDIADTTDAVRDPQTLEILDITPCSFGGVSVITPGTNTSNQVAVLYQGVNCTEVPVAIHADQLTPTWRVYSTGSNVFQTRAGCLIGAEHVNNSYECDIPIGAGICASYQTQTNSPRRARSVASQSIIAYTMSLGAENSVAYSNNSIAIPTNFTISVTTEILPVSMTKTSVDCTMYICGDSTECSNLLLQYGSFCTQLNRALTGIAVEQDKNTQEVFAQVKQIYKTPPIKDFGGFNFSQILPDPSKPSKRSFIEDLLFNKVTLADAGFIKQYGDCLGDIAARDLICVQKFNGLTVLPPLLTDEMIAQYTSALLAGTITSGWTFGAGAALQIPFAMQMAYRFNGIGVTQCVLYENQKLIANQFNSAIGKIQDSLSSTASALGKLQDVVNQNAQALNTLVKQLSSNFGAISSVLNDILSRLDKVEAEVQIDRLITGRLQSLQTYVTQQLIRAAEIRASANLAATKMSECVLGQSKRVDFCGKGYHLMSFPQSAPHGVVFLHVTYVPAQEKNFTTAPAICHDGKAHFPREGVFVSNGTHWFVTQRNFYEPQIITTDNTFVCGNCDVVIGIVNNTVYDPLQPELDSFKEELDKYFKNHTSPDVDLGDISGINASVVNIQKEIDRLNEVAKNLNESLIDLQELGKYEQYIKGGGGSDIDPYKEFGSSYQLLNFLPLDFFPDLNALVDTATALYEEELTGREHCSPHHTAIRQALVCWDELTKLIAWMSSNITSEQVRTIIVNHVNDTWGLKVRQSLWFHLSCLTFGQHTVQEFLVSFGVWIRTPAPYRPPNAPILSTLPEHTVIC

SEQ ID NO: 13819 - protein, 1365 aa, Artificial Sequence
  SARS-CoV-2/Finland/FIN03032020A/2020__EPI_ISL_413602 spike protein (1-1211)(N914C_S1123C) WhcAg construct
MFVFLVLLPLVSSQCVNLTTRTQLPPAYTNSFTRGVYYPDKVFRSSVLHSTQDLFLPFFSNVTWFHAIHVSGTNGTKRFDNPVLPFNDGVYFASTEKSNIIRGWIFGTTLDSKTQSLLIVNNATNVVIKVCEFQFCNDPFLGVYYHKNNKSWMESEFRVYSSANNCTFEYVSQPFLMDLEGKQGNFKNLREFVFKNIDGYFKIYSKHTPINLVRDLPQGFSALEPLVDLPIGINITRFQTLLALHRSYLTPGDSSSGWTAGAAAYYVGYLQPRTFLLKYNENGTITDAVDCALDPLSETKCTLKSFTVEKGIYQTSNFRVQPTESIVRFPNITNLCPFGEVFNATRFASVYAWNRKRISNCVADYSVLYNSASFSTFKCYGVSPTKLNDLCFTNVYADSFVIRGDEVRQIAPGQTGKIADYNYKLPDDFTGCVISWNSNNLDSKVGGNYNYLYRLFRKSNLKPFERDISTEIYQAGSTPCNGVEGFNCYFPLQSYGFQPTNGVGYQPYRVVVLSFELLHAPATVCGPKKSTNLVKNKCVNFNFNGLTGTGVLTESNKKFLPFQQFGRDIADTTDAVRDPQTLEILDITPCSFGGVSVITPGTNTSNQVAVLYQGVNCTEVPVAIHADQLTPTWRVYSTGSNVFQTRAGCLIGAEHVNNSYECDIPIGAGICASYQTQTNSPRRARSVASQSIIAYTMSLGAENSVAYSNNSIAIPTNFTISVTTEILPVSMTKTSVDCTMYICGDSTECSNLLLQYGSFCTQLNRALTGIAVEQDKNTQEVFAQVKQIYKTPPIKDFGGFNFSQILPDPSKPSKRSFIEDLLFNKVTLADAGFIKQYGDCLGDIAARDLICAQKFNGLTVLPPLLTDEMIAQYTSALLAGTITSGWTFGAGAALQIPFAMQMAYRFNGIGVTQCVLYENQKLIANQFNSAIGKIQDSLSSTASALGKLQDVVNQNAQALNTLVKQLSSNFGAISSVLNDILSRLDKVEAEVQIDRLITGRLQSLQTYVTQQLIRAAEIRASANLAATKMSECVLGQSKRVDFCGKGYHLMSFPQSAPHGVVFLHVTYVPAQEKNFTTAPAICHDGKAHFPREGVFVSNGTHWFVTQRNFYEPQIITTDNTFVCGNCDVVIGIVNNTVYDPLQPELDSFKEELDKYFKNHTSPDVDLGDISGINASVVNIQKEIDRLNEVAKNLNESLIDLQELGKYEQYIKGGGGSDIDPYKEFGSSYQLLNFLPLDFFPDLNALVDTATALYEEELTGREHCSPHHTAIRQALVCWDELTKLIAWMSSNITSEQVRTIIVNHVNDTWGLKVRQSLWFHLSCLTFGQHTVQEFLVSFGVWIRTPAPYRPPNAPILSTLPEHTVIC

SEQ ID NO: 13820 - protein, 1365 aa, Artificial Sequence
  SARS-CoV-2/France/GE1977/2020__EPI_ISL_414632 spike protein (1-1211)(N914C_S1123C) WhcAg construct
MFVFLVLLPLVSSQCVNLTTRTQLPPAYTNSFTRGVYYPDKVFRSSVLHSTQDLFLPFFSNVTWFHAIHVSGTNGTKRFDNPVLPFNDGVYFASTEKSNIIRGWIFGTTLDSKTQSLLIVNNATNVVIKVCEFQFCNDPFLGVYYHKNNKSWMESEFRVYSSANNCTFEYVSQPFLMDLEGKQGNFKNLREFVFKNIDGYFKIYSKHTPINLVRDLPQGFSALEPLVDLPIGINITRFQTLLALHRSYLTPGDSSSGWTAGAAAYYVGYLQPRTFLLKYNENGTITDAVDCALDPLSETKCTLKSFTVEKGIYQTSNFRVQPTESIVRFPNITNLCPFGEVFNATRFASVYAWNRKRISNCVADYSVLYNSASFSTFKCYGVSPTKLNDLCFTNVYADSFVIRGDEVRQIAPGQTGKIADYNYKLPDDFTGCVIAWNSNNLDSKVGGNYNYLYRLFRKSNLKPFERDISTEIYQAGSTPCNGVEGFNCYFPLQSYGFQPTNGVGYQPYRVVVLSFELLHAPATVCGPKKSTNLVKNKCVNFNFNGLTGTGVLTESNKKFLPFQQFGRDIADTTDAVRDPQTLEILDITPCSFGGVSVITPGTNTSNQVAVLYQGVNCTEVPVAIHADQLTPTWRVYSTGSNVFQTRAGCLIGAEHVNNSYECDIPIGAGICASYQTQTNSPRRARSVASQSIIAYTMSLGAENSVAYSNNSIAIPTNFTISVTTEILPVSMTKTSVDCTMYICGDSTECSNLLLQYGSFCTQLNRALTGIAVEQDKNTQEVFAQVKQIYKTPPIKDFGGFNFSQILPDPSKPSKRSFIEDLLFNKVTLADAGFIKQYGDCLGDIAARDLICAQKFNGLTVLPPLLTDEMIAQYTSALLAGTITSGWTFGAGAALQIPFAMQMAYRFNGIGVTQCVLYENQKLIANQFNSAIGKIQDSLFSTASALGKLQDVVNQNAQALNTLVKQLSSNFGAISSVLNDILSRLDKVEAEVQIDRLITGRLQSLQTYVTQQLIRAAEIRASANLAATKMSECVLGQSKRVDFCGKGYHLMSFPQSAPHGVVFLHVTYVPAQEKNFTTAPAICHDGKAHFPREGVFVSNGTHWFVTQRNFYEPQIITTDNTFVCGNCDVVIGIVNNTVYDPLQPELDSFKEELDKYFKNHTSPDVDLGDISGINASVVNIQKEIDRLNEVAKNLNESLIDLQELGKYEQYIKGGGGSDIDPYKEFGSSYQLLNFLPLDFFPDLNALVDTATALYEEELTGREHCSPHHTAIRQALVCWDELTKLIAWMSSNITSEQVRTIIVNHVNDTWGLKVRQSLWFHLSCLTFGQHTVQEFLVSFGVWIRTPAPYRPPNAPILSTLPEHTVIC

SEQ ID NO: 13821 - protein, 1365 aa, Artificial Sequence
  SARS-CoV-2/Finland/FIN-313/2020__EPI_ISL_414641 spike protein (1-1211)(N914C_S1123C) WhcAg construct
MFVFLVLLPLVSSQCVNLTTRTQLPPAYTNSFTRGVYYPDKVFRSSVLHSTQDLFLPFFSNVTWFHAIHVSGTNGTKRFDNPVLPFNDGVYFASTEKSNIIRGWIFGTTLDSKTQSLLIVNNATNVVIKVCEFQFCNDPFLGVYYHKNNKSWMESEFRVYSSANNCTFEYVSQPFLMDLEGKQGNFKNLREFVFKNIDGYFKIYSKHTPINLVRDLPQGFSALEPLVDLPIGINITRFKTLLALHRSYLTPGDSSSGWTAGAAAYYVGYLQPRTFLLKYNENGTITDAVDCALDPLSETKCTLKSFTVEKGIYQTSNFRVQPTESIVRFPNITNLCPFGEVFNATRFASVYAWNRKRISNCVADYSVLYNSASFSTFKCYGVSPTKLNDLCFTNVYADSFVIRGDEVRQIAPGQTGKIADYNYKLPDDFTGCVIAWNSNNLDSKVGGNYNYLYRLFRKSNLKPFERDISTEIYQAGSTPCNGVEGFNCYFPLQSYGFQPTNGVGYQPYRVVVLSFELLHAPATVCGPKKSTNLVKNKCVNFNFNGLTGTGVLTESNKKFLPFQQFGRDIADTTDAVRDPQTLEILDITPCSFGGVSVITPGTNTSNQVAVLYQGVNCTEVPVAIHADQLTPTWRVYSTGSNVFQTRAGCLIGAEHVNNSYECDIPIGAGICASYQTQTNSPRRARSVASQSIIAYTMSLGAENSVAYSNNSIAIPTNFTISVTTEILPVSMTKTSVDCTMYICGDSTECSNLLLQYGSFCTQLNRALTGIAVEQDKNTQEVFAQVKQIYKTPPIKDFGGFNFSQILPDPSKPSKRSFIEDLLFNKVTLADAGFIKQYGDCLGDIAARDLICAQKFNGLTVLPPLLTDEMIAQYTSALLAGTITSGWTFGAGAALQIPFAMQMAYRFNGIGVTQCVLYENQKLIANQFNSAIGKIQDSLSSTASALGKLQDVVNQNAQALNTLVKQLSSNFGAISSVLNDILSRLDKVEAEVQIDRLITGRLQSLQTYVTQQLIRAAEIRASANLAATKMSECVLGQSKRVDFCGKGYHLMSFPQSAPHGVVFLHVTYVPAQEKNFTTAPAICHDGKAHFPREGVFVSNGTHWFVTQRNFYEPQIITTDNTFVCGNCDVVIGIVNNTVYDPLQPELDSFKEELDKYFKNHTSPDVDLGDISGINASVVNIQKEIDRLNEVAKNLNESLIDLQELGKYEQYIKGGGGSDIDPYKEFGSSYQLLNFLPLDFFPDLNALVDTATALYEEELTGREHCSPHHTAIRQALVCWDELTKLIAWMSSNITSEQVRTIIVNHVNDTWGLKVRQSLWFHLSCLTFGQHTVQEFLVSFGVWIRTPAPYRPPNAPILSTLPEHTVIC

SEQ ID NO: 13822 - protein, 1365 aa, Artificial Sequence
  SARS-CoV-2/Netherlands/ZuidHolland_2/2020__EPI_ISL_414556 spike protein (1-1211)(N914C_S1123C) WhcAg construct
MFVFLVLLPLVSSQCVNLTTRTQLPPAYTNSFTRGVYYPDKVFRSSVLHSTQDLFLPFFSNVTWFHAIHVSGTNGTKRFDNPVLPFNDGVYFASTEKSNIIRGWIFGTTLDSKTQSLLIVNNATNVVIKVCEFQFCNDPFLGVYYHKNNKSWMESEFRVYSSANNCTFEYVSQPFLMDLEGKQGNFKNLREFVFKNIDGYFKIYSKHTPINLVRDLPQGFSALEPLVDLPIGINITRFQTLLALHRSYLTPGDSSSGWTAGAAAYYVGYLQPRTFLLKYNENGTITDAVDCALDPLSETKCTLKSFTVEKGIYQTSNFRVQPTESIVRFPNITNLCPFGEVFNATRFASVYAWNRKRISNCVADYSVLYNSASFSTFKCYGVSPTKLNDLCFTNVYADSFVIRGDEVRQIAPGQTGKIADYNYKLPDDFTGCVIAWNSNNLDSKVGGNYNYLYRLFRKSNLKPFERDISTEIYQAGSTPCNGVEGFNCYFPLQSYGFQPTNGVGYQPYRVVVLSFELLHAPATVCGPKKSTNLVKNKCVNFNFNGLTGTGVLTESNKKFLPFQQFGRDIADTTDAVRDPQTLEILDITPCSFGGVSVITPGTNTSNQVAVLYQGVNCTEVPVAIHADQLTPTWRVYSTGSNVFQTRAGCLIGAEHVNNSYECDIPIGAGICASYQTQTNSPRRARSVASQSIIAYTMSLGAENSVAYSNNSIAIPTNFTISVTTEILPVSMTKTSVDCTMYICGDSTECSNLLLQYGSFCTQLNRALTGIALEQDKNTQEVFAQVKQIYKTPPIKDFGGFNFSQILPDPSKPSKRSFIEDLLFNKVTLADAGFIKQYGDCLGDIAARDLICAQKFNGLTVLPPLLTDEMIAQYTSALLAGTITSGWTFGAGAALQIPFAMQMAYRFNGIGVTQCVLYENQKLIANQFNSAIGKIQDSLSSTASALGKLQDVVNQNAQALNTLVKQLSSNFGAISSVLNDILSRLDKVEAEVQIDRLITGRLQSLQTYVTQQLIRAAEIRASANLAATKMSECVLGQSKRVDFCGKGYHLMSFPQSAPHGVVFLHVTYVPAQEKNFTTAPAICHDGKAHFPREGVFVSNGTHWFVTQRNFYEPQIITTDNTFVCGNCDVVIGIVNNTVYDPLQPELDSFKEELDKYFKNHTSPDVDLGDISGINASVVNIQKEIDRLNEVAKNLNESLIDLQELGKYEQYIKGGGGSDIDPYKEFGSSYQLLNFLPLDFFPDLNALVDTATALYEEELTGREHCSPHHTAIRQALVCWDELTKLIAWMSSNITSEQVRTIIVNHVNDTWGLKVRQSLWFHLSCLTFGQHTVQEFLVSFGVWIRTPAPYRPPNAPILSTLPEHTVIC

SEQ ID NO: 13823 - protein, 1365 aa, Artificial Sequence
  SARS-CoV-2/USA/WA-UW31/2020__EPI_ISL_414618 spike protein (1-1211)(N914C_S1123C) WhcAg construct
MFVFLVLLPLVSSQCVNLTTRTQLPPAYTNSFTRGVYYPDKVFRSSVLHSTQDLFLPFFSNVTWFHAIHVSGTNGTKRFDNPVLPFNDGVYFASTEKSNIIRGWIFGTTLDSKTQSLLIVNNATNVVIKVCEFQFCNDPFLGVYYHKNNKSWMESEFRVYSSANNCTFEYVSQPFLMDLEGKQGNFKNLREFVFKNIDGYFKIYSKHTPINLVRDLPQGFSALEPLVDLPIGINITRFQTLLALHRSYLTPGDSSSGWTAGAAAYYVGYLQPRTFLLKYNENGTITDAVDCALDPLSETKCTLKSFTVEKGIYQTSNFRVQPTESIVRFPNITNLCPFGEVFNATRFASVYAWNRKRISNCVADYSVLYNSASFSTFKCYGVSPTKLNDLCFTNVYADSFVIRGDEVRQIAPGQTGKIADYNYKLPDDFTGCVIAWNSNNLDSKVGGNYNYLYRLFRKSNLKPFERDISTEIYQAGSTPCNGAEGFNCYFPLQSYGFQPTNGVGYQPYRVVVLSFELLHAPATVCGPKKSTNLVKNKCVNFNFNGLTGTGVLTESNKKFLPFQQFGRDIADTTDAVRDPQTLEILDITPCSFGGVSVITPGTNTSNQVAVLYQDVNCTEVPVAIHADQLTPTWRVYSTGSNVFQTRAGCLIGAEHVNNSYECDIPIGAGICASYQTQTNSPRRARSVASQSIIAYTMSLGAENSVAYSNNSIAIPTNFTISVTTEILPVSMTKTSVDCTMYICGDSTECSNLLLQYGSFCTQLNRALTGIAVEQDKNTQEVFAQVKQIYKTPPIKDFGGFNFSQILPDPSKPSKRSFIEDLLFNKVTLADAGFIKQYGDCLGDIAARDLICAQKFNGLTVLPPLLTDEMIAQYTSALLAGTITSGWTFGAGAALQIPFAMQMAYRFNGIGVTQCVLYENQKLIANQFNSAIGKIQDSLSSTASALGKLQDVVNQNAQALNTLVKQLSSNFGAISSVLNDILSRLDKVEAEVQIDRLITGRLQSLQTYVTQQLIRAAEIRASANLAATKMSECVLGQSKRVDFCGKGYHLMSFPQSAPHGVVFLHVTYVPAQEKNFTTAPAICHDGKAHFPREGVFVSNGTHWFVTQRNFYEPQIITTDNTFVCGNCDVVIGIVNNTVYDPLQPELDSFKEELDKYFKNHTSPDVDLGDISGINASVVNIQKEIDRLNEVAKNLNESLIDLQELGKYEQYIKGGGGSDIDPYKEFGSSYQLLNFLPLDFFPDLNALVDTATALYEEELTGREHCSPHHTAIRQALVCWDELTKLIAWMSSNITSEQVRTIIVNHVNDTWGLKVRQSLWFHLSCLTFGQHTVQEFLVSFGVWIRTPAPYRPPNAPILSTLPEHTVIC

SEQ ID NO: 13824 - protein, 1365 aa, Artificial Sequence
  SARS-CoV-2/South Korea/SNU01/2020__EPI_ISL_411929 spike protein (1-1211)(N914C_S1123C) WhcAg construct
MFVFLVLLPLVSSQCVNLTTRTQLPPAYTNSFTRGVYYPDKVFRSSVLHSTQDLFLPFFSNVTWFHAIHVSGTNGTKRFDNPVLPFNDGVYFASTEKSNIIRGWIFGTTLDSKTQSLLIVNNATNVVIKVCEFQFCNDPFLGVYYHKNNKSWMESEFRVYSSANNCTFEYVSQPFLMDLEGKQGNFKNLREFVFKNIDGYFKIYSKHTPINLVRDLPQGFWALEPLVDLPIGINITRFQTLLALHRSYLTPGDSSSGWTAGAAAYYVGYLQPRTFLLKYNENGTITDAVDCALDPLSETKCTLKSFTVEKGIYQTSNFRVQPTESIVRFPNITNLCPFGEVFNATRFASVYAWNRKRISNCVADYSVLYNSASFSTFKCYGVSPTKLNDLCFTNVYADSFVIRGDEVRQIAPGQTGKIADYNYKLPDDFTGCVIAWNSNNLDSKVGGNYNYLYRLFRKSNLKPFERDISTEIYQAGSTPCNGVEGFNCYFPLQSYGFQPTNGVGYQPYRVVVLSFELLHAPATVCGPKKSTNLVKNKCVNFNFNGLTGTGVLTESNKKFLPFQQFGRDIADTTDAVRDPQTLEILDITPCSFGGVSVITPGTNTSNQVAVLYQDVNCTEVPVAIHADQLTPTWRVYSTGSNVFQTRAGCLIGAEHVNNSYECDIPIGAGICASYQTQTNSPRRARSVASQSIIAYTMSLGAENSVAYSNNSIAIPTNFTISVTTEILPVSMTKTSVDCTMYICGDSTECSNLLLQYGSFCTQLNRALTGIAVEQDKNTQEVFAQVKQIYKTPPIKDFGGFNFSQILPDPSKPSKRSFIEDLLFNKVTLADAGFIKQYGDCLGDIAARDLICAQKFNGLTVLPPLLTDEMIAQYTSALLAGTITSGWTFGAGAALQIPFAMQMAYRFNGIGVTQCVLYENQKLIANQFNSAIGKIQDSLSSTASALGKLQDVVNQNAQALNTLVKQLSSNFGAISSVLNDILSRLDKVEAEVQIDRLITGRLQSLQTYVTQQLIRAAEIRASANLAATKMSECVLGQSKRVDFCGKGYHLMSFPQSAPHGVVFLHVTYVPAQEKNFTTAPAICHDGKAHFPREGVFVSNGTHWFVTQRNFYEPQIITTDNTFVCGNCDVVIGIVNNTVYDPLQPELDSFKEELDKYFKNHTSPDVDLGDISGINASVVNIQKEIDRLNEVAKNLNESLIDLQELGKYEQYIKGGGGSDIDPYKEFGSSYQLLNFLPLDFFPDLNALVDTATALYEEELTGREHCSPHHTAIRQALVCWDELTKLIAWMSSNITSEQVRTIIVNHVNDTWGLKVRQSLWFHLSCLTFGQHTVQEFLVSFGVWIRTPAPYRPPNAPILSTLPEHTVIC

SEQ ID NO: 13825 - protein, 1365 aa, Artificial Sequence
  SARS-CoV-2/China/WF0004/2020__EPI_ISL_413694 spike protein (1-1211)(N914C_S1123C) WhcAg construct
MFVFLVLLPLVSSQCVNLTTRTQLPPAYTNSFTRGVYYPDKVFRSSVLHSTQDLFLPFFSNVTWFHAIHVSGTNGTKRFDNPVLPFNDGVYFASTEKSNIIRGWIFGTTLDSKTQSLLIVNNATNVVIKVCEFQFCNDPFLGVYYHKNNKSWTESEFRVYSSANNCTFEYVSQPFLMDLEGKQGNFKNLREFVFKNIDGYFKIYSKHTPINLVRDLPQGFSALEPLVDLPIGINITRFQTLLALHRSYLTPGDSSSGWTAGAAAYYVGYLQPRTFLLKYNENGTITDAVDCALDPLSETKCTLKSFTVEKGIYQTSNFRVQPTESIVRFPNITNLCPFGEVFNATRFASVYAWNRKRISNCVADYSVLYNSASFSTFKCYGVSPTKLNDLCFTNVYADSFVIRGDEVRQIAPGQTGKIADYNYKLPDDFTGCVIAWNSNNLDSKVGGNYNYLYRLFRKSNLKPFERDISTEIYQAGSTPCNGVEGFNCYFPLQSYGFQPTNGVGYQPYRVVVLSFELLHAPATVCGPKKSTNLVKNKCVNFNFNGLTGTGVLTESNKKFLPFQQFGRDIADTTDAVRDPQTLEILDITPCSFGGVSVITPGTNTSNQVAVLYQDVNCTEVPVAIHADQLTPTWRVYSTGSNVFQTRAGCLIGAEHVNNSYECDIPIGAGICASYQTQTNSPRRARSVASQSIIAYTMSLGAENSVAYSNNSIAIPTNFTISVTTEILPVSMTKTSVDCTMYICGDSTECSNLLLQYGSFCTQLNRALTGIAVEQDKNTQEVFAQVKQIYKTPPIKDFGGFNFSQILPDPSKPSKRSFIEDLLFNKVTLADAGFIKQYGDCLGDIAARDLICAQKFNGLTVLPPLLTDEMIAQYTSALLAGTITSGWTFGAGAALQIPFAMQMAYRFNGIGVTQCVLYENQKLIANQFNSAIGKIQDSLSSTASALGKLQDVVNQNAQALNTLVKQLSSNFGAISSVLNDILSRLDKVEAEVQIDRLITGRLQSLQTYVTQQLIRAAEIRASANLAATKMSECVLGQSKRFDFCGKGYHLMSFPQSAPHGVVFLHVTYVPAQEKNFTTAPAICHDGKAHFPREGVFVSNGTHWFVTQRNFYEPQIITTDNTFVCGNCDVVIGIVNNTVYDPLQPELDSFKEELDKYFKNHTSPDVDLGDISGINASVVNIQKEIDRLNEVAKNLNESLIDLQELGKYEQYIKGGGGSDIDPYKEFGSSYQLLNFLPLDFFPDLNALVDTATALYEEELTGREHCSPHHTAIRQALVCWDELTKLIAWMSSNITSEQVRTIIVNHVNDTWGLKVRQSLWFHLSCLTFGQHTVQEFLVSFGVWIRTPAPYRPPNAPILSTLPEHTVIC

SEQ ID NO: 13826 - protein, 1365 aa, Artificial Sequence
  SARS-CoV-2/China/WF0028/2020__EPI_ISL_413791 spike protein (1-1211)(N914C_S1123C) WhcAg construct
MFVFLVLLPLVSSQCVNLTTRTQLPPAYTNSFTRGVYYPDKVFRSSVLHSTQDLFLPFFSNVTWFHAIHVSGTNGTKRFDNPVLPFNDGVYFASTEKSNIIRGWIFGTTLDSKTQSLLIVNNATNVVIKVCEFQFCNDPFLGVYYHKNNKSWMESEFRVYSSANNCTFEYVSQPFLMDLEGKQGNFKNLREFVFKNIDGYFKIYSKHTPINLVRDLPQGFSALEPLVDLPIGINITRFQTLLALHRSYLTPGDSSSGWTAGAAAYYVGYLQPRTFLLKYNENGTITDAVDCALDPLSETKCTLKSFTVEKGIYQTSNFRVQPTESIVRFPNITNLCPFGEVFNATRFASVYAWNRKRISNCVADYSVLYNSASFSTFKCYGVSPTKLNDLCFTNVYADSFVIRGDEVRQIAPGQTGKIADYNYKLPDDFTGCVIAWNSNNLDSKVGGNYNYLYRLFRKSNLKPFERDISTEIYQAGSTPCNGVEGFNCYFPLQSYGFQPTNGVGYQPYRVVVLSFELLHAPATVCGPKKSTNLVKNKCVNFNFNGLTGTGVLTESNKKFLPFQQFGRDIADTTDAVRDPQTLEILDITPCSFGGVSVITPGTNTSNQVAVLYQDVNCTEVPVAIHADQLTPTWRVYSTGSNVFQTRAGCLIGAEHVNNSYECDIPIGAGICASYQTQTNSPRRARSVASQSIIAYTMSLGAENSVAYSNNSIAIPTNFTISVTTEILPVSMTKTSVDCTMYICGDSTECSNLLLQYGSFCTQLNRALTGIAVEQDKNTQEVFAQVKQIYKTPPIKDFGGFNFSQILPDPSKPSKRSFIEDLLFNKVTLADAGFIKQYGDCLGDIAARDLICAQKFNGLTVLPPLLTDEMIAQYTSALLAGTITSGWTFGAGAALQIPFAMQMAYRFNGIGVTQCVLYENQKLIANQFNSAIGKIQDSLSSTASALGKLQDVVNQNAQALNTLVKQLSSNFGAISSVLNDILSRLDKVEAEVQIDRLITGRLQSLQTYVTQQLIRAAEIRASANLAATKMSECVLGQSKRVDFCGKGYHLMSFPQSAPHGVVFLHVTYVPAQEKNFTTAPAICHDGKAHFPREGVFVSNGTHWFVTQRNFYEPQIITTDNTFVCGNCDVVIGIVNNTVYDPLQPELESFKEELDKYFKNHTSPDVDLGDISGINASVVNIQKEIDRLNEVAKNLNESLIDLQELGKYEQYIKGGGGSDIDPYKEFGSSYQLLNFLPLDFFPDLNALVDTATALYEEELTGREHCSPHHTAIRQALVCWDELTKLIAWMSSNITSEQVRTIIVNHVNDTWGLKVRQSLWFHLSCLTFGQHTVQEFLVSFGVWIRTPAPYRPPNAPILSTLPEHTVIC

SEQ ID NO: 13827 - protein, 1365 aa, Artificial Sequence
  SARS-CoV-2/2019-nCoV/USA-CruiseA-18/2020__MT159716.1 spike protein (1-1211)(N914C_S1123C) WhcAg construct
MFVFLVLLPLVSSQCVNLTTRTQLPPAYTNSFTRGVYYPDKVFRSSVLHSTQDLFLPFFSNVTWFHAIHVSGTNGTKRFDNPVLPFNDGVYFASTEKSNIIRGWIFGTTLDSKTQSLLIVNNATNVVIKVCEFQFCNDPFLGVYYHKNNKSWMESELRVYSSANNCTFEYVSQPFLMDLEGKQGNFKNLREFVFKNIDGYFKIYSKHTPINLVRDLPQGFSALEPLVDLPIGINITRFQTLLALHRSYLTPGDSSSGWTAGAAAYYVGYLQPRTFLLKYNENGTITDAVDCALDPLSETKCTLKSFTVEKGIYQTSNFRVQPTESIVRFPNITNLCPFGEVFNATRFASVYAWNRKRISNCVADYSVLYNSASFSTFKCYGVSPTKLNDLCFTNVYADSFVIRGDEVRQIAPGQTGKIADYNYKLPDDFTGCVIAWNSNNLDSKVGGNYNYLYRLFRKSNLKPFERDISTEIYQAGSTPCNGVEGFNCYFPLQSYGFQPTNGVGYQPYRVVVLSFELLHAPATVCGPKKSTNLVKNKCVNFNFNGLTGTGVLTESNKKFLPFQQFGRDIADTTDAVRDPQTLEILDITPCSFGGVSVITPGTNTSNQVAVLYQDVNCTEVPVAIHADQLTPTWRVYSTGSNVFQTRAGCLIGAEHVNNSYECDIPIGAGICASYQTQTNSPRRARSVASQSIIAYTMSLGAENSVAYSNNSIAIPTNFTISVTTEILPVSMTKTSVDCTMYICGDSTECSNLLLQYGSFCTQLNRALTGIAVEQDKNTQEVFAQVKQIYKTPPIKDFGGFNFSQILPDPSKPSKRSFIEDLLFNKVTLADAGFIKQYGDCLGDIAARDLICAQKFNGLTVLPPLLTDEMIAQYTSALLAGTITSGWTFGAGAALQIPFAMQMAYRFNGIGVTQCVLYENQKLIANQFNSAIGKIQDSLSSTASALGKLQDVVNQNAQALNTLVKQLSSNFGAISSVLNDILSRLDKVEAEVQIDRLITGRLQSLQTYVTQQLIRAAEIRASANLAATKMSECVLGQSKRVDFCGKGYHLMSFPQSAPHGVVFLHVTYVPAQEKNFTTAPAICHDGKAHFPREGVFVSNGTHWFVTQRNFYEPQIITTDNTFVCGNCDVVIGIVNNTVYDPLQPELDSFKEELDKYFKNHTSPDVDLGDISGINASVVNIQKEIDRLNEVAKNLNESLIDLQELGKYEQYIKGGGGSDIDPYKEFGSSYQLLNFLPLDFFPDLNALVDTATALYEEELTGREHCSPHHTAIRQALVCWDELTKLIAWMSSNITSEQVRTIIVNHVNDTWGLKVRQSLWFHLSCLTFGQHTVQEFLVSFGVWIRTPAPYRPPNAPILSTLPEHTVIC

SEQ ID NO: 13828 - protein, 1365 aa, Artificial Sequence
  SARS-CoV-2/SARS-CoV-2/Yunnan-01/human/2020/CHN__MT049951.1 spike protein (1-1211)(N914C_S1123C) WhcAg construct
MFVFLVLLPLVSSQCVNLTTRTQLPPANTNSFTRGVYYPDKVFRSSVLHSTQDLFLPFFSNVTWFHAIHVSGTNGTKRFDNPVLPFNDGVYFASTEKSNIIRGWIFGTTLDSKTQSLLIVNNATNVVIKVCEFQFCNDPFLGVYYHKNNKSWMESEFRVYSSANNCTFEYVSQPFLMDLEGKQGNFKNLREFVFKNIDGYFKIYSKHTPINLVRDLPQGFSALEPLVDLPIGINITRFQTLLALHRSYLTPGDSSSGWTAGAAAYYVGYLQPRTFLLKYNENGTITDAVDCALDPLSETKCTLKSFTVEKGIYQTSNFRVQPTESIVRFPNITNLCPFGEVFNATRFASVYAWNRKRISNCVADYSVLYNSASFSTFKCYGVSPTKLNDLCFTNVYADSFVIRGDEVRQIAPGQTGKIADYNYKLPDDFTGCVIAWNSNNLDSKVGGNYNYLYRLFRKSNLKPFERDISTEIYQAGSTPCNGVEGFNCYFPLQSYGFQPTNGVGYQPYRVVVLSFELLHAPATVCGPKKSTNLVKNKCVNFNFNGLTGTGVLTESNKKFLPFQQFGRDIADTTDAVRDPQTLEILDITPCSFGGVSVITPGTNTSNQVAVLYQDVNCTEVPVAIHADQLTPTWRVYSTGSNVFQTRAGCLIGAEHVNNSYECDIPIGAGICASYQTQTNSPRRARSVASQSIIAYTMSLGAENSVAYSNNSIAIPTNFTISVTTEILPVSMTKTSVDCTMYICGDSTECSNLLLQYGSFCTQLNRALTGIAVEQDKNTQEVFAQVKQIYKTPPIKDFGGFNFSQILPDPSKPSKRSFIEDLLFNKVTLADAGFIKQYGDCLGDIAARDLICAQKFNGLTVLPPLLTDEMIAQYTSALLAGTITSGWTFGAGAALQIPFAMQMAYRFNGIGVTQCVLYENQKLIANQFNSAIGKIQDSLSSTASALGKLQDVVNQNAQALNTLVKQLSSNFGAISSVLNDILSRLDKVEAEVQIDRLITGRLQSLQTYVTQQLIRAAEIRASANLAATKMSECVLGQSKRVDFCGKGYHLMSFPQSAPHGVVFLHVTYVPAQEKNFTTAPAICHDGKAHFPREGVFVSNGTHWFVTQRNFYEPQIITTDNTFVCGNCDVVIGIVNNTVYDPLQPELDSFKEELDKYFKNHTSPDVDLGDISGINASVVNIQKEIDRLNEVAKNLNESLIDLQELGKYEQYIKGGGGSDIDPYKEFGSSYQLLNFLPLDFFPDLNALVDTATALYEEELTGREHCSPHHTAIRQALVCWDELTKLIAWMSSNITSEQVRTIIVNHVNDTWGLKVRQSLWFHLSCLTFGQHTVQEFLVSFGVWIRTPAPYRPPNAPILSTLPEHTVIC

SEQ ID NO: 13829 - protein, 1365 aa, Artificial Sequence
  SARS-CoV-2/USA/WA-UW292/2020__EPI_ISL_418077 spike protein (1-1211)(N914C_S1123C) WhcAg construct
MFVFLVLLPLVSSQCVNLTTRTQLPPAYTNSFTRGVYYPDKVFRSSVLHSTQDLFLPFFSNVTWFHAIHVSGTNGTKRFDNPVLPFNDGVYFASTEKSNIIRGWIFGTTLDSKTQSLLIVNNATNVVIKVCEFQFCNDPFLGVYYHKNNKSWMESEFRVYSSANNCTFEYVSQPFLMDLEGKQGNFKNLREFVFKNIDGYFKIYSKHTPINLVRDLPQGFSALEPLVDLPIGINITRFQTLLALHRSYLTPGDSSSGWTAGAAAYYVGYLQPRTFLLKYNENGTITDAVDCALDPLSETKCTLKSFTVEKGIYQTSNFRVQPTESIVRFPNITNLCPFGEVFNATRFASVYAWNRKRISNCVADYSVLYNSASFSTFKCYGVSPTKLNDLCFTNVYADSFVIRGDEVRQIAPGQTGKIADYNYKLPDDFTGCVIAWNSNNLDSKVGGNYNYLYRLFRKSNLKPFERDISTEIYQASSTPCNGVEGFNCYFPLQSYGFQPTNGVGYQPYRVVVLSFELLHAPATVCGPKKSTNLVKNKCVNFNFNGLTGTGVLTESNKKFLPFQQFGRDIADTTDAVRDPQTLEILDITPCSFGGVSVITPGTNTSNQVAVLYQDVNCTEVPVAIHADQLTPTWRVYSTGSNVFQTRAGCLIGAEHVNNSYECDIPIGAGICASYQTQTNSPRRARSVASQSIIAYTMSLGAENSVAYSNNSIAIPTNFTISVTTEILPVSMTKTSVDCTMYICGDSTECSNLLLQYGSFCTQLNRALTGIAVEQDKNTQEVFAQVKQIYKTPPIKDFGGFNFSQILPDPSKPSKRSFIEDLLFNKVTLADAGFIKQYGDCLGDIAARDLICAQKFNGLTVLPPLLTDEMIAQYTSALLAGTITSGWTFGAGAALQIPFAMQMAYRFNGIGVTQCVLYENQKLIANQFNSAIGKIQDSLSSTASALGKLQDVVNQNAQALNTLVKQLSSNFGAISSVLNDILSRLDKVEAEVQIDRLITGRLQSLQTYVTQQLIRAAEIRASANLAATKMSECVLGQSKRVDFCGKGYHLMSFPQSAPHGVVFLHVTYVPAQEKNFTTAPAICHDGKAHFPREGVFVSNGTHWFVTQRNFYEPQIITTDNTFVCGNCDVVIGIVNNTVYDPLQPELDSFKEELDKYFKNHTSPDVDLGDISGINASVVNIQKEIDRLNEVAKNLNESLIDLQELGKYEQYIKGGGGSDIDPYKEFGSSYQLLNFLPLDFFPDLNALVDTATALYEEELTGREHCSPHHTAIRQALVCWDELTKLIAWMSSNITSEQVRTIIVNHVNDTWGLKVRQSLWFHLSCLTFGQHTVQEFLVSFGVWIRTPAPYRPPNAPILSTLPEHTVIC

SEQ ID NO: 13830 - protein, 1365 aa, Artificial Sequence
  SARS-CoV-2/Iceland/192/2020__EPI_ISL_417819 spike protein (1-1211)(N914C_S1123C) WhcAg construct
MFVFFVLLPLVSSQCVNLTTRTQLPPAYTNSFTRGVYYPDKVFRSSVLHSTQDLFLPFFSNVTWFHAIHVSGTNGTKRFDNPVLPFNDGVYFASTEKSNIIRGWIFGTTLDSKTQSLLIVNNATNVVIKVCEFQFCNDPFLGVYYHKNNKSWMESEFRVYSSANNCTFEYVSQPFLMDLEGKQGNFKNLREFVFKNIDGYFKIYSKHTPINLVRDLPQGFSALEPLVDLPIGINITRFQTLLALHRSYLTPGDSSSGWTAGAAAYYVGYLQPRTFLLKYNENGTITDAVDCALDPLSETKCTLKSFTVEKGIYQTSNFRVQPTESIVRFPNITNLCPFGEVFNATRFASVYAWNRKRISNCVADYSVLYNSASFSTFKCYGVSPTKLNDLCFTNVYADSFVIRGDEVRQIAPGQTGKIADYNYKLPDDFTGCVIAWNSNNLDSKVGGNYNYLYRLFRKSNLKPFERDISTEIYQAGSTPCNGVEGFNCYFPLQSYGFQPTNGVGYQPYRVVVLSFELLHAPATVCGPKKSTNLVKNKCVNFNFNGLTGTGVLTESNKKFLPFQQFGRDIADTTDAVRDPQTLEILDITPCSFGGVSVITPGTNTSNQVAVLYQGVNCTEVPVAIHADQLTPTWRVYSTGSNVFQTRAGCLIGAEHVNNSYECDIPIGAGICASYQTQTNSPRRARSVASQSIIAYTMSLGAENSVAYSNNSIAIPTNFTISVTTEILPVSMTKTSVDCTMYICGDSTECSNLLLQYGSFCTQLNRALTGIAVEQDKNTQEVFAQVKQIYKTPPIKDFGGFNFSQILPDPSKPSKRSFIEDLLFNKVTLADAGFIKQYGDCLGDIAARDLICAQKFNGLTVLPPLLTDEMIAQYTSALLAGTITSGWTFGAGAALQIPFAMQMAYRFNGIGVTQCVLYENQKLIANQFNSAIGKIQDSLSSTASALGKLQDVVNQNAQALNTLVKQLSSNFGAISSVLNDILSRLDKVEAEVQIDRLITGRLQSLQTYVTQQLIRAAEIRASANLAATKMSECVLGQSKRVDFCGKGYHLMSFPQSAPHGVVFLHVTYVPAQEKNFTTAPAICHDGKAHFPREGVFVSNGTHWFVTQRNFYEPQIITTDNTFVCGNCDVVIGIVNNTVYDPLQPELDSFKEELDKYFKNHTSPDVDLGDISGINASVVNIQKEIDRLNEVAKNLNESLIDLQELGKYEQYIKGGGGSDIDPYKEFGSSYQLLNFLPLDFFPDLNALVDTATALYEEELTGREHCSPHHTAIRQALVCWDELTKLIAWMSSNITSEQVRTIIVNHVNDTWGLKVRQSLWFHLSCLTFGQHTVQEFLVSFGVWIRTPAPYRPPNAPILSTLPEHTVIC

SEQ ID NO: 13831 - protein, 1365 aa, Artificial Sequence
  SARS-CoV-2/Belgium/ULG-6939/2020__EPI_ISL_417020 spike protein (1-1211)(N914C_S1123C) WhcAg construct
MFVFLVLLPLVSSQCVNLTTRTQLPPAYTNSFTRGVYYPDKVFRSSVLHSTQDLFLPFFSNVTWFHAIHVSGTNGTKRFDNPVLPFNDGVYFASTEKSNIIRGWIFGTTLDSKTQSLLIVNNATNVVIKVCEFQFCNDPFLGVYYHKNNKSWMESEFRVYSSANNCTFEYVSQPFLMDLEGKQGNFKNLREFVFKNIDGYFKIYSKHTPINLVRDLPQGFSALEPLVDLPIGINITRFQTLLALHRSYLTPGDSSSGWTAGAAAYYVGYLQPRTFLLKYNENGTITDAVDCALDPLSETKCTLKSFTVEKGIYQTSNFRVQPTESIVRFPNITNLCPFGEVFNATRFASVYAWNRKRISNCVADYSVLYNSASFSTFKCYGVSPTKLNDLCFTNVYADSFVIRGDEVRQIAPGQTGKIADYNYKLPDDFTGCVIAWNSNNLDSKVGGNYNYLYRLFRKSNLKPFERDISTEIYQAGSTPCNGVEGFNCYFPLQSYGFQPTNGVGYQPYRVVVLSFELLHAPATVCGPKKSTNLVKNKCVNFNFNGLTGTGVLTESNKKFLPFQQFGRDIADTTDAVRDPQTLEILDITPCSFGGVSVITPGTNTSNQVAVLYQGVNCTEVPVAIHADQLTPTWRVYSTGSNVFQTRAGCLIGAEHVNNSYECDIPIGAGICASYQTQTNSPRRARSVASQSIIAYTMSLGAENSVVYSNNSIAIPTNFTISVTTEILPVSMTKTSVDCTMYICGDSTECSNLLLQYGSFCTQLNRALTGIAVEQDKNTQEVFAQVKQIYKTPPIKDFGGFNFSQILPDPSKPSKRSFIEDLLFNKVTLADAGFIKQYGDCLGDIAARDLICAQKFNGLTVLPPLLTDEMIAQYTSALLAGTITSGWTFGAGAALQIPFAMQMAYRFNGIGVTQCVLYENQKLIANQFNSAIGKIQDSLSSTASALGKLQDVVNQNAQALNTLVKQLSSNFGAISSVLNDILSRLDKVEAEVQIDRLITGRLQSLQTYVTQQLIRAAEIRASANLAATKMSECVLGQSKRVDFCGKGYHLMSFPQSAPHGVVFLHVTYVPAQEKNFTTAPAICHDGKAHFPREGVFVSNGTHWFVTQRNFYEPQIITTDNTFVCGNCDVVIGIVNNTVYDPLQPELDSFKEELDKYFKNHTSPDVDLGDISGINASVVNIQKEIDRLNEVAKNLNESLIDLQELGKYEQYIKGGGGSDIDPYKEFGSSYQLLNFLPLDFFPDLNALVDTATALYEEELTGREHCSPHHTAIRQALVCWDELTKLIAWMSSNITSEQVRTIIVNHVNDTWGLKVRQSLWFHLSCLTFGQHTVQEFLVSFGVWIRTPAPYRPPNAPILSTLPEHTVIC

SEQ ID NO: 13832 - protein, 1365 aa, Artificial Sequence
  SARS-CoV-2/France/HF2496/2020__EPI_ISL_418231 spike protein (1-1211)(N914C_S1123C) WhcAg construct
MFVFLVLLPLVSSQCVNLTTRTQLPPAYTNSFTRGVYYPDKVFRSSVLHSTQDLFLPFFSNVTWFHAIHVSGTNGTKRFDNPVLPFNDGVYFASTEKSNIIRGWIFGTTLDSKTQSLLIVNNATNVVIKVCEFQFCNDPFLGVYYHKNNKSWMESEFRVYSSANNCTFEYVSQPFLMDLEGKQGNFKNLREFVFKNIDGYFKIYSKHTPINLVRDLPQGFSALEPLVDLPIGINITRFQTLLALHRSYLTPGDSSSGWTAGAAAYYVGYLQPRTFLLKYNENGTITDAVDCALDPLSETKCTLKSFTVEKGIYQTSNFRVQPTESIVRFPNITNLCPFGEVFNATRFASVYAWNRKRISNCVADYSVLYNSASFSTFKCYGVSPTKLNDLCFTNVYADSFVIRGDEVRQIAPGQTGKIADYNYKLPDDFTGCVIAWNSNNLDSKVGGNYNYLYRLFRKSNLKPFERDISTEIYQAGSTPCNGVEGFNCYFPLQSYGFQPTNGVGYQPYRVVVLSFELLHAPATVCGPKKSTNLVKNKCVNFNFNGLTGTGVLTESNKKFLPFQQFGRDIADTTDAVRDPQTLEILDITPCSFGGVSVITPGTNTSNQVAVLYQGVNCTEVPVAIHADQLTPTWRVYSTGSNVFQTRAGCLIGAEHVNNSYECDIPIGAGICASYQTQTNSPRRARSVASQSIIAYTMSLGAENSVAYSNNSIAIPTNFTISVTTEILPVSMTKTSVDCTMYICGDSTECSNLLLQYGSFCTQLNRALTGIAVEQDKNTQEVFAQVKQIYKTPPIKDFGGFNFSQILPDPSKPSKRSFIEDLLFNKVTLADAGFIKQYGDCLGDIVARDLICAQKFNGLTVLPPLLTDEMIAQYTSALLAGTITSGWTFGAGAALQIPFAMQMAYRFNGIGVTQCVLYENQKLIANQFNSAIGKIQDSLSSTASALGKLQDVVNQNAQALNTLVKQLSSNFGAISSVLNDILSRLDKVEAEVQIDRLITGRLQSLQTYVTQQLIRAAEIRASANLAATKMSECVLGQSKRVDFCGKGYHLMSFPQSAPHGVVFLHVTYVPAQEKNFTTAPAICHDGKAHFPREGVFVSNGTHWFVTQRNFYEPQIITTDNTFVCGNCDVVIGIVNNTVYDPLQPELDSFKEELDKYFKNHTSPDVDLGDISGINASVVNIQKEIDRLNEVAKNLNESLIDLQELGKYEQYIKGGGGSDIDPYKEFGSSYQLLNFLPLDFFPDLNALVDTATALYEEELTGREHCSPHHTAIRQALVCWDELTKLIAWMSSNITSEQVRTIIVNHVNDTWGLKVRQSLWFHLSCLTFGQHTVQEFLVSFGVWIRTPAPYRPPNAPILSTLPEHTVIC

SEQ ID NO: 13833 - protein, 1365 aa, Artificial Sequence
  SARS-CoV-2/USA/WA-UW291/2020__EPI_ISL_418076 spike protein (1-1211)(N914C_S1123C) WhcAg construct
MFVFLVLLPLVSSQCVNLTTRTQLPPAYTNSFTRGVYYPDKVFRSSVLHSTQDLFLPFFSNVTWFHAIHVSGTNGTKRFDNPVLPFNDGVYFASTEKSNIIRGWIFGTTLDSKTQSLLIVNNATNVVIKVCEFQFCNDPFLGVYYHKNNKSWMESEFRVYSSANNCTFEYVSQPFLMDLEGKQGNFKNLREFVFKNIDGYFKIYSKHTPINLVRDLPQGFSALEPLVDLPIGINITRFQTLLALHRSYLTPGDSSSGWTAGAAAYYVGYLQPRTFLLKYNENGTITDAVDCALDPLSETKCTLKSFTVEKGIYQTSNFRVQPTESIVRFPNITNLCPFGEVFNATRFASVYAWNRKRISNCVADYSVLYNSASFSTFKCYGVSPTKLNDLCFTNVYADSFVIRGDEVRQIAPGQTGKIADYNYKLPDDFTGCVIAWNSNNLDSKVGGNYNYLYRLFRKSNLKPFERDISTEIYQAGSTPCNGVEGFNCYFPLQSYGFQPTNGVGYQPYRVVVLSFELLHAPATVCGPKKSTNLVKNKCVNFNFNGLTGTGVLTESNKKFLPFQQFGRDIADTTDAVRDPQTLEILDITPCSFGGVSVITPGTNTSNQVAVLYQGVNCTEVPVAIHADQLTPTWRVYSTGSNVFQTRAGCLIGAEHVNNSYECDIPIGAGICASYQTQTNSPRRARSVASQSIIAYTMSLGAENSVAYSNNSIAIPTNFTISVTTEILPVSMTKTSVDCTMYICGDSTECSNLLLQYGSFCTQLNRALTGIAVEQDKNTQEVFAQVKQIYKTPPIKDFGGFNFSQILPDPSKPSKRSFIEDLLFNKVTLADAGFIKQYGDCLGDIAARDLICAQKFNGLTVLPPLLTDEMIAQYTSALLAGTITSGWTFGAGAALQIPFAMQMAYRFNGIGVTQCVLYENQKLIANQFNSAIGKIQYSLSSTASALGKLQDVVNQNAQALNTLVKQLSSNFGAISSVLNDILSRLDKVEAEVQIDRLITGRLQSLQTYVTQQLIRAAEIRASANLAATKMSECVLGQSKRVDFCGKGYHLMSFPQSAPHGVVFLHVTYVPAQEKNFTTAPAICHDGKAHFPREGVFVSNGTHWFVTQRNFYEPQIITTDNTFVCGNCDVVIGIVNNTVYDPLQPELDSFKEELDKYFKNHTSPDVDLGDISGINASVVNIQKEIDRLNEVAKNLNESLIDLQELGKYEQYIKGGGGSDIDPYKEFGSSYQLLNFLPLDFFPDLNALVDTATALYEEELTGREHCSPHHTAIRQALVCWDELTKLIAWMSSNITSEQVRTIIVNHVNDTWGLKVRQSLWFHLSCLTFGQHTVQEFLVSFGVWIRTPAPYRPPNAPILSTLPEHTVIC

SEQ ID NO: 13834 - protein, 1365 aa, Artificial Sequence; identical to SEQ ID NO: 13797
  SARS-CoV-2/Portugal/PT0034/2020__EPI_ISL_418019 spike protein (1-1211)(N914C_S1123C) WhcAg construct

SEQ ID NO: 13835 - protein, 1365 aa, Artificial Sequence
  SARS-CoV-2/Iceland/202/2020__EPI_ISL_417750 spike protein (1-1211)(N914C_S1123C) WhcAg construct
MFVFLVLLPLVSSQCVNLTTRTQLPPAYTNSFTRGVYYPDKVFRSSVLHSTQDLFLPFFSNVTWFHAIHVSGTNGTKRFDNPVLPFNDGVYFASTEKSNIIRGWIFGTTLDSKTQSLLIVNNATNVVIKVCEFQFCNDPFLGVYYHKNNKSWMESEFRVYSSANNCTFEYVSQPFLMDLEGKQGNFKNLREFVFKNIDGYFKIYSKHTPINLVRDLPQGFSALEPLVDLPIGINITRFQTLLALHRSYLTPGDSSSGWTAGAAAYYVGYLQPRTFLLKYNENGTITDAVDCALDPLSETKCTLKSFTVEKGIYQTSNFRVQPTESIVRFPNITNLCPFGEVFNATRFASVYAWNRKRISNCVADYSVLYNSASFSTFKCYGVSPTKLNDLCFTNVYADSFVIRGDEVRQIAPGQTGKIADYNYKLPDDFTGCVIAWNSNNLDSKVGGNYNYLYRLFRKSNLKPFERDISTEIYQAGSTPCNGVEGFNCYFPLQSYGFQPTNGVGYQPYRVVVLSFELLHAPATVCGPKKSTNLVKNKCVNFNFNGLTGTGVLTESNKKFLPFQQFGRDIADTTDAVRDPQTLEILDITPCSFGGVSVITPGTNTSNQVAVLYQDVNCTEVPVAIHADQLTPTWRVYSTGSNVFQTRAGCLIGAEHVNNSYECDIPIGAGICASYQTQTNSPRRARSVASQSIIAYTMSLGAENSVAYSNNSIAIPTNFTISVTTEILPVSMTKTSVDCTMYICGDSTECSNLLLQYGSFCTQLNRALTGIAVEQDKNTQEVFAQVKQIYKTPPIKDFGGFNFSQILPDPSKPSKRSFIEDLLFNKVTLADAGFIKQYGDCLGDIAARDLICAQKFNGLTVLPPLLTDEMIAQYTSALLAGTITSGWTFGAGAALQIPFAMQMAYRFNGIGVTQCVLYENQKLIANQFNSAIGKIQDSLSSTASALGKLQDVVNQNAQALNTLVKQLSSNFGAISSVLNDILSRLDKVEAEVQIDRLITGRLQSLQTYVTQQLIRAAEIRASANLAATKMSECVLGQSKRVDFCGKGYHLMSFPQSAPHGVVFLHVTYVPAQEKNFTTAPAICHDGKAHFPREGVFVSNGTHWFVTQRNFYEPQIITTDNTFVCGNCDVVIGIVNNTVYDPLQPELDSFKEELDKYFKNHTSPDVDLGDIPGINASVVNIQKEIDRLNEVAKNLNESLIDLQELGKYEQYIKGGGGSDIDPYKEFGSSYQLLNFLPLDFFPDLNALVDTATALYEEELTGREHCSPHHTAIRQALVCWDELTKLIAWMSSNITSEQVRTIIVNHVNDTWGLKVRQSLWFHLSCLTFGQHTVQEFLVSFGVWIRTPAPYRPPNAPILSTLPEHTVIC

SEQ ID NO: 13836 - protein, 1365 aa, Artificial Sequence
  SARS-CoV-2/USA/WA-UW261/2020__EPI_ISL_418046 spike protein (1-1211)(N914C_S1123C) WhcAg construct
MFVFLVLLPLVSSQCVNLTTRTQLPPAYTNSFTRGVYYPDKVFRSSVLHSTQDLFLPFFSNVTWFHAIHVSGTNGTKRFDNPVLPFNDGVYFASTEKSNIIRGWIFGTTLDSKTQSLLIVNNATNVVIKVCEFQFCNDPFLGVYYHKNNKSWMESEFRVYSSANNCTFEYVSQPFLMDLEGKQGNFKNLREFVFKNIDGYFKIYSKHTPINLVRDLPQGFSALEPLVDLPIGINITRFQTLLALHRSYLTPGDSSSGWTAGAAAYYVGYLQPRTFLLKYNENGTITDAVDCALDPLSETKCTLKSFTVEKGIYQTSNFRVQPTESIVRFPNITNLCPFGEVFNATRFTSVYAWNRKRISNCVADYSVLYNSASFSTFKCYGVSPTKLNDLCFTNVYADSFVIRGDEVRQIAPGQTGKIADYNYKLPDDFTGCVIAWNSNNLDSKVGGNYNYLYRLFRKSNLKPFERDISTEIYQAGSTPCNGVEGFNCYFPLQSYGFQPTNGVGYQPYRVVVLSFELLHAPATVCGPKKSTNLVKNKCVNFNFNGLTGTGVLTESNKKFLPFQQFGRDIADTTDAVRDPQTLEILDITPCSFGGVSVITPGTNTSNQVAVLYQDVNCTEVPVAIHADQLTPTWRVYSTGSNVFQTRAGCLIGAEHVNNSYECDIPIGAGICASYQTQTNSPRRARSVASQSIIAYTMSLGAENSVAYSNNSIAIPTNFTISVTTEILPVSMTKTSVDCTMYICGDSTECSNLLLQYGSFCTQLNRALTGIAVEQDKNTQEVFAQVKQIYKTPPIKDFGGFNFSQILPDPSKPSKRSFIEDLLFNKVTLADAGFIKQYGDCLGDIAARDLICAQKFNGLTVLPPLLTDEMIAQYTSALLAGTITSGWTFGAGAALQIPFAMQMAYRFNGIGVTQCVLYENQKLIANQFNSAIGKIQDSLSSTASALGKLQDVVNQNAQALNTLVKQLSSNFGAISSVLNDILSRLDKVEAEVQIDRLITGRLQSLQTYVTQQLIRAAEIRASANLAATKMSECVLGQSKRVDFCGKGYHLMSFPQSAPHGVVFLHVTYVPAQEKNFTTAPAICHDGKAHFPREGVFVSNGTHWFVTQRNFYEPQIITTDNTFVCGNCDVVIGIVNNTVYDPLQPELDSFKEELDKYFKNHTSPDVDLGDISGINASVVNIQKEIDRLNEVAKNLNESLIDLQELGKYEQYIKGGGGSDIDPYKEFGSSYQLLNFLPLDFFPDLNALVDTATALYEEELTGREHCSPHHTAIRQALVCWDELTKLIAWMSSNITSEQVRTIIVNHVNDTWGLKVRQSLWFHLSCLTFGQHTVQEFLVSFGVWIRTPAPYRPPNAPILSTLPEHTVIC

SEQ ID NO: 13837 - protein, 1365 aa, Artificial Sequence
  SARS-CoV-2/Portugal/PT0035/2020__EPI_ISL_418020 spike protein (1-1211)(N914C_S1123C) WhcAg construct
MFVFLVLLPLVSSQCVNLTTRTQLPPAYTNSFTRGVYYPDKVFRSSVLHSTQDLFLPFFSNVTWFHAIHVSGTNGTKRFDNPVLPFNDGVYFASTEKSNIIRGWIFGTTLDSKTQSLLIVNNATNVVIKVCEFQFCNDPFLGVYYHKNNKSWMESEFRVYSSANNCTFEYVSQPFLMDLEGKQGNFKNLREFVFKNIDGYFKIYSKHTPINLVRDLPQGFSALEPLVDLPIGINITRFQTLLALHRSYLTPGDSSSGWTAGAAAYYVGYLQPRTFLLKYNENGTITDAVDCALDPLSETKCTLKSFTVEKGIYQTSNFRVQPTESIVRFPNITNLCPFGEVFNATRFASVYAWNRKRISNCVADYSVLYNSASFSTFKCYGVSPTKLNDLCFTNVYADSFVIRGDEVRQIAPGQTGKIADYNYKLPDDFTGCVIAWNSNNLDSKVGGNYNYLYRLFRKSNLKPFERDISTEIYQAGSTPCNGVEGFNCYFPLQSYGFQPTNGVGYQPYRVVVLSFELLHAPATVCGPKKSTNLVKNKCVNFNFNGLTGTGVLTESNKKFLPFQQFGRDIADTTDAVRDPQTLEILDITPCSFGGVSVITPGTNTSNQVAVLYQDVNCTEVPVAIHADQLTPTWRVYSTGSNVFQTRAGCLIGAEHVNNSYECDIPIGAGICASYQTQTNSPRRARSVASQSIIAYTMSLGAENSVAYSNNSIAIPTNFTISVTTEILPVSMTKTSVDCTMYICGDSTECSNLLLQYGSFCTQLNRALTGIAVEQDKNTQEVFAQVKQIYKTPPIKDFGGFNFSQILPDPSKPSKRSFIEDLLFNKVTLADAGFIKQYGDCLGDISARDLICAQKFNGLTVLPPLLTDEMIAQYTSALLAGTITSGWTFGAGAALQIPFAMQMAYRFNGIGVTQCVLYENQKLIANQFNSAIGKIQDSLSSTASALGKLQDVVNQNAQALNTLVKQLSSNFGAISSVLNDILSRLDKVEAEVQIDRLITGRLQSLQTYVTQQLIRAAEIRASANLAATKMSECVLGQSKRVDFCGKGYHLMSFPQSAPHGVVFLHVTYVPAQEKNFTTAPAICHDGKAHFPREGVFVSNGTHWFVTQRNFYEPQIITTDNTFVCGNCDVVIGIVNNTVYDPLQPELDSFKEELDKYFKNHTSPDVDLGDISGINASVVNIQKEIDRLNEVAKNLNESLIDLQELGKYEQYIKGGGGSDIDPYKEFGSSYQLLNFLPLDFFPDLNALVDTATALYEEELTGREHCSPHHTAIRQALVCWDELTKLIAWMSSNITSEQVRTIIVNHVNDTWGLKVRQSLWFHLSCLTFGQHTVQEFLVSFGVWIRTPAPYRPPNAPILSTLPEHTVIC

SEQ ID NO: 13838 - protein, 1365 aa, Artificial Sequence
  SARS-CoV-2/USA/NY-NYUMC7/2020__EPI_ISL_418192 spike protein (1-1211)(N914C_S1123C) WhcAg construct
MFVFLVLLPLVSSQCVNLTTRTQLPPAYTNSFTRGVYYPDKVFRSSVLHSTQDLFLPFFSNVTWFHAIHVSGTNGTKRFDNPVLPFNDGVYFASTEKSNIIRGWIFGTTLDSKTQSLLIVNNATNVVIKVCEFQFCNDPFLGVYHHKNNKSWMESEFRVYSSANNCTFEYVSQPFLMDLEGKQGNFKNLREFVFKNIDGYFKIYSKHTPINLVRDLPQGFSALEPLVDLPIGINITRFQTLLALHRSYLTPGDSSSGWTAGAAAYYVGYLQPRTFLLKYNENGTITDAVDCALDPLSETKCTLKSFTVEKGIYQTSNFRVQPTESIVRFPNITNLCPFGEVFNATRFASVYAWNRKRISNCVADYSVLYNSASFSTFKCYGVSPTKLNDLCFTNVYADSFVIRGDEVRQIAPGQTGKIADYNYKLPDDFTGCVIAWNSNNLDSKVGGNYNYLYRLFRKSNLKPFERDISTEIYQAGSTPCNGVEGFNCYFPLQSYGFQPTNGVGYQPYRVVVLSFELLHAPATVCGPKKSTNLVKNKCVNFNFNGLTGTGVLTESNKKFLPFQQFGRDIADTTDAVRDPQTLEILDITPCSFGGVSVITPGTNTSNQVAVLYQGVNCTEVPVAIHADQLTPTWRVYSTGSNVFQTRAGCLIGAEHVNNSYECDIPIGAGICASYQTQTNSPRRARSVASQSIIAYTMSLGAENSVAYSNNSIAIPTNFTISVTTEILPVSMTKTSVDCTMYICGDSTECSNLLLQYGSFCTQLNRALTGIAVEQDKNTQEVFAQVKQIYKTPPIKDFGGFNFSQILPDPSKPSKRSFIEDLLFNKVTLADAGFIKQYGDCLGDIAARDLICAQKFNGLTVLPPLLTDEMIAQYTSALLAGTITSGWTFGAGAALQIPFAMQMAYRFNGIGVTQCVLYENQKLIANQFNSAIGKIQDSLSSTASALGKLQDVVNQNAQALNTLVKQLSSNFGAISSVLNDILSRLDKVEAEVQIDRLITGRLQSLQTYVTQQLIRAAEIRASANLAATKMSECVLGQSKRVDFCGKGYHLMSFPQSAPHGVVFLHVTYVPAQEKNFTTAPAICHDGKAHFPREGVFVSNGTHWFVTQRNFYEPQIITTDNTFVCGNCDVVIGIVNNTVYDPLQPELDSFKEELDKYFKNHTSPDVDLGDISGINASVVNIQKEIDRLNEVAKNLNESLIDLQELGKYEQYIKGGGGSDIDPYKEFGSSYQLLNFLPLDFFPDLNALVDTATALYEEELTGREHCSPHHTAIRQALVCWDELTKLIAWMSSNITSEQVRTIIVNHVNDTWGLKVRQSLWFHLSCLTFGQHTVQEFLVSFGVWIRTPAPYRPPNAPILSTLPEHTVIC

SEQ ID NO: 13839 - protein, 1365 aa, Artificial Sequence
  SARS-CoV-2/Iceland/189/2020__EPI_ISL_417709 spike protein (1-1211)(N914C_S1123C) WhcAg construct
MFVFLVLLPLVSSQCVNLTTRTQLPPAYTNSFTRGVYYPDKVFRSSVLHSTQDLFLPFFSNVTWFHAIHVSGTNGTKRFDNPVLPFNDGVYFASTEKSNIIRGWIFGTTLDSKTQSLLIVNNATNVVIKVCEFQFCNDPFLGVYYHKNNKSWMESEFRVYSSANNCTFEYVSQPFLMDLEGKQGNFKNLREFVFKNIDGYFKIYSKHTPINLVRDLPQGFSALEPLVDLPIGINITRFQTLLALHRSYLTPGDSSSGWTAGAAAYYVGYLQPRTFLLKYNENGTITDAVDCALDPLSETKCTLKSFTVEKGIYQTSNFRVQPTESIVRFPNITNLCPFGEVFNATRFASVYAWNRKRISNCVADYSVLYNSASFSTFKCYGVSPTKLNDLCFTNVYADSFVIRGDEVRQIAPGQTGKIADYNYKLPDDFTGCVIAWNSNNLDSKVGGNYNYLYRLFRKSNLKPFERDISTEIYQAGSTPCNGVEGFNCYFPLQSYGFQPTNGVGYQPYRVVVLSFELLHAPATVCGPKKSTNLVKNKCVNFNFNGLTGTGVLTESNKKFLPFQQFGRDIADTTDAVRDPQTLEILDITPCSFGGVSVITPGTNTSNQVAVLYQGVNCTEVPVAIHADQLTPTWRVYSTGSNVFQTRAGCLIGAEHVNNSYECDIPIGAGICASYQTQTNSPRRARSVASQSIIAYTMSLGAENSVAYSNNSIAIPTNFTISVTTEILPVSMTKTSVDCTMYICGDSTECSNLLLQYGSFCTQLNRALTGIAVEQDKNTQEVFAQVKQIYKTPPIKDFGGFNFSQILPDPSKPSKRSFIEDLLFNKVTLADAGFTKQYGDCLGDIAARDLICAQKFNGLTVLPPLLTDEMIAQYTSALLAGTITSGWTFGAGAALQIPFAMQMAYRFNGIGVTQCVLYENQKLIANQFNSAIGKIQDSLSSTASALGKLQDVVNQNAQALNTLVKQLSSNFGAISSVLNDILSRLDKVEAEVQIDRLITGRLQSLQTYVTQQLIRAAEIRASANLAATKMSECVLGQSKRVDFCGKGYHLMSFPQSAPHGVVFLHVTYVPAQEKNFTTAPAICHDGKAHFPREGVFVSNGTHWFVTQRNFYEPQIITTDNTFVCGNCDVVIGIVNNTVYDPLQPELDSFKEELDKYFKNHTSPDVDLGDISGINASVVNIQKEIDRLNEVAKNLNESLIDLQELGKYEQYIKGGGGSDIDPYKEFGSSYQLLNFLPLDFFPDLNALVDTATALYEEELTGREHCSPHHTAIRQALVCWDELTKLIAWMSSNITSEQVRTIIVNHVNDTWGLKVRQSLWFHLSCLTFGQHTVQEFLVSFGVWIRTPAPYRPPNAPILSTLPEHTVIC

SEQ ID NO: 13840 - protein, 1365 aa, Artificial Sequence
  SARS-CoV-2/Australia/NSW56/2020__EPI_ISL_417408 spike protein (1-1211)(N914C_S1123C) WhcAg construct
MFVFLVLLPLVSSQCVNLTTRTQLPPAYTNSFTRGVYYPDKVFRSSVLHSTQDLFLPFFSNVTWFHAIHVSGTNGTKRFDNPVLPFNDGVYFASTEKSNIIRGWIFGTTLDSKTQSLLIVNNATNVVIKVCEFQFCNDPFLGVYYHKNNKSWMESEFRVYSSANNCTFEYVSQPFLMDLEGKQGNFKNLREFVFKNIDGYFKIYSKHTPINLVRDLPQGFSALEPLVDLPIGINITRFQTLLALHRSYLTPGDSSSGWTAGAAAYYVGYLQPRTFLLKYNENGTITDAVDCALDPLSETKCTLKSFTVEKGIYQTSNFRVQPTESIVRFPNITNLCPFGEVFNATRFASVYAWNRKRISNCVADYSVLYNSASFSTFKCYGVSPTKLNDLCFTNVYADSFVIRGDEVRQIAPGQTGKIADYNYKLPDDFTGCVIAWNSNNLDSKVGGNYNYLYRLFRKSNLKPFERDISTEIYQAGSTPCNGVEGFNCYFPLQSYGFQPTNGVGYQPYRVVVLSFELLHAPATVCGPKKSTNLVKNKCVNFNFNGLTGTGVLTESNKKFLPFQQFGRDIADTTDAVRDPQTLEILDITPCSFGGVSVITPGTNTSNQVAVLYQDVNCTEVPVAIHADQLTPTWRVYSTGSNVFQTRAGCLIGAEHVNNSYECDIPIGAGICASYQTQTNSPRRARSVASQSIIAYTMSLGAENSVAYSNNSIAIPTNFTISVTTEILPVSMTKTSVDCTMYICGDSTECSNLLLQYGSFCTQLNRALTGIAVEQDKNTQEVFAQVKQIYKTPPIKDFGGFNFSQILPDSSKPSKRSFIEDLLFNKVTLADAGFIKQYGDCLGDIAARDLICAQKFNGLTVLPPLLTDEMIAQYTSALLAGTITSGWTFGAGAALQIPFAMQMAYRFNGIGVTQCVLYENQKLIANQFNSAIGKIQDSLSSTASALGKLQDVVNQNAQALNTLVKQLSSNFGAISSVLNDILSRLDKVEAEVQIDRLITGRLQSLQTYVTQQLIRAAEIRASANLAATKMSECVLGQSKRVDFCGKGYHLMSFPQSAPHGVVFLHVTYVPAQEKNFTTAPAICHDGKAHFPREGVFVSNGTHWFVTQRNFYEPQIITTDNTFVCGNCDVVIGIVNNTVYDPLQPELDSFKEELDKYFKNHTSPDVDLGDISGINASVVNIQKEIDRLNEVAKNLNESLIDLQELGKYEQYIKGGGGSDIDPYKEFGSSYQLLNFLPLDFFPDLNALVDTATALYEEELTGREHCSPHHTAIRQALVCWDELTKLIAWMSSNITSEQVRTIIVNHVNDTWGLKVRQSLWFHLSCLTFGQHTVQEFLVSFGVWIRTPAPYRPPNAPILSTLPEHTVIC

SEQ ID NO: 13841 - protein, 1365 aa, Artificial Sequence
  SARS-CoV-2/Iceland/280/2020__EPI_ISL_417608 spike protein (1-1211)(N914C_S1123C) WhcAg construct
MFVFLVLLPLVSSQCVNLTTRTQLPPAYTNSFTRGVYYPDKVFRSSVLHSTQDLFLPFFSNVTWFHAIHVSGTNGTKRFDNPVLPFNDGVYFASTEKSNIIRGWIFGTTLDSKTQSLLIVNNATNVVIKVCEFQFCNDPFLGVYYHKNNKSWMESEFRVYSSANNCTFEYVSQPFLMDLEGKQGNFKNLREFVFKNIDGYFKIYSKHTPINLVRDLPQGFSALEPLVDLPIGINITRFQTLLALHRSYLTPGDSSSGWTAGAAAYYVGYLQPRTFLLKYNENGTITDAVDCALDPLSETKCTLKSFTVEKGIYQTSNFRVQPTESIVRFPNITNLCPFGEVFNATRFASVYAWNRKRISNCVADYSVLYNSASFSTFKCYGVSPTKLNDLCFTNVYADSFVIRGDEVRQIAPGQTGKIADYNYKLPDDFTGCVIAWNSNNLDSKVGGNYNYLYRLFRKSNLKPFERDISTEIYQAGSTPCNGVEGFNCYFPLQSYGFQPTNGVGYQPYRVVVLSFELLHAPATVCGPKKSTNLVKNKCVNFNFNGLTGTGVLTESNKKFLPFQQFGRDIADTTDAVRDPQTLEILDITPCSFGGVSVITPGTNTSNQVAVLYQGVNCTEVPVAIHADQLTPTWRVYSTGSNVFQTRAGCLIGAEHVNNSYECDIPIGAGICASYHTQTNSPRRARSVASQSIIAYTMSLGAENSVAYSNNSIAIPTNFTISVTTEILPVSMTKTSVDCTMYICGDSTECSNLLLQYGSFCTQLNRALTGIAVEQDKNTQEVFAQVKQIYKTPPIKDFGGFNFSQILPDPSKPSKRSFIEDLLFNKVTLADAGFIKQYGDCLGDIAARDLICAQKFNGLTVLPPLLTDEMIAQYTSALLAGTITSGWTFGAGAALQIPFAMQMAYRFNGIGVTQCVLYENQKLIANQFNSAIGKIQDSLSSTASALGKLQDVVNQNAQALNTLVKQLSSNFGAISSVLNDILSRLDKVEAEVQIDRLITGRLQSLQTYVTQQLIRAAEIRASANLAATKMSECVLGQSKRVDFCGKGYHLMSFPQSAPHGVVFLHVTYVPAQEKNFTTAPAICHDGKAHFPREGVFVSNGTHWFVTQRNFYEPQIITTDNTFVCGNCDVVIGIVNNTVYDPLQPELDSFKEELDKYFKNHTSPDVDLGDISGINASVVNIQKEIDRLNEVAKNLNESLIDLQELGKYEQYIKGGGGSDIDPYKEFGSSYQLLNFLPLDFFPDLNALVDTATALYEEELTGREHCSPHHTAIRQALVCWDELTKLIAWMSSNITSEQVRTIIVNHVNDTWGLKVRQSLWFHLSCLTFGQHTVQEFLVSFGVWIRTPAPYRPPNAPILSTLPEHTVIC

SEQ ID NO: 13842 - protein, 1365 aa, Artificial Sequence; identical to SEQ ID NO: 13797
  SARS-CoV-2/Iceland/247/2020__EPI_ISL_417575 spike protein (1-1211)(N914C_S1123C) WhcAg construct

SEQ ID NO: 13843 - protein, 1365 aa, Artificial Sequence
  SARS-CoV-2/Iceland/238/2020__EPI_ISL_417566 spike protein (1-1211)(N914C_S1123C) WhcAg construct
MFVFLVLLPLVSSQCVNLTTRTQLPPAYTNSFTRGVYYPDKVFRSSVLHSTQDLFLPFFSNVTWFHAIHVSGTNGTKRFDNPVLPFNDGVYFASTEKSNIIRGWIFGTTLDSKTQSLLIVNNATNVVIKVCEFQFCNDPFLGVYYHKNNKSWMESEFRVYSSANNCTFEYVSQPFLMDLEGKQGNFKNLREFVFKNIDGYFKIYSKHTPINLVRDLPQGFSALEPLVDLPIGINITRFQTLLALHRSYLTPGDSSSGWTAGAAAYYVGYLQPRTFLLKYNENGTITDAVDCALDPLSETKCTLKSFTVEKGIYQTSNFRVQPTESIVRFPNITNLCPFGEVFNATRFASVYAWNRKRISNCVADYSVLYNSASFSTFKCYGVSPTKLNDLCFTNVYADSFVIRGDEVRQIAPGQTGKIADYNYKLPDDFTGCVIAWNSNNLDSKVGGNYNYLYRLFRKSNLKPFERDISTEIYQAGSTPCNGVEGFNCYFPLQSYGFQPTNGVGYQPYRVVVLSFELLHAPATVCGPKKSTNLVKNKCVNFNFNGLTGTGVLTESNKKFLPFQQFGRDIADTTDAVRDPQTLEILDITPCSFGGVSVITPGTNTSNQVAVLYQGVNCTEVPVAIHADQLTPTWRVYSTGSNVFQTRAGCLIGAEHVNNSYECDIPIGAGICASYQTQTNSPRRARSVASQSIIAYTMSLGAENSVAYSNNSIAIPTNFTISVTTEILPVSMTKTSVDCTMYICGDSTECSNLLLQYGSFCTQLNRALTGIAVEQDKNTQEVFAQVKQIYKTPPIKDFGGFNFSQILPDPSKPSKRSFIEDLLFNKVTLADVGFIKQYGDCLGDIAARDLICAQKFNGLTVLPPLLTDEMIAQYTSALLAGTITSGWTFGAGAALQIPFAMQMAYRFNGIGVTQCVLYENQKLIANQFNSAIGKIQDSLSSTASALGKLQDVVNQNAQALNTLVKQLSSNFGAISSVLNDILSRLDKVEAEVQIDRLITGRLQSLQTYVTQQLIRAAEIRASANLAATKMSECVLGQSKRVDFCGKGYHLMSFPQSAPHGVVFLHVTYVPAQEKNFTTAPAICHDGKAHFPREGVFVSNGTHWFVTQRNFYEPQIITTDNTFVCGNCDVVIGIVNNTVYDPLQPELDSFKEELDKYFKNHTSPDVDLGDISGINASVVNIQKEIDRLNEVAKNLNESLIDLQELGKYEQYIKGGGGSDIDPYKEFGSSYQLLNFLPLDFFPDLNALVDTATALYEEELTGREHCSPHHTAIRQALVCWDELTKLIAWMSSNITSEQVRTIIVNHVNDTWGLKVRQSLWFHLSCLTFGQHTVQEFLVSFGVWIRTPAPYRPPNAPILSTLPEHTVIC

SEQ ID NO: 13844 - protein, 1365 aa, Artificial Sequence
  SARS-CoV-2/Greece/16/2020__EPI_ISL_418265 spike protein (1-1211)(N914C_S1123C) WhcAg construct
MFVFLVLLPLVSSQCVNLTTRTQLPPAYTNSFTRGVYYPDKVFRSSVLHSTQDLFLPFFSNVTWFHAIHVSGTNGTKRFDNPVLPFNDGVYFASTEKSNIIRGWIFGTTLDSKTQSLLIVNNATNVVIKVCEFQFCNDPFLGVYYHKNNKSWMESEFRVYSSANNCTFEYVSQPFLMDLEGKQGNFKNLREFVFKNVDGYFKIYSKHTPINLVRDLPQGFSALEPLVDLPIGINITRFQTLLALHRSYLTPGDSSSGWTAGAAAYYVGYLQPRTFLLKYNENGTITDAVDCALDPLSETKCTLKSFTVEKGIYQTSNFRVQPTESIVRFPNITNLCPFGEVFNATRFASVYAWNRKRISNCVADYSVLYNSASFSTFKCYGVSPTKLNDLCFTNVYADSFVIRGDEVRQIAPGQTGKIADYNYKLPDDFTGCVIAWNSNNLDSKVGGNYNYLYRLFRKSNLKPFERDISTEIYQAGSTPCNGVEGFNCYFPLQSYGFQPTNGVGYQPYRVVVLSFELLHAPATVCGPKKSTNLVKNKCVNFNFNGLTGTGVLTESNKKFLPFQQFGRDIADTTDAVRDPQTLEILDITPCSFGGVSVITPGTNTSNQVAVLYQDVNCTEVPVAIHADQLTPTWRVYSTGSNVFQTRAGCLIGAEHVNNSYECDIPIGAGICASYQTQTNSPRRARSVASQSIIAYTMSLGAENSVAYSNNSIAIPTNFTISVTTEILPVSMTKTSVDCTMYICGDSTECSNLLLQYGSFCTQLNRALTGIAVEQDKNTQEVFAQVKQIYKTPPIKDFGGFNFSQILPDPSKPSKRSFIEDLLFNKVTLADAGFIKQYGDCLGDIAARDLICAQKFNGLTVLPPLLTDEMIAQYTSALLAGTITSGWTFGAGAALQIPFAMQMAYRFNGIGVTQCVLYENQKLIANQFNSAIGKIQDSLSSTASALGKLQDVVNQNAQALNTLVKQLSSNFGAISSVLNDILSRLDKVEAEVQIDRLITGRLQSLQTYVTQQLIRAAEIRASANLAATKMSECVLGQSKRVDFCGKGYHLMSFPQSAPHGVVFLHVTYVPAQEKNFTTAPAICHDGKAHFPREGVFVSNGTHWFVTQRNFYEPQIITTDNTFVCGNCDVVIGIVNNTVYDPLQPELDSFKEELDKYFKNHTSPDVDLGDISGINASVVNIQKEIDRLNEVAKNLNESLIDLQELGKYEQYIKGGGGSDIDPYKEFGSSYQLLNFLPLDFFPDLNALVDTATALYEEELTGREHCSPHHTAIRQALVCWDELTKLIAWMSSNITSEQVRTIIVNHVNDTWGLKVRQSLWFHLSCLTFGQHTVQEFLVSFGVWIRTPAPYRPPNAPILSTLPEHTVIC

SEQ ID NO: 13845 - protein, 1365 aa, Artificial Sequence
  SARS-CoV-2/Iceland/319/2020__EPI_ISL_417648 spike protein (1-1211)(N914C_S1123C) WhcAg construct
MFVFLVLLPLVSSQCVNLTTRTQLPPAYTNSFTRGVYYPDKVFRSSVLHSTQDLFLPFFSNVTWFHAIHVSGTNGTKRFDNPVLPFNDGVYFASTEKSNIIRGWIFGTTLDSKTQSLLIVNNATNVVIKVCEFQFCNDPFLGVYYHKNNKSWMESEFRVYSSANNCTFEYVSQPFLIDLEGKQGNFKNLREFVFKNIDGYFKIYSKHTPINLVRDLPQGFSALEPLVDLPIGINITRFQTLLALHRSYLTPGDSSSGWTAGAAAYYVGYLQPRTFLLKYNENGTITDAVDCALDPLSETKCTLKSFTVEKGIYQTSNFRVQPTESIVRFPNITNLCPFGEVFNATRFASVYAWNRKRISNCVADYSVLYNSASFSTFKCYGVSPTKLNDLCFTNVYADSFVIRGDEVRQIAPGQTGKIADYNYKLPDDFTGCVIAWNSNNLDSKVGGNYNYLYRLFRKSNLKPFERDISTEIYQAGSTPCNGVEGFNCYFPLQSYGFQPTNGVGYQPYRVVVLSFELLHAPATVCGPKKSTNLVKNKCVNFNFNGLTGTGVLTESNKKFLPFQQFGRDIADTTDAVRDPQTLEILDITPCSFGGVSVITPGTNTSNQVAVLYQGVNCTEVPVAIHADQLTPTWRVYSTGSNVFQTRAGCLIGAEHVNNSYECDIPIGAGICASYQTQTNSPRRARSVASQSIIAYTMSLGAENSVAYSNNSIAIPTNFTISVTTEILPVSMTKTSVDCTMYICGDSTECSNLLLQYGSFCTQLNRALTGIAVEQDKNTQEVFAQVKQIYKTPPIKDFGGFNFSQILPDPSKPSKRSFIEDLLFNKVTLADAGFIKQYGDCLGDIAARDLICAQKFNGLTVLPPLLTDEMIAQYTSALLAGTITSGWTFGAGAALQIPFAMQMAYRFNGIGVTQCVLYENQKLIANQFNSAIGKIQDSLSSTASALGKLQDVVNQNAQALNTLVKQLSSNFGAISSVLNDILSRLDKVEAEVQIDRLITGRLQSLQTYVTQQLIRAAEIRASANLAATKMSECVLGQSKRVDFCGKGYHLMSFPQSAPHGVVFLHVTYVPAQEKNFTTAPAICHDGKAHFPREGVFVSNGTHWFVTQRNFYEPQIITTDNTFVCGNCDVVIGIVNNTVYDPLQPELDSFKEELDKYFKNHTSPDVDLGDISGINASVVNIQKEIDRLNEVAKNLNESLIDLQELGKYEQYIKGGGGSDIDPYKEFGSSYQLLNFLPLDFFPDLNALVDTATALYEEELTGREHCSPHHTAIRQALVCWDELTKLIAWMSSNITSEQVRTIIVNHVNDTWGLKVRQSLWFHLSCLTFGQHTVQEFLVSFGVWIRTPAPYRPPNAPILSTLPEHTVIC

SEQ ID NO: 13846 - protein, 1365 aa, Artificial Sequence
  SARS-CoV-2/Congo/94/2020__EPI_ISL_417947 spike protein (1-1211)(N914C_S1123C) WhcAg construct
MFVFLVLLPLVSSQCVNLTTRTQLPPAYTNSFTRGVYYPDKVFRSSVLHSTQDLFLPFFSNVTWFHAIHVSGTNGTKRFDNPVLPFNDGVYFASTEKSNIIRGWIFGTTLDSKTQSLLIVNNATNVVIKVCEFQFCNDPFLGVYYHKNNKSWMESEFRVYSSANNCTFEYVSQPFLMDLEGKQGNFKNLREFVFKNIDGYFKIYSKHTPINLVRDLPQGFSALEPLVDLPIGINITRFQTLLALHRSYLTPGDSSSGWTAGAAAYYVGYLQPRTFLLKYNENGTITDAVDCALDPLSETKCTLKSFTVEKGIYQTSNFRVQPTESIVRFPNITNLCPFGEVFNATRFASVYAWNRKRISNCVADYSVLYNSASFSTFKCYGVSPTKLNDLCFTNVYADSFVIRGDEVRQIAPGQTGKIADYNYKLPDDFTGCVIAWNSNNLDSKVGGNYNYLYRLFRKSNLKPFERDISTEIYQAGSTPCNGVEGFNCYFPLQSYGFQPTNGVGYQPYRVVVLSFELLHAPATVCGPKKSTNLVKNKCVNFNFNGLTGTGVLTESNKKFLPFQQFGRDIADTTDAVRDPQTLEILDITPCSFGGVSVITPGTNTSNQVAVLYQGVNCTEVPVAIHADQLTPTWRVYSTGSNVFQTRAGCLIGAEHVNNSYECDIPIGAGICASYQTQTNSPRRARSVASQSIIAYTMSLGAENSVAYSNNSIAIPTNFTISVTTEILPVSMTKTSVDCTMYICGDSTECSNLLLQYGSFCTQLNRALTGIAVEQDKNTQEVFAQVKQIYKTPPIKDFGGFNFSQILPDPSKPSKRSFIEDILFNKVTLADAGFIKQYGDCLGDIAARDLICAQKFNGLTVLPPLLTDEMIAQYTSALLAGTITSGWTFGAGAALQIPFAMQMAYRFNGIGVTQCVLYENQKLIANQFNSAIGKIQDSLSSTASALGKLQDVVNQNAQALNTLVKQLSSNFGAISSVLNDILSRLDKVEAEVQIDRLITGRLQSLQTYVTQQLIRAAEIRASANLAATKMSECVLGQSKRVDFCGKGYHLMSFPQSAPHGVVFLHVTYVPAQEKNFTTAPAICHDGKAHFPREGVFVSNGTHWFVTQRNFYEPQIITTDNTFVCGNCDVVIGIVNNTVYDPLQPELDSFKEELDKYFKNHTSPDVDLGDISGINASVVNIQKEIDRLNEVAKNLNESLIDLQELGKYEQYIKGGGGSDIDPYKEFGSSYQLLNFLPLDFFPDLNALVDTATALYEEELTGREHCSPHHTAIRQALVCWDELTKLIAWMSSNITSEQVRTIIVNHVNDTWGLKVRQSLWFHLSCLTFGQHTVQEFLVSFGVWIRTPAPYRPPNAPILSTLPEHTVIC

SEQ ID NO: 13847 - protein, 1365 aa, Artificial Sequence
  SARS-CoV-2/Congo/158/2020__EPI_ISL_417950 spike protein (1-1211)(N914C_S1123C) WhcAg construct
MFVFLVLLPLVSSQCVNLTTRTQLPPAYTNSFTRGVYYPDKVFRSSVLHSTQDLFLPFFSNVTWFHAIHVSGTNGTKRFDNPVLPFNDGVYFASTEKSNIIRGWIFGTTLDSKTQSLLIVNNATNVVIKVCEFQFCNDPFLGVYYHKNNKSWMESEFRVYSSANNCTFEYVSQPFLMDLEGKQGNFKNLREFVFKNIDGYFKIYSKHTPINLVRDLPQGFSALEPLVDLPIGINITRFQTLLALHRSYLTPGDSSSGWTAGAAAYYVGYLQPRTFLLKYNENGTITDAVDCALDPLSETKCTLKSFTVEKGIYQTSNFRVQPTESIVRFPNITNLCPFGEVFNATRFASVYAWNRKRISNCVADYSVLYNSASFSTFKCYGVSPTKLNDLCFTNVYADSFVIRGDEVRQIAPGQTGKIADYNYKLPDDFTGCVIAWNSNNLDSKVGGNYNYLYRLFRKSNLKPFERDISTEIYQAGSTPCNGVEGFNCYFPLQSYGFQPTNGVGYQPYRVVVLSFELLHAPATVCGPKKSTNLVKNKCVNFNFNGLTGTGVLTESNKKFLPFQQFGRDIADTTDAVRDPQTLEILDITPCSFGGVSVITPGTNTSNQVAVLYQDVNCTEVPVAIHADQLTPTWRVYSTGSNVFQTRAGCLIGAEHVNNSYECDIPIGAGICASYQTQTNSPRRARSVASQSIIAYTMSLGAENSVAYSNNSIAIPTNFTISVTTEILPVSMTKTSVDCTMYICGDSTECSNLLLQYGSFCTQLNRALTGIAVEQDKNTQEVFAQVKQIYKTPPIKDFGGFNFSQILPDPSKPSKRSFIEDLLFNKVTLADAGFIKQYGDCLGDIAARDLICAQKFNGLTVLPPLLTDEMIAQYTSALLAGTITSGWTFGAGAALQIPFAMQMAYRFNGIGVTQCVLYENQKLIANQFNSAIGKIQDSLSSTASALGKLQDVVNQNAQALNTLVKQLSSNFGAISSVLNDILSRLDKVEAEVQIDRLITGRLQSLQTYVTQQLIRAAEIRASANLAATKMSECVLGQSKRVDFCGKGYHLMSFPQSAPHGVVFLHVTYVPAQEKNFTTAPAICHDGKAHFPREGVFVSNGTHWFVTQRNFYEPQIITTDNTFLCGNCDVVIGIVNNTVYDPLQPELDSFKEELDKYFKNHTSPDVDLGDISGINASVVNIQKEIDRLNEVAKNLNESLIDLQELGKYEQYIKGGGGSDIDPYKEFGSSYQLLNFLPLDFFPDLNALVDTATALYEEELTGREHCSPHHTAIRQALVCWDELTKLIAWMSSNITSEQVRTIIVNHVNDTWGLKVRQSLWFHLSCLTFGQHTVQEFLVSFGVWIRTPAPYRPPNAPILSTLPEHTVIC

SEQ ID NO: 13848 - protein, 1365 aa, Artificial Sequence
  SARS-CoV-2/USA/UT-00034/2020__EPI_ISL_417977 spike protein (1-1211)(N914C_S1123C) WhcAg construct
MFVFLVLLPLVSSQCVNLTTRTQLPPAYTNSFTRGVYYPDKVFRSSVLHSTQDLFLPFFSNVTWFHAIHVSGTNGTKRFDNPVLPFNDGVYFASTEKSNIIRGWIFGTTLDSKTQSLLIVNNATNVVIKVCEFQFCNDPFLGVYYYKNNKSWMESEFRVYSSANNCTFEYVSQPFLMDLEGKQGNFKNLREFVFKNIDGYFKIYSKHTPINLVRDLPQGFSALEPLVDLPIGINITRFQTLLALHRSYLTPGDSSSGWTAGAAAYYVGYLQPRTFLLKYNENGTITDAVDCALDPLSETKCTLKSFTVEKGIYQTSNFRVQPTESIVRFPNITNLCPFGEVFNATRFASVYAWNRKRISNCVADYSVLYNSASFSTFKCYGVSPTKLNDLCFTNVYADSFVIRGDEVRQIAPGQTGKIADYNYKLPDDFTGCVIAWNSNNLDSKVGGNYNYLYRLFRKSNLKPFERDISTEIYQAGSTPCNGVEGFNCYFPLQSYGFQPTNGVGYQPYRVVVLSFELLHAPATVCGPKKSTNLVKNKCVNFNFNGLTGTGVLTESNKKFLPFQQFGRDIADTTDAVRDPQTLEILDITPCSFGGVSVITPGTNTSNQVAVLYQGVNCTEVPVAIHADQLTPTWRVYSTGSNVFQTRAGCLIGAEHVNNSYECDIPIGAGICASYQTQTNSPRRARSVASQSIIAYTMSLGAENSVAYSNNSIAIPTNFTISVTTEILPVSMTKTSVDCTMYICGDSTECSNLLLQYGSFCTQLNRALTGIAVEQDKNTQEVFAQVKQIYKTPPIKDFGGFNFSQILPDPSKPSKRSFIEDLLFNKVTLADAGFIKQYGDCLGDIAARDLICAQKFNGLTVLPPLLTDEMIAQYTSALLAGTITSGWTFGAGAALQIPFAMQMAYRFNGIGVTQCVLYENQKLIANQFNSAIGKIQDSLSSTASALGKLQDVVNQNAQALNTLVKQLSSNFGAISSVLNDILSRLDKVEAEVQIDRLITGRLQSLQTYVTQQLIRAAEIRASANLAATKMSECVLGQSKRVDFCGKGYHLMSFPQSAPHGVVFLHVTYVPAQEKNFTTAPAICHDGKAHFPREGVFVSNGTHWFVTQRNFYEPQIITTDNTFVCGNCDVVIGIVNNTVYDPLQPELDSFKEELDKYFKNHTSPDVDLGDISGINASVVNIQKEIDRLNEVAKNLNESLIDLQELGKYEQYIKGGGGSDIDPYKEFGSSYQLLNFLPLDFFPDLNALVDTATALYEEELTGREHCSPHHTAIRQALVCWDELTKLIAWMSSNITSEQVRTIIVNHVNDTWGLKVRQSLWFHLSCLTFGQHTVQEFLVSFGVWIRTPAPYRPPNAPILSTLPEHTVIC

SEQ ID NO: 13849 - protein, 1365 aa, Artificial Sequence
  SARS-CoV-2/USA/UT-00033/2020__EPI_ISL_417976 spike protein (1-1211)(N914C_S1123C) WhcAg construct
MFVFLVLLPLVSSQCVNLTTRTQLPPAYTNSFTRGVYYPDKVFRSSVLHSTQDLFLPFFSNVTWFHAIHVSGTNGTKRFDNPVLPFNDGVYFASTEKSNIIRGWIFGTTLDSKTQSLLIVNNATNVVIKVCEFQFCNDPFLGVYYHKNNKSWMESEFRVYSSANNCTFEYVSQPFLMDLEGKQGNFKNLREFVFKNIDGYFKIYSKHTPINLVRDLPQGFSALEPLVDLPIGINITRFQTLLALHRSYLTPGDSSSGLTAGAAAYYVGYLQPRTFLLKYNENGTITDAVDCALDPLSETKCTLKSFTVEKGIYQTSNFRVQPTESIVRFPNITNLCPFGEVFNATRFASVYAWNRKRISNCVADYSVLYNSASFSTFKCYGVSPTKLNDLCFTNVYADSFVIRGDEVRQIAPGQTGKIADYNYKLPDDFTGCVIAWNSNNLDSKVGGNYNYLYRLFRKSNLKPFERDISTEIYQAGSTPCNGVEGFNCYFPLQSYGFQPTNGVGYQPYRVVVLSFELLHAPATVCGPKKSTNLVKNKCVNFNFNGLTGTGVLTESNKKFLPFQQFGRDIADTTDAVRDPQTLEILDITPCSFGGVSVITPGTNTSNQVAVLYQGVNCTEVPVAIHADQLTPTWRVYSTGSNVFQTRAGCLIGAEHVNNSYECDIPIGAGICASYQTQTNSPRRARSVASQSIIAYTMSLGAENSVAYSNNSIAIPTNFTISVTTEILPVSMTKTSVDCTMYICGDSTECSNLLLQYGSFCTQLNRALTGIAVEQDKNTQEVFAQVKQIYKTPPIKDFGGFNFSQILPDPSKPSKRSFIEDLLFNKVTLADAGFIKQYGDCLGDIAARDLICAQKFNGLTVLPPLLTDEMIAQYTSALLAGTITSGWTFGAGAALQIPFAMQMAYRFNGIGVTQCVLYENQKLIANQFNSAIGKIQDSLSSTASALGKLQDVVNQNAQALNTLVKQLSSNFGAISSVLNDILSRLDKVEAEVQIDRLITGRLQSLQTYVTQQLIRAAEIRASANLAATKMSECVLGQSKRVDFCGKGYHLMSFPQSAPHGVVFLHVTYVPAQEKNFTTAPAICHDGKAHFPREGVFVSNGTHWFVTQRNFYEPQIITTDNTFVCGNCDVVIGIVNNTVYDPLQPELDSFKEELDKYFKNHTSPDVDLGDISGINASVVNIQKEIDRLNEVAKNLNESLIDLQELGKYEQYIKGGGGSDIDPYKEFGSSYQLLNFLPLDFFPDLNALVDTATALYEEELTGREHCSPHHTAIRQALVCWDELTKLIAWMSSNITSEQVRTIIVNHVNDTWGLKVRQSLWFHLSCLTFGQHTVQEFLVSFGVWIRTPAPYRPPNAPILSTLPEHTVIC

SEQ ID NO: 13850 - protein, 1365 aa, Artificial Sequence
  SARS-CoV-2/USA/WI-13/2020__EPI_ISL_417516 spike protein (1-1211)(N914C_S1123C) WhcAg construct
MFVFLVLLPLVSSQCVNLTTRTQLPPAYTNSFTRGVYYPDKVFRSSVLHSTQDLFLPFFSNVTWFHAIHVSGTNGTKRFDNPVLPFNDGVYFASTEKSNIIRGWIFGTTLDSKTQSLLIVNNATNVVIKVCEFQFCNDPFLGVYYHKNNKSWMESEFRVYSSANNCTFEYVSQPFLMDLEGKQGNFKNLREFVFKNIDGYFKIYSKHTPINLVRDLPQGFSALEPLVDLPIGINITRFQTLLALHRSYLTPGDSSSGWTAGAAAYYVGYLQPRTFLLKYNENGTITDAVDCALDPLSETKCTLKSFTVEKGIYQTSNFRVLPTESIVRFPNITNLCPFGEVFNATRFASVYAWNRKRISNCVADYSVLYNSASFSTFKCYGVSPTKLNDLCFTNVYADSFVIRGDEVRQIAPGQTGKIADYNYKLPDDFTGCVIAWNSNNLDSKVGGNYNYLYRLFRKSNLKPFERDISTEIYQAGSTPCNGVEGFNCYFPLQSYGFQPTNGVGYQPYRVVVLSFELLHAPATVCGPKKSTNLVKNKCVNFNFNGLTGTGVLTESNKKFLPFQQFGRDIADTTDAVRDPQTLEILDITPCSFGGVSVITPGTNTSNQVAVLYQGVNCTEVPVAIHADQLTPTWRVYSTGSNVFQTRAGCLIGAEHVNNSYECDIPIGAGICASYQTQTNSPRRARSVASQSIIAYTMSLGAENSVAYSNNSIAIPTNFTISVTTEILPVSMTKTSVDCTMYICGDSTECSNLLLQYGSFCTQLNRALTGIAVEQDKNTQEVFAQVKQIYKTPPIKDFGGFNFSQILPDPSKPSKRSFIEDLLFNKVTLADAGFIKQYGDCLGDIAARDLICAQKFNGLTVLPPLLTDEMIAQYTSALLAGTITSGWTFGAGAALQIPFAMQMAYRFNGIGVTQCVLYENQKLIANQFNSAIGKIQDSLSSTASALGKLQDVVNQNAQALNTLVKQLSSNFGAISSVLNDILSRLDKVEAEVQIDRLITGRLQSLQTYVTQQLIRAAEIRASANLAATKMSECVLGQSKRVDFCGKGYHLMSFPQSAPHGVVFLHVTYVPAQEKNFTTAPAICHDGKAHFPREGVFVSNGTHWFVTQRNFYEPQIITTDNTFVCGNCDVVIGIVNNTVYDPLQPELDSFKEELDKYFKNHTSPDVDLGDISGINASVVNIQKEIDRLNEVAKNLNESLIDLQELGKYEQYIKGGGGSDIDPYKEFGSSYQLLNFLPLDFFPDLNALVDTATALYEEELTGREHCSPHHTAIRQALVCWDELTKLIAWMSSNITSEQVRTIIVNHVNDTWGLKVRQSLWFHLSCLTFGQHTVQEFLVSFGVWIRTPAPYRPPNAPILSTLPEHTVIC

SEQ ID NO: 13851 - protein, 1364 aa, Artificial Sequence
  SARS-CoV-2/India/1-27/2020__EPI_ISL_413522 spike protein (1-1210)(N913C_S1122C) WhcAg construct
MFVFLVLLPLVSSQCVNLTTRTQLPPAYTNSFTRGVYYPDKVFRSSVLHSTQDLFLPFFSNVTWFHAIHVSGTNGTKRFDNPVLPFNDGVYFASTEKSNIIRGWIFGTTLDSKTQSLLIVNNATNVVIKVCEFQFCNDPFLGVYHKNNKSWMESEFRVYSSANNCTFEYVSQPFLMDLEGKQGNFKNLREFVFKNIDGYFKIYSKHTPINLVRDLPQGFSALEPLVDLPIGINITRFQTLLALHRSYLTPGDSSSGWTAGAAAYYVGYLQPRTFLLKYNENGTITDAVDCALDPLSETKCTLKSFTVEKGIYQTSNFRVQPTESIVRFPNITNLCPFGEVFNATRFASVYAWNRKRISNCVADYSVLYNSASFSTFKCYGVSPTKLNDLCFTNVYADSFVIRGDEVIQIAPGQTGKIADYNYKLPDDFTGCVIAWNSNNLDSKVGGNYNYLYRLFRKSNLKPFERDISTEIYQAGSTPCNGVEGFNCYFPLQSYGFQPTNGVGYQPYRVVVLSFELLHAPATVCGPKKSTNLVKNKCVNFNFNGLTGTGVLTESNKKFLPFQQFGRDIADTTDAVRDPQTLEILDITPCSFGGVSVITPGTNTSNQVAVLYQDVNCTEVPVAIHADQLTPTWRVYSTGSNVFQTRAGCLIGAEHVNNSYECDIPIGAGICASYQTQTNSPRRARSVASQSIIAYTMSLGAENSVAYSNNSIAIPTNFTISVTTEILPVSMTKTSVDCTMYICGDSTECSNLLLQYGSFCTQLNRALTGIAVEQDKNTQEVFAQVKQIYKTPPIKDFGGFNFSQILPDPSKPSKRSFIEDLLFNKVTLADAGFIKQYGDCLGDIAARDLICAQKFNGLTVLPPLLTDEMIAQYTSALLAGTITSGWTFGAGAALQIPFAMQMAYRFNGIGVTQCVLYENQKLIANQFNSAIGKIQDSLSSTASALGKLQDVVNQNAQALNTLVKQLSSNFGAISSVLNDILSRLDKVEAEVQIDRLITGRLQSLQTYVTQQLIRAAEIRASANLAATKMSECVLGQSKRVDFCGKGYHLMSFPQSAPHGVVFLHVTYVPAQEKNFTTAPAICHDGKAHFPREGVFVSNGTHWFVTQRNFYEPQIITTDNTFVCGNCDVVIGIVNNTVYDPLQPELDSFKEELDKYFKNHTSPDVDLGDISGINASVVNIQKEIDRLNEVAKNLNESLIDLQELGKYEQYIKGGGGSDIDPYKEFGSSYQLLNFLPLDFFPDLNALVDTATALYEEELTGREHCSPHHTAIRQALVCWDELTKLIAWMSSNITSEQVRTIIVNHVNDTWGLKVRQSLWFHLSCLTFGQHTVQEFLVSFGVWIRTPAPYRPPNAPILSTLPEHTVIC

SEQ ID NO: 13852 - protein, 1359 aa, Artificial Sequence
  SARS-CoV-2/pangolin/Guangxi/P4L/2017__EPI_ISL_410538 spike protein (1-1205)(N908C_S1117C) WhcAg construct
MFVFLFVLPLVSSQCVNLTTRTGIPPGYTNSSTRGVYYPDKVFRSSILHLTQDLFLPFFSNVTWFNTINYQGGFKKFDNPVLPFNDGVYFASTEKSNIIRGWIFGTTLDARTQSLLIVNNATNVVIKVCEFQFCTDPFLGVYYHNNNKTWVENEFRVYSSANNCTFEYISQPFLMDLEGKQGNFKNLREFVFKNVDGYFKIYSKHTPIDLVRDLPRGFAALEPLVDLPIGINITRFQTLLALHRSYLTPGNLESGWTTGAAAYYVGYLQQRTFLLSYNQNGTITDAVDCSLDPLSETKCTLKSLTVEKGIYQTSNFRVQPTISIVRFPNITNLCPFGEVFNASKFASVYAWNRKRISNCVADYSVLYNSTSFSTFKCYGVSPTKLNDLCFTNVYADSFVVKGDEVRQIAPGQTGVIADYNYKLPDDFTGCVIAWNSVKQDALTGGNYGYLYRLFRKSKLKPFERDISTEIYQAGSTPCNGQVGLNCYYPLERYGFHPTTGVNYQPFRVVVLSFELLNGPATVCGPKLSTTLVKDKCVNFNFNGLTGTGVLTTSKKQFLPFQQFGRDISDTTDAVRDPQTLEILDITPCSFGGVSVITPGTNTSNQVAVLYQDVNCTEVPMAIHAEQLTPAWRVYSAGANVFQTRAGCLVGAEHVNNSYECDIPVGAGICASYHSMSSLRSVNQRSIIAYTMSLGAENSVAYSNNSIAIPTNFTISVTTEILPVSMTKTSVDCTMYICGDSIECSNLLLQYGSFCTQLNRALTGIAVEQDKNTQEVFAQVKQIYKTPPIKDFGGFNFSQILPDPSKPSKRSFIEDLLFNKVTLADAGFIKQYGDCLGDIAARDLICAQKFNGLTVLPPLLTDEMIAQYTSALLAGTITSGWTFGAGAALQIPFAMQMAYRFNGIGVTQCVLYENQKLIANQFNSAIGKIQDSLSSTASALGKLQDVVNQNAQALNTLVKQLSSNFGAISSVLNDILSRLDKVEAEVQIDRLITGRLQSLQTYVTQQLIRAAEIRASANLAATKMSECVLGQSKRVDFCGKGYHLMSFPQSAPHGVVFLHVTYVPAQEKNFTTAPAICHEGKAHFPREGVFVSNGTHWFITQRNFYEPQIITTDNTFVCGSCDVVIGIVNNTVYDPLQPELDSFKEELDKYFKNHTSPDVDLGDISGINASVVNIQKEIDRLNEVAKNLNESPIDLQELGKYEQYIKGGGGSDIDPYKEFGSSYQLLNFLPLDFFPDLNALVDTATALYEEELTGREHCSPHHTAIRQALVCWDELTKLIAWMSSNITSEQVRTIIVNHVNDTWGLKVRQSLWFHLSCLTFGQHTVQEFLVSFGVWIRTPAPYRPPNAPILSTLPEHTVIC

SEQ ID NO: 13853 - protein, 1359 aa, Artificial Sequence
  SARS-CoV-2/pangolin/Guangxi/P5L/2017__EPI_ISL_410540 spike protein (1-1205)(N908C_S1117C) WhcAg construct
MFVFLFVLPLVSSQCVNLTTRTGIPPGYTNSSTRGVYYPDKVFRSSILHLTQDLFLPFFSNVTWFNTINYQGGFKKFDNPVLPFNDGVYFASTEKSNIIRGWIFGTTLDARTQSLLIVNNATNVVIKVCEFQFCTDPFLGVYYHNNNKTWVENEFRVYSSANNCTFEYISQPFLMDLEGKQGNFKNLREFVFKNVDGYFKIYSKHTPIDLVRDLPRGFAALEPLVDLPIGINITRFQTLLALHRSYLTPGKLESGWTTGAAAYYVGYLQQRTFLLSYNQNGTITDAVDCSLDPLSETKCTLKSLTVEKGIYQTSNFRVQPTISIVRFPNITNLCPFGEVFNASKFASVYAWNRKRISNCVADYSVLYNSTSFSTFKCYGVSPTKLNDLCFTNVYADSFVVKGDEVRQIAPGQTGVIADYNYKLPDDFTGCVIAWNSVKQDALTGGNYGYLYRLFRKSKLKPFERDISTEIYQAGSTPCNGQVGLNCYYPLERYGFHPTTGVNYQPFRVVVLSFELLNGPATVCGPKLSTTLVKDKCVNFNFNGLTGTGVLTTSKKQFLPFQQFGRDISDTTDAVRDPQTLEILDITPCSFGGVSVITPGTNTSNQVAVLYQDVNCTEVPMAIHAEQLTPAWRVYSAGANVFQTRAGCLVGAEHVNNSYECDIPVGAGICASYHSMSSFRSVNQRSIIAYTMSLGAENSVAYSNNSIAIPTNFTISVTTEILPVSMTKTSVDCTMYICGDSIECSNLLLQYGSFCTQLNRALTGIAVEQDKNTQEVFAQVKQIYKTPPIKDFGGFNFSQILPDPSKPSKRSFIEDLLFNKVTLADAGFIKQYGDCLGDIAARDLICAQKFNGLTVLPPLLTDEMIAQYTSALLAGTITSGWTFGAGAALQIPFAMQMAYRFNGIGVTQCVLYENQKLIANQFNSAIGKIQDSLSSTASALGKLQDVVNQNAQALNTLVKQLSSNFGAISSVLNDILSRLDKVEAEVQIDRLITGRLQSLQTYVTQQLIRAAEIRASANLAATKMSECVLGQSKRVDFCGKGYHLMSFPQSAPHGVVFLHVTYVPAQEKNFTTAPAICHEGKAHFPREGVFVSNGTHWFITQRNFYEPQIITTDNTFVCGSCDVVIGIVNNTVYDPLQPELDSFKEELDKYFKNHTSPDVDLGDISGINASVVNIQKEIDRLNEVAKNLNESLIDLQELGKYEQYIKGGGGSDIDPYKEFGSSYQLLNFLPLDFFPDLNALVDTATALYEEELTGREHCSPHHTAIRQALVCWDELTKLIAWMSSNITSEQVRTIIVNHVNDTWGLKVRQSLWFHLSCLTFGQHTVQEFLVSFGVWIRTPAPYRPPNAPILSTLPEHTVIC

SEQ ID NO: 13854 - protein, 1359 aa, Artificial Sequence
  SARS-CoV-2/pangolin/Guangxi/P5E/2017__EPI_ISL_410541 spike protein (1-1205)(N908C_S1117C) WhcAg construct
MFVFLFVLPLVSSQCVNLTTRTGIPPGYTNSSTRGVYYPDKVFRSSILHLTQDLFLPFFSNVTWFNTITYQGGSKKFDNPVLPFNDGVYFASTEKSNIIRGWIFGTTLDARTQSLLIVNNATNVVIKVCEFQFCTDPFLGVYYHNNNKTWVENEFRVYSSANNCTFEYISQPFLMDLEGKQGNFKNLREFVFKNVDGYFKIYSKHTPIDLVRDLPRGFAALEPLVDLPIGINITRFQTLLALHRSYLTPGKLESGWTTGAAAYYVGYLQQRTFLLSYNQNGTITDAVDCSLDPLSETKCTLKSLTVEKGIYQTSNFRVQPTISIVRFPNITNLCPFGEVFNASKFASVYAWNRKRISNCVADYSVLYNSTSFSTFKCYGVSPTKLNDLCFTNVYADSFVVKGDEVRQIAPGQTGVIADYNYKLPDDFTGCVIAWNSVKQDALTGDNYGYLYRLFRKSKLKPFERDISTEIYQAGSTPCNGQVGLNCYYPLERYGFHPTTGVNYQPFRVVVLSFELLNGPATVCGPKLSTTLVKDKCVNFNFNGLTGTGVLTTSKKQFLPFQQFGRDISDTTDAVRDPQTLEILDITPCSFGGVSVITPGTNTSNQVAVLYQDVNCTEVPMAIHAEQLTPAWRVYSAGANVFQTRAGCLVGAEHVNNSYECDIPVGAGICASYHSMSSFRSVNQRSIIAYTMSLGAENSVAYSNNSIAIPTNFTISVTTEILPVSMTKTSVDCTMYICGDSIECSNLLLQYGSFCTQLNRALTGIAVEQDKNTQEVFAQVKQIYKTPPIKDFGGFNFSQILPDPSKPSKRSFIEDLLFNKVTLADAGFIKQYGDCLGDIAARDLICAQKFNGLTVLPPLLTDEMIAQYTSALLAGTITSGWTFGAGAALQIPFAMQMAYRFNGIGVTQCVLYENQKLIANQFNSAIGKIQDSLSSTASALGKLQDVVNQNAQALNTLVKQLSSNFGAISSVLNDILSRLDKVEAEVQIDRLITGRLQSLQTYVTQQLIRAAEIRASANLAATKMSECVLGQSKRVDFCGKGYHLMSFPQSAPHGVVFLHVTYVPAQEKNFTTAPAICHEGKAHFPREGVFVSNGTHWFITQRNFYEPQIITTDNTFVCGSCDVVIGIVNNTVYDPLQPELDSFKEELDKYFKNHTSPDVDLGDISGINASVVNIQKEIDRLNEVAKNLNESLIDLQELGKYEQYIKGGGGSDIDPYKEFGSSYQLLNFLPLDFFPDLNALVDTATALYEEELTGREHCSPHHTAIRQALVCWDELTKLIAWMSSNITSEQVRTIIVNHVNDTWGLKVRQSLWFHLSCLTFGQHTVQEFLVSFGVWIRTPAPYRPPNAPILSTLPEHTVIC

SEQ ID NO: 13855 - protein, 1357 aa, Artificial Sequence
  SARS-CoV-2/pangolin/Guangxi/P1E/2017__EPI_ISL_410539 spike protein (1-1203)(N906C_S1115C) WhcAg construct
MFVFLFVLPLVSSQCVNLTTRTGIQPGYTNSSTRGVYYPDKVFRSSILHLTQDLFLPFFSNVTWFNTINYQGGFKKFDNPVLPFNDGVYFASTEKSNIIRGWIFGTTLDARTQSLLIVNNATNVVIKVCEFQFCTDPFLGVYYHNNNKTWVENEFRVYSSANNCTFEYISQPFLMDLEGKQGNFKNLREFVFKNVDGYFKIYSKHTPIDLVRDLPRGFAALEPLVDLPIGINITRFQTLLALHRSYLTPGKLESGWTTGAAAYYVGYLQQRTFLLSYNQNGTITDAVDCSLDPLSETKCTLKSLTVEKGIYQTSNFRVQPTISIVRFPNITNLCPFGEVFNASKFASVYAWNRKRISNCVADYSVLYNSTSFSTFKCYGVSPTKLNDLCFTNVYADSFVVKGDEVRQIAPGQTGVIADYNYKLPDDFTGCVIAWNSVKQDALTGGNYLYRLFRKSKLKPFERDISTEIYQAGSTPCNGQVGLNCYYPLERYGFHPTTGVNYQPFRVVVLSFELLNGPATVCGPKLSTTLVKDKCVNFNFNGLTGTGVLTTSKKQFLPFQQFGRDISDTTDAVRDPQTLEILDITPCSFGGVSVITPGTNTSNQVAVLYQDVNCTEVPMAIHAEQLTPAWRVYSAGANVFQTRAGCLVGAEHVNNSYECDIPVGAGICASYHSMSSLRSVNQRSIIAYTMSLGAENSVAYSNNSIAIPTNFTISVTTEILPVSMTKTSVDCTMYICGDSIECSNLLLQYGSFCTQLNRALTGIAVEQDKNTQEVFAQVKQIYKTPPIKDFGGFNFSQILPDPSKPSKRSFIEDLLFNKVTLADAGFIKQYGDCLGDIAARDLICAQKFNGLTVLPPLLTDEMIAQYTSALLAGTITSGWTFGAGAALQIPFAMQMAYRFNGIGVTQCVLYENQKLIANQFNSAIGKIQDSLSSTASALGKLQDVVNQNAQALNTLVKQLSSNFGAISSVLNDILSRLDKVEAEVQIDRLITGRLQSLQTYVTQQLIRAAEIRASANLAATKMSECVLGQSKRVDFCGKGYHLMSFPQSAPHGVVFLHVTYVPAQEKNFTTAPAICHEGKAHFPREGVFVSNGTHWFITQRNFYEPQIITTDNTFVCGSCDVVIGIVNNTVYDPLQPELDSFKEELDKYFKNHTSPDVDLGDISGINASVVNIQKEIDRLNEVAKNLNESLIDLQELGKYEQYIKGGGGSDIDPYKEFGSSYQLLNFLPLDFFPDLNALVDTATALYEEELTGREHCSPHHTAIRQALVCWDELTKLIAWMSSNITSEQVRTIIVNHVNDTWGLKVRQSLWFHLSCLTFGQHTVQEFLVSFGVWIRTPAPYRPPNAPILSTLPEHTVIC

SEQ ID NO: 13856 - protein, 1307 aa, Artificial Sequence
  SARS-CoV-2/Wuhan/WIV05/2019__EPI_ISL_402128 spike protein (1-1147)(N914C_S1123C) LumSynth construct
MFVFLVLLPLVSSQCVNLTTRTQLPPAYTNSFTRGVYYPDKVFRSSVLHSTQDLFLPFFSNVTWFHAIHVSGTNGTKRFDNPVLPFNDGVYFASTEKSNIIRGWIFGTTLDSKTQSLLIVNNATNVVIKVCEFQFCNDPFLGVYYHKNNKSWMESEFRVYSSANNCTFEYVSQPFLMDLEGKQGNFKNLREFVFKNIDGYFKIYSKHTPINLVRDLPQGFSALEPLVDLPIGINITRFQTLLALHRSYLTPGDSSSGWTAGAAAYYVGYLQPRTFLLKYNENGTITDAVDCALDPLSETKCTLKSFTVEKGIYQTSNFRVQPTESIVRFPNITNLCPFGEVFNATRFASVYAWNRKRISNCVADYSVLYNSASFSTFKCYGVSPTKLNDLCFTNVYADSFVIRGDEVRQIAPGQTGKIADYNYKLPDDFTGCVIAWNSNNLDSKVGGNYNYLYRLFRKSNLKPFERDISTEIYQAGSTPCNGVEGFNCYFPLQSYGFQPTNGVGYQPYRVVVLSFELLHAPATVCGPKKSTNLVKNKCVNFNFNGLTGTGVLTESNKKFLPFQQFGRDIADTTDAVRDPQTLEILDITPCSFGGVSVITPGTNTSNQVAVLYQDVNCTEVPVAIHADQLTPTWRVYSTGSNVFQTRAGCLIGAEHVNNSYECDIPIGAGICASYQTQTNSPRRARSVASQSIIAYTMSLGAENSVAYSNNSIAIPTNFTISVTTEILPVSMTKTSVDCTMYICGDSTECSNLLLQYGSFCTQLNRALTGIAVEQDKNTQEVFAQVKQIYKTPPIKDFGGFNFSQILPDPSKPSKRSFIEDLLFNKVTLADAGFIKQYGDCLGDIAARDLICAQKFNGLTVLPPLLTDEMIAQYTSALLAGTITSGWTFGAGAALQIPFAMQMAYRFNGIGVTQCVLYENQKLIANQFNSAIGKIQDSLSSTASALGKLQDVVNQNAQALNTLVKQLSSNFGAISSVLNDILSRLDKVEAEVQIDRLITGRLQSLQTYVTQQLIRAAEIRASANLAATKMSECVLGQSKRVDFCGKGYHLMSFPQSAPHGVVFLHVTYVPAQEKNFTTAPAICHDGKAHFPREGVFVSNGTHWFVTQRNFYEPQIITTDNTFVCGNCDVVIGIVNNTVYDPLQPELDSGGGSGGGQIYEGKLTAEGLRFGIVASRFNHALVDRLVEGAIDAIVRHGGREEDITLVRVPGSWEIPVAAGELARKEDIDAVIAIGVLIRGATPHFDYIASEVSKGLADLSLELRKPITFGVITADTLEQAIERAGTKHGNKGWEAALSAIEMANLFKSLR

SEQ ID NO: 13857 - protein, 1303 aa, Artificial Sequence
  SARS-CoV-2/bat/Yunnan/RaTG13/2013__EPI_ISL_402131 spike protein (1-1143)(N910C_S1119C) LumSynth construct
MFVFLVLLPLVSSQCVNLTTRTQLPPAYTNSSTRGVYYPDKVFRSSVLHLTQDLFLPFFSNVTWFHAIHVSGTNGIKRFDNPVLPFNDGVYFASTEKSNIIRGWIFGTTLDSKTQSLLIVNNATNVVIKVCEFQFCNDPFLGVYYHKNNKSWMESEFRVYSSANNCTFEYVSQPFLMDLEGKQGNFKNLREFVFKNIDGYFKIYSKHTPINLVRDLPPGFSALEPLVDLPIGINITRFQTLLALHRSYLTPGDSSSGWTAGAAAYYVGYLQPRTFLLKYNENGTITDAVDCALDPLSETKCTLKSFTVEKGIYQTSNFRVQPTDSIVRFPNITNLCPFGEVFNATTFASVYAWNRKRISNCVADYSVLYNSTSFSTFKCYGVSPTKLNDLCFTNVYADSFVITGDEVRQIAPGQTGKIADYNYKLPDDFTGCVIAWNSKHIDAKEGGNFNYLYRLFRKANLKPFERDISTEIYQAGSKPCNGQTGLNCYYPLYRYGFYPTDGVGHQPYRVVVLSFELLNAPATVCGPKKSTNLVKNKCVNFNFNGLTGTGVLTESNKKFLPFQQFGRDIADTTDAVRDPQTLEILDITPCSFGGVSVITPGTNASNQVAVLYQDVNCTEVPVAIHADQLTPTWRVYSTGSNVFQTRAGCLIGAEHVNNSYECDIPIGAGICASYQTQTNSRSVASQSIIAYTMSLGAENSVAYSNNSIAIPTNFTISVTTEILPVSMTKTSVDCTMYICGDSTECSNLLLQYGSFCTQLNRALTGIAVEQDKNTQEVFAQVKQIYKTPPIKDFGGFNFSQILPDPSKPSKRSFIEDLLFNKVTLADAGFIKQYGDCLGDIAARDLICAQKFNGLTVLPPLLTDEMIAQYTSALLAGTITSGWTFGAGAALQIPFAMQMAYRFNGIGVTQCVLYENQKLIANQFNSAIGKIQDSLSSTASALGKLQDVVNQNAQALNTLVKQLSSNFGAISSVLNDILSRLDKVEAEVQIDRLITGRLQSLQTYVTQQLIRAAEIRASANLAATKMSECVLGQSKRVDFCGKGYHLMSFPQSAPHGVVFLHVTYVPAQEKNFTTAPAICHDGKAHFPREGVFVSNGTHWFVTQRNFYEPQIITTDNTFVCGSCDVVIGIVNNTVYDPLQPELDSGGGSGGGQIYEGKLTAEGLRFGIVASRFNHALVDRLVEGAIDAIVRHGGREEDITLVRVPGSWEIPVAAGELARKEDIDAVIAIGVLIRGATPHFDYIASEVSKGLADLSLELRKPITFGVITADTLEQAIERAGTKHGNKGWEAALSAIEMANLFKSLR

SEQ ID NO: 13858 - protein, 1307 aa, Artificial Sequence
  SARS-CoV-2/Wuhan/HBCDC-HB-01/2019__EPI_ISL_402132 spike protein (1-1147)(N914C_S1123C) LumSynth construct
MFVFLVLLPLVSSQCVNLTTRTQLPPAYTNSITRGVYYPDKVFRSSVLHSTQDLFLPFFSNVTWFHAIHVSGTNGTKRFDNPVLPFNDGVYFASTEKSNIIRGWIFGTTLDSKTQSLLIVNNATNVVIKVCEFQFCNDPFLGVYYHKNNKSWMESEFRVYSSANNCTFEYVSQPFLMDLEGKQGNFKNLREFVFKNIDGYFKIYSKHTPINLVRDLPQGFSALEPLVDLPIGINITRFQTLLALHRSYLTPGDSSSGWTAGAAAYYVGYLQPRTFLLKYNENGTITDAVDCALDPLSETKCTLKSFTVEKGIYQTSNFRVQPTESIVRFPNITNLCPFGEVFNATRFASVYAWNRKRISNCVADYSVLYNSASFSTFKCYGVSPTKLNDLCFTNVYADSFVIRGDEVRQIAPGQTGKIADYNYKLPDDFTGCVIAWNSNNLDSKVGGNYNYLYRLFRKSNLKPFERDISTEIYQAGSTPCNGVEGFNCYFPLQSYGFQPTNGVGYQPYRVVVLSFELLHAPATVCGPKKSTNLVKNKCVNFNFNGLTGTGVLTESNKKFLPFQQFGRDIADTTDAVRDPQTLEILDITPCSFGGVSVITPGTNTSNQVAVLYQDVNCTEVPVAIHADQLTPTWRVYSTGSNVFQTRAGCLIGAEHVNNSYECDIPIGAGICASYQTQTNSPRRARSVASQSIIAYTMSLGAENSVAYSNNSIAIPTNFTISVTTEILPVSMTKTSVDCTMYICGDSTECSNLLLQYGSFCTQLNRALTGIAVEQDKNTQEVFAQVKQIYKTPPIKDFGGFNFSQILPDPSKPSKRSFIEDLLFNKVTLADAGFIKQYGDCLGDIAARDLICAQKFNGLTVLPPLLTDEMIAQYTSALLAGTITSGWTFGAGAALQIPFAMQMAYRFNGIGVTQCVLYENQKLIANQFNSAIGKIQDSLSSTASALGKLQDVVNQNAQALNTLVKQLSSNFGAISSVLNDILSRLDKVEAEVQIDRLITGRLQSLQTYVTQQLIRAAEIRASANLAATKMSECVLGQSKRVDFCGKGYHLMSFPQSAPHGVVFLHVTYVPAQEKNFTTAPAICHDGKAHFPREGVFVSNGTHWFVTQRNFYEPQIITTDNTFVCGNCDVVIGIVNNTVYDPLQPELDSGGGSGGGQIYEGKLTAEGLRFGIVASRFNHALVDRLVEGAIDAIVRHGGREEDITLVRVPGSWEIPVAAGELARKEDIDAVIAIGVLIRGATPHFDYIASEVSKGLADLSLELRKPITFGVITADTLEQAIERAGTKHGNKGWEAALSAIEMANLFKSLR

SEQ ID NO: 13859 - protein, 1307 aa, Artificial Sequence
  SARS-CoV-2/Guangdong/20SF028/2020__EPI_ISL_403936 spike protein (1-1147)(N914C_S1123C) LumSynth construct
MFVFLVLLPLVSSQCVNLTTRTQLPPAYTNSFTRGVYYPDKVFRSSVLYSTQDLFLPFFSNVTWFHAIHVSGTNGTKRFDNPVLPFNDGVYFASTEKSNIIRGWIFGTTLDSKTQSLLIVNNATNVVIKVCEFQFCNDPFLGVYYHKNNKSWMESEFRVYSSANNCTFEYVSQPFLMDLEGKQGNFKNLREFVFKNIDGYFKIYSKHTPINLVRDLPQGFSALEPLVDLPIGINITRFQTLLALHRSYLTPGDSSSGWTAGAAAYYVGYLQPRTFLLKYNENGTITDAVDCALDPLSETKCTLKSFTVEKGIYQTSNFRVQPTESIVRFPNITNLCPFGEVFNATRFASVYAWNRKRISNCVADYSVLYNSASFSTFKCYGVSPTKLNDLCFTNVYADSFVIRGDEVRQIAPGQTGKIADYNYKLPDDFTGCVIAWNSNNLDSKVGGNYNYLYRLFRKSNLKPFERDISTEIYQAGSTPCNGVEGFNCYFPLQSYGFQPTNGVGYQPYRVVVLSFELLHAPATVCGPKKSTNLVKNKCVNFNFNGLTGTGVLTESNKKFLPFQQFGRDIADTTDAVRDPQTLEILDITPCSFGGVSVITPGTNTSNQVAVLYQDVNCTEVPVAIHADQLTPTWRVYSTGSNVFQTRAGCLIGAEHVNNSYECDIPIGAGICASYQTQTNSPRRARSVASQSIIAYTMSLGAENSVAYSNNSIAIPTNFTISVTTEILPVSMTKTSVDCTMYICGDSTECSNLLLQYGSFCTQLNRALTGIAVEQDKNTQEVFAQVKQIYKTPPIKDFGGFNFSQILPDPSKPSKRSFIEDLLFNKVTLADAGFIKQYGDCLGDIAARDLICAQKFNGLTVLPPLLTDEMIAQYTSALLAGTITSGWTFGAGAALQIPFAMQMAYRFNGIGVTQCVLYENQKLIANQFNSAIGKIQDSLSSTASALGKLQDVVNQNAQALNTLVKQLSSNFGAISSVLNDILSRLDKVEAEVQIDRLITGRLQSLQTYVTQQLIRAAEIRASANLAATKMSECVLGQSKRVDFCGKGYHLMSFPQSAPHGVVFLHVTYVPAQEKNFTTAPAICHDGKAHFPREGVFVSNGTHWFVTQRNFYEPQIITTDNTFVCGNCDVVIGIVNNTVYDPLQPELDSGGGSGGGQIYEGKLTAEGLRFGIVASRFNHALVDRLVEGAIDAIVRHGGREEDITLVRVPGSWEIPVAAGELARKEDIDAVIAIGVLIRGATPHFDYIASEVSKGLADLSLELRKPITFGVITADTLEQAIERAGTKHGNKGWEAALSAIEMANLFKSLR

SEQ ID NO: 13860 - protein, 1307 aa, Artificial Sequence
  SARS-CoV-2/Shenzhen/SZTH-001/2020__EPI_ISL_406592 spike protein (1-1147)(N914C_S1123C) LumSynth construct
MFVFLVLLPLVSSQCVNLTTRTQLPPAYTNSFTRGVYYPDKVFRSSVLHSTQDLFLPFFSNVTWFHAIHVSGTNGTKRFDNPVLPFNDGVYFASTEKSNIIRGWIFGTTLDSKTQSLLIVNNATNVVIKVCEFQFCNDPFLGVYYHKNNKSWMESEFRVYSSANNCTFEYVSQPFLMDLEGKQGNFKNLREFVFKNIDGYFKIYSKHTPINLVRDLPQGFSALEPLVDLPIGINITRFQTLLALHRSYLTPGDSSSGWTAGAAAYYVGYLQPRTFLLKYNENGTITDAVDCALDPLSETKCTLKSFTVEKGIYQTSNFRVQPTESIVRFPNITNLCPFGEVFNATRFASVYAWNRKRISNCVADYSVLYNSASFSTFKCYGVSPTKLNDLCFTNVYADSFVIRGDEVRQIAPGQTGKIADYNYKLPDDFTGCVIAWNSNNLDSKVGGNYNYLYRLFRKSNLKPFERDISTEIYQAGSTPCNGVEGFNCYFPLQSYGFQPTNGVGYQPYRVVVLSFELLHAPATVCGPKKSTNLVKNKCVNFNFNGLTGTGVLTESNKKFLPFQQFGRDIADTTDAVRDPQTLEILDITPCSFGGVSVITPGTNTSNQVAVLYQDVNCTEVPVAIHADQLTPTWRVYSTGSNVFQTRAGCLIGAEHVNNSYECDIPIGAGICASYQTQTNSPRRARSVASQSIIAYTMSLGAENSVAYSNNSIAIPTNFTISVTTEILPVSMTKTSVDCTMYICGDSTECSNLLLQYGSFCTQLNRALTGIAVEQDKNTQEVFAQVKQIYKTPPIKDFGGFNFSQILPDPSKPSKRSFIEDLLFNKVTLADAGFIKQYGDCLGDIAARDLICAQKFNGLTVLPPLLTDEMIAQYTSALLAGTITSGWTFGAGAALQIPFAMQMAYRFNGIGVTQCVLYENQKLIANQFNSAIGKIQDSLSSTASALGKLQDVVNQNAQALNTLVKQLSSNFGAISSVLNDILSRLDKVEAEVQIDRLITGRLQSLQTYVTQQLIRAAEIRASANLAATKMSECVLGQSKRVDFCGKGYHLMSFPQSAPHGVVFLHVTYVPAQEKNFTTAPAICHDGKAHFPREGVFVSNGTHWFVTQRNFYEPQIITTDNTFVCGNCDVLIGIVNNTVYDPLQPELDSGGGSGGGQIYEGKLTAEGLRFGIVASRFNHALVDRLVEGAIDAIVRHGGREEDITLVRVPGSWEIPVAAGELARKEDIDAVIAIGVLIRGATPHFDYIASEVSKGLADLSLELRKPITFGVITADTLEQAIERAGTKHGNKGWEAALSAIEMANLFKSLR

SEQ ID NO: 13861 - protein, 1307 aa, Artificial Sequence
  SARS-CoV-2/Shenzhen/SZTH-004/2020__EPI_ISL_406595 spike protein (1-1147)(N914C_S1123C) LumSynth construct
MFVFLVLLPLVSSQCVNLTTRTQLPPAYTNSFTRGVYYPDKVFRSSVLHSTQDLFLPFFSNVTWFHAIHVSGTNGTKRFDNPVLPFNDGVYFASTEKSNIIRGWIFGTTLDSKTQSLLIVNNATNVVIKVCEFQFCNDPFLGVYYHKNNKSWMESEFRVYSSANNCTFEYVSQPFLMDLEGKQGNFKNLREFVFKNIDGYFKIYSKHTPINLVRDLPQGFSALEPLVDLPIGINITRFQTLLALHRSYLTPGDSSSGWTAGAAAYYVGYLQPRTFLLKYNENGTITDAVDCALDPLSETKCTLKSFTVEKGIYQTSNFRVQPTESIVRFPNITNLCPFGEVFNATRFASVYAWDRKRISNCVAYYSVLYNSASFSTFKCYGVSPTKLNDLCFTNVYADSFVIRGDEVRQIAPGQTGKIADYNYKLPDDFTGCVIAWNSNNLDSKVGGNYNYLYRLFRKSNLKPFERDISTEIYQAGSTPCNGVEGFNCYFPLQSYGFQPTNGVGYQPYRVVVLSFELLHAPATVCGPKKSTNLVKNKCVNFNFNGLTGTGVLTESNKKFLPFQQFGRDIADTTDAVRDPQTLEILDITPCSFGGVSVITPGTNTSNQVAVLYQDVNCTEVPVAIHADQLTPTWRVYSTGSNVFQTRAGCLIGAEHVNNSYECDIPIGAGICASYQTQTNSPRRARSVASQSIIAYTMSLGAENSVAYSNNSIAIPTNFTISVTTEILPVSMTKTSVDCTMYICGDSTECSNLLLQYGSFCTQLNRALTGIAVEQDKNTQEVFAQVKQIYKTPPIKDFGGFNFSQILPDPSKPSKRSFIEDLLFNKVTLADAGFIKQYGDCLGDIAARDLICAQKFNGLTVLPPLLTDEMIAQYTSALLAGTITSGWTFGAGAALQIPFAMQMAYRFNGIGVTQCVLYENQKLIANQFNSAIGKIQDSLSSTASALGKLQDVVNQNAQALNTLVKQLSSNFGAISSVLNDILSRLDKVEAEVQIDRLITGRLQSLQTYVTQQLIRAAEIRASANLAATKMSECVLGQSKRVDFCGKGYHLMSFPQSAPHGVVFLHVTYVPAQEKNFTTAPAICHDGKAHFPREGVFVSNGTHWFVTQRNFYEPQIITTDNTFVCGNCDVVIGIVNNTVYDPLQPELDSGGGSGGGQIYEGKLTAEGLRFGIVASRFNHALVDRLVEGAIDAIVRHGGREEDITLVRVPGSWEIPVAAGELARKEDIDAVIAIGVLIRGATPHFDYIASEVSKGLADLSLELRKPITFGVITADTLEQAIERAGTKHGNKGWEAALSAIEMANLFKSLR

SEQ ID NO: 13862 - protein, 1307 aa, Artificial Sequence
  SARS-CoV-2/France/IDF0372/2020__EPI_ISL_406596 spike protein (1-1147)(N914C_S1123C) LumSynth construct
MFVFLVLLPLVSSQCVNLTTRTQLPPAYTNSFTRGVYYPDKVFRSSVLHSTQDLFLPFFSNVTWFHAIHVSGTNGTKRFDNPVLPFNDGVYFASTEKSNIIRGWIFGTTLDSKTQSLLIVNNATNVVIKVCEFQFCNDPFLGVYYHKNNKSWMESEFRVYSSANNCTFEYVSQPFLMDLEGKQGNFKNLREFVFKNIDGYFKIYSKHTPINLVRDLPQGFSALEPLVDLPIGINITRFQTLLALHRSYLTPGDSSSGWTAGAAAYYVGYLQPRTFLLKYNENGTITDAVDCALDPLSETKCTLKSFTVEKGIYQTSNFRVQPTESIVRFPNITNLCPFGEVFNATRFASVYAWNRKRISNCVADYSFLYNSASFSTFKCYGVSPTKLNDLCFTNVYADSFVIRGDEVRQIAPGQTGKIADYNYKLPDDFTGCVIAWNSNNLDSKVGGNYNYLYRLFRKSNLKPFERDISTEIYQAGSTPCNGVEGFNCYFPLQSYGFQPTNGVGYQPYRVVVLSFELLHAPATVCGPKKSTNLVKNKCVNFNFNGLTGTGVLTESNKKFLPFQQFGRDIADTTDAVRDPQTLEILDITPCSFGGVSVITPGTNTSNQVAVLYQDVNCTEVPVAIHADQLTPTWRVYSTGSNVFQTRAGCLIGAEHVNNSYECDIPIGAGICASYQTQTNSPRRARSVASQSIIAYTMSLGAENSVAYSNNSIAIPTNFTISVTTEILPVSMTKTSVDCTMYICGDSTECSNLLLQYGSFCTQLNRALTGIAVEQDKNTQEVFAQVKQIYKTPPIKDFGGFNFSQILPDPSKPSKRSFIEDLLFNKVTLADAGFIKQYGDCLGDIAARDLICAQKFNGLTVLPPLLTDEMIAQYTSALLAGTITSGWTFGAGAALQIPFAMQMAYRFNGIGVTQCVLYENQKLIANQFNSAIGKIQDSLSSTASALGKLQDVVNQNAQALNTLVKQLSSNFGAISSVLNDILSRLDKVEAEVQIDRLITGRLQSLQTYVTQQLIRAAEIRASANLAATKMSECVLGQSKRVDFCGKGYHLMSFPQSAPHGVVFLHVTYVPAQEKNFTTAPAICHDGKAHFPREGVFVSNGTHWFVTQRNFYEPQIITTDNTFVCGNCDVVIGIVNNTVYDPLQPELDSGGGSGGGQIYEGKLTAEGLRFGIVASRFNHALVDRLVEGAIDAIVRHGGREEDITLVRVPGSWEIPVAAGELARKEDIDAVIAIGVLIRGATPHFDYIASEVSKGLADLSLELRKPITFGVITADTLEQAIERAGTKHGNKGWEAALSAIEMANLFKSLR

SEQ ID NO: 13863 - protein, 1307 aa, Artificial Sequence
  SARS-CoV-2/Australia/VIC01/2020__EPI_ISL_406844 spike protein (1-1147)(N914C_S1123C) LumSynth construct
MFVFLVLLPLVSSQCVNLTTRTQLPPAYTNSFTRGVYYPDKVFRSSVLHSTQDLFLPFFSNVTWFHAIHVSGTNGTKRFDNPVLPFNDGVYFASTEKSNIIRGWIFGTTLDSKTQSLLIVNNATNVVIKVCEFQFCNDPFLGVYYHKNNKSWMESEFRVYSSANNCTFEYVSQPFLMDLEGKQGNFKNLREFVFKNIDGYFKIYSKHTPINLVRDLPQGFSALEPLVDLPIGINITRFQTLLALHRRYLTPGDSSSGWTAGAAAYYVGYLQPRTFLLKYNENGTITDAVDCALDPLSETKCTLKSFTVEKGIYQTSNFRVQPTESIVRFPNITNLCPFGEVFNATRFASVYAWNRKRISNCVADYSVLYNSASFSTFKCYGVSPTKLNDLCFTNVYADSFVIRGDEVRQIAPGQTGKIADYNYKLPDDFTGCVIAWNSNNLDSKVGGNYNYLYRLFRKSNLKPFERDISTEIYQAGSTPCNGVEGFNCYFPLQSYGFQPTNGVGYQPYRVVVLSFELLHAPATVCGPKKSTNLVKNKCVNFNFNGLTGTGVLTESNKKFLPFQQFGRDIADTTDAVRDPQTLEILDITPCSFGGVSVITPGTNTSNQVAVLYQDVNCTEVPVAIHADQLTPTWRVYSTGSNVFQTRAGCLIGAEHVNNSYECDIPIGAGICASYQTQTNSPRRARSVASQSIIAYTMSLGAENSVAYSNNSIAIPTNFTISVTTEILPVSMTKTSVDCTMYICGDSTECSNLLLQYGSFCTQLNRALTGIAVEQDKNTQEVFAQVKQIYKTPPIKDFGGFNFSQILPDPSKPSKRSFIEDLLFNKVTLADAGFIKQYGDCLGDIAARDLICAQKFNGLTVLPPLLTDEMIAQYTSALLAGTITSGWTFGAGAALQIPFAMQMAYRFNGIGVTQCVLYENQKLIANQFNSAIGKIQDSLSSTASALGKLQDVVNQNAQALNTLVKQLSSNFGAISSVLNDILSRLDKVEAEVQIDRLITGRLQSLQTYVTQQLIRAAEIRASANLAATKMSECVLGQSKRVDFCGKGYHLMSFPQSAPHGVVFLHVTYVPAQEKNFTTAPAICHDGKAHFPREGVFVSNGTHWFVTQRNFYEPQIITTDNTFVCGNCDVVIGIVNNTVYDPLQPELDSGGGSGGGQIYEGKLTAEGLRFGIVASRFNHALVDRLVEGAIDAIVRHGGREEDITLVRVPGSWEIPVAAGELARKEDIDAVIAIGVLIRGATPHFDYIASEVSKGLADLSLELRKPITFGVITADTLEQAIERAGTKHGNKGWEAALSAIEMANLFKSLR

SEQ ID NO: 13864 - protein, 1307 aa, Artificial Sequence
  SARS-CoV-2/Germany/BavPat1/2020__EPI_ISL_406862 spike protein (1-1147)(N914C_S1123C) LumSynth construct
MFVFLVLLPLVSSQCVNLTTRTQLPPAYTNSFTRGVYYPDKVFRSSVLHSTQDLFLPFFSNVTWFHAIHVSGTNGTKRFDNPVLPFNDGVYFASTEKSNIIRGWIFGTTLDSKTQSLLIVNNATNVVIKVCEFQFCNDPFLGVYYHKNNKSWMESEFRVYSSANNCTFEYVSQPFLMDLEGKQGNFKNLREFVFKNIDGYFKIYSKHTPINLVRDLPQGFSALEPLVDLPIGINITRFQTLLALHRSYLTPGDSSSGWTAGAAAYYVGYLQPRTFLLKYNENGTITDAVDCALDPLSETKCTLKSFTVEKGIYQTSNFRVQPTESIVRFPNITNLCPFGEVFNATRFASVYAWNRKRISNCVADYSVLYNSASFSTFKCYGVSPTKLNDLCFTNVYADSFVIRGDEVRQIAPGQTGKIADYNYKLPDDFTGCVIAWNSNNLDSKVGGNYNYLYRLFRKSNLKPFERDISTEIYQAGSTPCNGVEGFNCYFPLQSYGFQPTNGVGYQPYRVVVLSFELLHAPATVCGPKKSTNLVKNKCVNFNFNGLTGTGVLTESNKKFLPFQQFGRDIADTTDAVRDPQTLEILDITPCSFGGVSVITPGTNTSNQVAVLYQGVNCTEVPVAIHADQLTPTWRVYSTGSNVFQTRAGCLIGAEHVNNSYECDIPIGAGICASYQTQTNSPRRARSVASQSIIAYTMSLGAENSVAYSNNSIAIPTNFTISVTTEILPVSMTKTSVDCTMYICGDSTECSNLLLQYGSFCTQLNRALTGIAVEQDKNTQEVFAQVKQIYKTPPIKDFGGFNFSQILPDPSKPSKRSFIEDLLFNKVTLADAGFIKQYGDCLGDIAARDLICAQKFNGLTVLPPLLTDEMIAQYTSALLAGTITSGWTFGAGAALQIPFAMQMAYRFNGIGVTQCVLYENQKLIANQFNSAIGKIQDSLSSTASALGKLQDVVNQNAQALNTLVKQLSSNFGAISSVLNDILSRLDKVEAEVQIDRLITGRLQSLQTYVTQQLIRAAEIRASANLAATKMSECVLGQSKRVDFCGKGYHLMSFPQSAPHGVVFLHVTYVPAQEKNFTTAPAICHDGKAHFPREGVFVSNGTHWFVTQRNFYEPQIITTDNTFVCGNCDVVIGIVNNTVYDPLQPELDSGGGSGGGQIYEGKLTAEGLRFGIVASRFNHALVDRLVEGAIDAIVRHGGREEDITLVRVPGSWEIPVAAGELARKEDIDAVIAIGVLIRGATPHFDYIASEVSKGLADLSLELRKPITFGVITADTLEQAIERAGTKHGNKGWEAALSAIEMANLFKSLR

SEQ ID NO: 13865 - protein, 1307 aa, Artificial Sequence
  SARS-CoV-2/Wuhan/HBCDC-HB-02/2020__EPI_ISL_412978 spike protein (1-1147)(N914C_S1123C) LumSynth construct
MFVFLVLLPLVSSQCVNLTTRTQLPPAYTNSFTRGVYYPDKVFRSSVLHSTQDLFLPFFSNVTWFHAIHVSGTNGTKRFDNPVLPFNDGVYFASTEKSNIIRGWIFGTTLDSKTQSLLIVNNATNVVIKVCEFQFCNDPFLGVYYHKNNKSWMESEFRVYSSANNCTFEYVSQPFLMDLEGKQGNFKNLREFVFKNIDGYFKIYSKHTPINLVRDLPQGFSALEPLVDLPIGINITRFQTLLALHRSYLTPGDSSSGWTAGAAAYYVGYLQPRTFLLKYNENGTITDAVDCALDPLSETKCTLKSFTVEKGIYQTSNFRVQPTESIVRFPNITNLCPFGEVFNATRFASVYAWNRKRISNCVADYSVLYNSASFSTFKCYGVSPTKLNDLCFTNVYADSFVIRGDEVRQIAPGQTGKIADYNYKLPDDFTGCVIAWNSNNLDSKVGGNYNYLYRLFRKSNLKPFERDISTEIYQAGSTPCNGVEGFNCYFPLQSYGFQPTNGVGYQPYRVVVLSFELLHAPATVCGPKKSTNLVKNKCVNFNFNGLTGTGVLTESNKKFLPFQQFGRDIADTTDAVRDPQTLEILDITPCSFGGVSVITPGTNTSNQVAVLYQDVNCTEVPVAIHADQLTPTWRVYSTGSNVFQTRAGCLIGAEHVNNSYECDIPIGAGICASYQTQTNSPRRARSVASQSIIAYTMSLGAENSVAYSNNSIAIPTNFTISVTTEILPVSMTKTSVDCTMYICGDSTECSNFLLQYGSFCTQLNRALTGIAVEQDKNTQEVFAQVKQIYKTPPIKDFGGFNFSQILPDPSKPSKRSFIEDLLFNKVTLADAGFIKQYGDCLGDIAARDLICAQKFNGLTVLPPLLTDEMIAQYTSALLAGTITSGWTFGAGAALQIPFAMQMAYRFNGIGVTQCVLYENQKLIANQFNSAIGKIQDSLSSTASALGKLQDVVNQNAQALNTLVKQLSSNFGAISSVLNDILSRLDKVEAEVQIDRLITGRLQSLQTYVTQQLIRAAEIRASANLAATKMSECVLGQSKRVDFCGKGYHLMSFPQSAPHGVVFLHVTYVPAQEKNFTTAPAICHDGKAHFPREGVFVSNGTHWFVTQRNFYEPQIITTDNTFVCGNCDVVIGIVNNTVYDPLQPELDSGGGSGGGQIYEGKLTAEGLRFGIVASRFNHALVDRLVEGAIDAIVRHGGREEDITLVRVPGSWEIPVAAGELARKEDIDAVIAIGVLIRGATPHFDYIASEVSKGLADLSLELRKPITFGVITADTLEQAIERAGTKHGNKGWEAALSAIEMANLFKSLR

SEQ ID NO: 13866 - protein, 1307 aa, Artificial Sequence
  SARS-CoV-2/Australia/QLD02/2020__EPI_ISL_407896 spike protein (1-1147)(N914C_S1123C) LumSynth construct
MFVFLVLLPLVSSQCVNLTTRTQLPPAYTNSFTRGVYYPDKVFRSSVLHSTQDLFLPFFSNVTWFHAIHVSGTNGTKRFDNPVLPFNDGVYFASTEKSNIIRGWIFGTTLDSKTQSLLIVNNATNVVIKVCEFQFCNDPFLGVYYHKNNKSWMESEFRVYSSANNCTFEYVSQPFLMDLEGKQGNFKNLREFVFKNIDGYFKIYSKHTPINLVRDLPQGFSALEPLVDLPIGINITRFQTLLALHRSYLTPGDSSSGWTAGAAAYYVGYLQPRTFLLKYNENGTITDAVDCALDPLSETKCTLKSFTVEKGIYQTSNFRVQPTESIVRFPNITNLCPFGEVFNATRFASVYAWNRKRISNCVADYSVLYNSASFSTFKCYGVSPTKLNDLCFTNVYADSFVIRGDEVRQIAPGQTGKIADYNYKLPDDFTGCVIAWNSNNLDSKVGGNYNYLYRLFRKSNLKPFERDISTEIYQAGSTPCNGVEGFNCYFPLQSYGFQPTNGVGYQPYRVVVLSFELLHAPATVCGPKKSTNLVKNKCVNFNFNGLTGTGVLTESNKKFLPFQQFGRDIADTTDAVRDPQTLEILDITPCSFGGVSVITPGTNTSNQVAVLYQDVNCTEVPVAIHADQLTPTWRVYSTGSNVFQTRAGCLIGAEHVNNSYECDIPIGAGICASYQTQTNSPRRARSVASQSIIAYTMSLGAENSVAYSNNSIAIPTNFTISVTTEILPVSMTKTSVDCTMYICGDSTECSNLLLQYGSFCTQLNRALTGIAVEQDKNTQEVFAQVKQIYKTPPIKDFGGFNFSQILPDPSKPSKRSFIEDLLFNKVTLADAGFIKQYGDCLGDIAARDLICAQKFNGLTVLPPLLTDEMIAQYTSALLAGTITSGWTFGAGAALQIPFAMQMAYRFNGIGVTQCVLYENQKLIANQFNSAIGKIQDSLSSTASALGKLQDVVNQNAQALNTLVKQLSSNFGAISSVLNDILSRLDKVEAEVQIDRLITGRLQSLQTYVTQQLIRAAEIRASANLAATKMSECVLGQSKRVDFCGKGYHLMSFPQSAPHGVVFLHVTYVPAQEKNFTTAPAICHDGKAHFPREGVFVSNGTHWFVTQRNFYEPQIITTDNTFVCGNCDVVIGIVNNTVYDPLQLELDSGGGSGGGQIYEGKLTAEGLRFGIVASRFNHALVDRLVEGAIDAIVRHGGREEDITLVRVPGSWEIPVAAGELARKEDIDAVIAIGVLIRGATPHFDYIASEVSKGLADLSLELRKPITFGVITADTLEQAIERAGTKHGNKGWEAALSAIEMANLFKSLR

SEQ ID NO: 13867 - protein, 1307 aa, Artificial Sequence
  SARS-CoV-2/India/1-31/2020__EPI_ISL_413523 spike protein (1-1147)(N914C_S1123C) LumSynth construct
MFVFLVLLPLVSSQCVNLTTRTQLPPAYTNSFTRGVYYPDKVFRSSVLHSTQDLFLPFFSNVTWFHAIHVSGTNGTKRFDNPVLPFNDGVYFASTEKSNIIRGWIFGTTLDSKTQSLLIVNNATNVVIKVCEFQFCNDPFLGVYYHKNNKSWMESEFRVYSSANNCTFEYVSQPFLMDLEGKQGNFKNLREFVFKNIDGYFKIYSKHTPINLVRDLPQGFSALEPLVDLPIGINITRFQTLLALHRSYLTPGDSSSGWTAGAAAYYVGYLQPRTFLLKYNENGTITDAVDCALDPLSETKCTLKSFTVEKGIYQTSNFRVQPTESIVRFPNITNLCPFGEVFNATRFASVYAWNRKRISNCVADYSVLYNSASFSTFKCYGVSPTKLNDLCFTNVYADSFVIRGDEVRQIAPGQTGKIADYNYKLPDDFTGCVIAWNSNNLDSKVGGNYNYLYRLFRKSNLKPFERDISTEIYQAGSTPCNGVEGFNCYFPLQSYGFQPTNGVGYQPYRVVVLSFELLHAPATVCGPKKSTNLVKNKCVNFNFNGLTGTGVLTESNKKFLPFQQFGRDIADTTDAVRDPQTLEILDITPCSFGGVSVITPGTNTSNQVAVLYQDVNCTEVPVAIHADQLTPTWRVYSTGSNVFQTRAGCLIGAEHVNNSYECDIPIGAGICASYQTQTNSPRRARSVASQSIIAYTMSLGAENSVAYSNNSIAIPTNFTISVTTEILPVSMTKTSVDCTMYICGDSTECSNLLLQYGSFCTQLNRALTGIAVEQDKNTQEVFAQVKQIYKTPPIKDFGGFNFSQILPDPSKPSKRSFIEDLLFNKVTLADAGFIKQYGDCLGDIAARDLICAQKFNGLTVLPPLLTDEMIAQYTSALLAGTITSGWTFGAGAALQIPFAMQMAYRFNGIGVTQCVLYENQKLIANQFNSVIGKIQDSLSSTASALGKLQDVVNQNAQALNTLVKQLSSNFGAISSVLNDILSRLDKVEAEVQIDRLITGRLQSLQTYVTQQLIRAAEIRASANLAATKMSECVLGQSKRVDFCGKGYHLMSFPQSAPHGVVFLHVTYVPAQEKNFTTAPAICHDGKAHFPREGVFVSNGTHWFVTQRNFYEPQIITTDNTFVCGNCDVVIGIVNNTVYDPLQPELDSGGGSGGGQIYEGKLTAEGLRFGIVASRFNHALVDRLVEGAIDAIVRHGGREEDITLVRVPGSWEIPVAAGELARKEDIDAVIAIGVLIRGATPHFDYIASEVSKGLADLSLELRKPITFGVITADTLEQAIERAGTKHGNKGWEAALSAIEMANLFKSLR

SEQ ID NO: 13868 - protein, 1307 aa, Artificial Sequence
  SARS-CoV-2/Guangdong/GD2020087-P0008/2020__EPI_ISL_413863 spike protein (1-1147)(N914C_S1123C) LumSynth construct
MFVFLVLLPLVSSQCVNLTTRTQLPPAYTNSFTRGVYYPDKVFRSSVLHSTQDLFLPFFSNVTWFHAIHVSGTNGTKRFDNPVLPFNDGVYFASTEKSNIIRGWIFGTTLDSKTQSLLIVNNATNVVIKVCEFQFCNDPFLGVYYHKNNKSWMESEFRVYSSANNCTFEYVSQPFLMDLEGKQGNFKNLREFVFKNIDGYFKIYSKHTPINLVRDLPQGFSALEPLVDLPIGINITRFQTLLALHRSYLTPGDSSSGWTAGAAAYYVGYLQPRTFLLKYNENGTITDAVDCALDPLSETKCTLKSFTVEKGIYQTSNFRVQPTESIVRFPNITNLCPFGEVFNATRFASVYAWNRKRISNCVADYSVLYNSASFSTFKCYGVSPTKLNDLCFTNVYADSFVIRGDEVREIAPGQTGKIADYNYKLPDDFTGCVIAWNSNNLDSKVGGNYNYLYRLFRKSNLKPFERDISTEIYQAGSTPCNGVEGFNCYFPLQSYGFQPTNGVGYQPYRVVVLSFELLHAPATVCGPKKSTNLVKNKCVNFNFNGLTGTGVLTESNKKFLPFQQFGRDIADTTDAVRDPQTLEILDITPCSFGGVSVITPGTNTSNQVAVLYQDVNCTEVPVAIHADQLTPTWRVYSTGSNVFQTRAGCLIGAEHVNNSYECDIPIGAGICASYQTQTNSPRRARSVASQSIIAYTMSLGAENSVAYSNNSIAIPTNFTISVTTEILPVSMTKTSVDCTMYICGDSTECSNLLLQYGSFCTQLNRALTGIAVEQDKNTQEVFAQVKQIYKTPPIKDFGGFNFSQILPDPSKPSKRSFIEDLLFNKVTLADAGFIKQYGDCLGDIAARDLICAQKFNGLTVLPPLLTDEMIAQYTSALLAGTITSGWTFGAGAALQIPFAMQMAYRFNGIGVTQCVLYENQKLIANQFNSAIGKIQDSLSSTASALGKLQDVVNQNAQALNTLVKQLSSNFGAISSVLNDILSRLDKVEAEVQIDRLITGRLQSLQTYVTQQLIRAAEIRASANLAATKMSECVLGQSKRVDFCGKGYHLMSFPQSAPHGVVFLHVTYVPAQEKNFTTAPAICHDGKAHFPREGVFVSNGTHWFVTQRNFYEPQIITTDNTFVCGNCDVVIGIVNNTVYDPLQPELDSGGGSGGGQIYEGKLTAEGLRFGIVASRFNHALVDRLVEGAIDAIVRHGGREEDITLVRVPGSWEIPVAAGELARKEDIDAVIAIGVLIRGATPHFDYIASEVSKGLADLSLELRKPITFGVITADTLEQAIERAGTKHGNKGWEAALSAIEMANLFKSLR

SEQ ID NO: 13869 - protein, 1307 aa, Artificial Sequence
  SARS-CoV-2/Sweden/01/2020__EPI_ISL_411951 spike protein (1-1147)(N914C_S1123C) LumSynth construct
MFVFLVLLPLVSSQCVNLTTRTQLPPAYTNSFTRGVYYPDKVFRSSVLHSTQDLFLPFFSNVTWFHAIHVSGTNGTKRFDNPVLPFNDGVYFASTEKSNIIRGWIFGTTLDSKTQSLLIVNNATNVVIKVCEFQFCNDPFLGVYYHKNNKSWMESEFRVYSSANNCTFEYVSQPFLMDLEGKQGNFKNLREFVFKNIDGYFKIYSKHTPINLVRDLPQGFSALEPLVDLPIGINITRFQTLLALHRSYLTPGDSSSGWTAGAAAYYVGYLQPRTFLLKYNENGTITDAVDCALDPLSETKCTLKSFTVEKGIYQTSNFRVQPTESIVRFPNITNLCPFGEVFNATRFASVYAWNRKRISNCVADYSVLYNSASFSTFKCYGVSPTKLNDLCFTNVYADSFVIRGDEVRQIAPGQTGKIADYNYKLPDDFTGCVIAWNSNNLDSKVGGNYNYLYRLFRKSNLKPFERDISTEIYQAGSTPCNGVEGFNCYFPLQSYGFQPTNGVGYQPYRVVVLSFELLHAPATVCGPKKSTNLVKNKCVNFNFNGLTGTGVLTESNKKFLPFQQFGRDIADTTDAVRDPQTLEILDITPCSFGGVSVITPGTNTSNQVAVLYQDVNCTEVPVAIHADQLTPTWRVYSTGSNVFQTRAGCLIGAEHVNNSYECDIPIGAGICASYQTQTNSPRRARSVASQSIIAYTMSLGAENSVAYSNNSIAIPTNFTISVTTEILPVSMTKTSVDCTMYICGDSTECSNLLLQYGSFCTQLNRALTGIAVEQDKNTQEVFAQVKQIYKTPPIKDCGGFNFSQILPDPSKPSKRSFIEDLLFNKVTLADAGFIKQYGDCLGDIAARDLICAQKFNGLTVLPPLLTDEMIAQYTSALLAGTITSGWTFGAGAALQIPFAMQMAYRFNGIGVTQCVLYENQKLIANQFNSAIGKIQDSLSSTASALGKLQDVVNQNAQALNTLVKQLSSNFGAISSVLNDILSRLDKVEAEVQIDRLITGRLQSLQTYVTQQLIRAAEIRASANLAATKMSECVLGQSKRVDFCGKGYHLMSFPQSAPHGVVFLHVTYVPAQEKNFTTAPAICHDGKAHFPREGVFVSNGTHWFVTQRNFYEPQIITTDNTFVCGNCDVVIGIVNNTVYDPLQPELDSGGGSGGGQIYEGKLTAEGLRFGIVASRFNHALVDRLVEGAIDAIVRHGGREEDITLVRVPGSWEIPVAAGELARKEDIDAVIAIGVLIRGATPHFDYIASEVSKGLADLSLELRKPITFGVITADTLEQAIERAGTKHGNKGWEAALSAIEMANLFKSLR

SEQ ID NO: 13870 - protein, 1307 aa, Artificial Sequence
  SARS-CoV-2/Tianmen/HBCDC-HB-07/2020__EPI_ISL_412983 spike protein (1-1147)(N914C_S1123C) LumSynth construct
MFVFLVLLPLVSSQCVNLTTRTQLPPAYTNSFTRGVYYPDKVFRSSVLHSTQDLFLPFFSNVTWFHAIHVSGTNGTKRFDNPVLPFNDGVYFASTEKSNIIRGWIFGTTLDSKTQSLLIVNNATNVVIKVCEFQFCNDPFLGVYYHKNNKSWMESEFRVYSSANNCTFEYVSQPFLMDLEGKQGNFKNLREFVFKNIDGYFKIYSKHTPINLVRDLPQGFSALEPLVDLPIGINITRFQTLLALHRSYLTPGDSSSGWTAGAAAYYVGYLQPRTFLLKYNENGTITDAVDCALDPLSETKCTLKSFTVEKGIYQTSNFRVQPTESIVRFPNITNLCPFGEVFNATRFASVYAWNRKRISNCVADYSVLYNSASFSTFKCYGVSPTKLNDLCFTNVYADSFVIRGDEVRQIAPGQTGKIADYNYKLPDDFTGCVIAWNSNNLDSKVGGNYNYLYRLFRKSNLKPFERDISTEIYQAGSTPCNGVEGFNCYFPLQSYGFQPTNGVGYQPYRVVVLSFELLHAPATVCGPKKSTNLVKNKCVNFNFNGLTGTGVLTESNKKFLPFQQFGRDIADTTDAVRDPQTLEILDITPCSFGGVSVITPGTNTSNQVAVLYQDLNCTEVPVAIHADQLTPTWRVYSTGSNVFQTRAGCLIGAEHVNNSYECDIPIGAGICASYQTQTNSPRRARSVASQSIIAYTMSLGAENSVAYSNNSIAIPTNFTISVTTEILPVSMTKTSVDCTMYICGDSTECSNLLLQYGSFCTQLNRALTGIAVEQDKNTQEVFAQVKQIYKTPPIKDFGGFNFSQILPDPSKPSKRSFIEDLLFNKVTLADAGFIKQYGDCLGDIAARDLICAQKFNGLTVLPPLLTDEMIAQYTSALLAGTITSGWTFGAGAALQIPFAMQMAYRFNGIGVTQCVLYENQKLIANQFNSAIGKIQDSLSSTASALGKLQDVVNQNAQALNTLVKQLSSNFGAISSVLNDILSRLDKVEAEVQIDRLITGRLQSLQTYVTQQLIRAAEIRASANLAATKMSECVLGQSKRVDFCGKGYHLMSFPQSAPHGVVFLHVTYVPAQEKNFTTAPAICHDGKAHFPREGVFVSNGTHWFVTQRNFYEPQIITTDNTFVCGNCDVVIGIVNNTVYDPLQPELDSGGGSGGGQIYEGKLTAEGLRFGIVASRFNHALVDRLVEGAIDAIVRHGGREEDITLVRVPGSWEIPVAAGELARKEDIDAVIAIGVLIRGATPHFDYIASEVSKGLADLSLELRKPITFGVITADTLEQAIERAGTKHGNKGWEAALSAIEMANLFKSLR

SEQ ID NO: 13871 - protein, 1307 aa, Artificial Sequence
  SARS-CoV-2/Hong Kong/case42_VM20002493/2020__EPI_ISL_414527 spike protein (1-1147)(N914C_S1123C) LumSynth construct
MFVFLVLLPLVSSQCVNLTTRTQLPPAYTNSFTRGVYYPDKVFRSSVLHSTQDLFLPFFSNVTWFHAIHVSGTNGTKRFDNPVLPFNDGVYFASTEKSNIIRGWIFGTTLDSKTQSLLIVNNATNVVIKVCEFQFCNDPFLGVYYHKNNKSWMESEFRVYSSANNCTFEYVSQPFLMDLEGKQGNFKNLREFVFKNIDGYFKIYSKHTPINLVRDLPQGFSALEPLVDLPIGINITRFQTLLALHRSYLTPGDSSSGWTAGAAAYYVGYLQPRTFLLKYNENGTITDAVDCALDPLSETKCTLKSFTVEKGIYQTSNFRVQPTESIVRFPNITNLCPFGEVFNATRFASVYAWNRKRISNCVADYSVLYNSASFSTFKCYGVSPTKLNDLCFTNVYADSFVIRGDEVRQIAPGQTGKIADYNYKLPDDFTGCVIAWNSNNLDSKVGGNYNYLYRLFRKSNLKPFERDISTEIYQAGSTPCNGVEGFNCYFPLQSYGFQPTNGVGYQPYRVVVLSFELLHAPATVCGPKKSTNLVKNKCVNFNFNGLTGTGVLTESNKKFLPFQQFGRDIADTTDAVRDPQTLEILDITPCSFGGVSVITPGTNTSNQVAVLYQDVNCTEVPVAIHADQLTPTWRVYSTGSNVFQTRAGCLIGAEHVNNSYECDIPIGAGICASYQTQTNSPRRARSVASQSIIAYTMSLGAENSVAYSNNSIAIPTNFAISVTTEILPVSMTKTSVDCTMYICGDSTECSNLLLQYGSFCTQLNRALTGIAVEQDKNTQEVFAQVKQIYKTPPIKDFGGFNFSQILPDPSKPSKRSFIEDLLFNKVTLADAGFIKQYGDCLGDIAARDLICAQKFNGLTVLPPLLTDEMIAQYTSALLAGTITSGWTFGAGAALQIPFAMQMAYRFNGIGVTQCVLYENQKLIANQFNSAIGKIQDSLSSTASALGKLQDVVNQNAQALNTLVKQLSSNFGAISSVLNDILSRLDKVEAEVQIDRLITGRLQSLQTYVTQQLIRAAEIRASANLAATKMSECVLGQSKRVDFCGKGYHLMSFPQSAPHGVVFLHVTYVPAQEKNFTTAPAICHDGKAHFPREGVFVSNGTHWFVTQRNFYEPQIITTDNTFVCGNCDVVIGIVNNTVYDPLQPELDSGGGSGGGQIYEGKLTAEGLRFGIVASRFNHALVDRLVEGAIDAIVRHGGREEDITLVRVPGSWEIPVAAGELARKEDIDAVIAIGVLIRGATPHFDYIASEVSKGLADLSLELRKPITFGVITADTLEQAIERAGTKHGNKGWEAALSAIEMANLFKSLR

SEQ ID NO: 13872 - protein, 1307 aa, Artificial Sequence
  SARS-CoV-2/USA/CruiseA-23/2020__EPI_ISL_414482 spike protein (1-1147)(N914C_S1123C) LumSynth construct
MFVFLVLLPLVSSQCVNLTTRTQLPPAYTNSFTRGVYYPDKVFRSSVLHSTQDLFLPFFSNVTWFHAIHVSGTNGTKRFDNPVLPFNDGVYFASTEKSNIIRGWIFGTTLDSKTQSLLIVNNATNVVIKVCEFQFCNDPFLGVYYHKNNKSWMESEFRVYSSANNCTFEYVSQPFLMDLEVKQGNFKNLREFVFKNIDGYFKIYSKHTPINLVRDLPQGFSALEPLVDLPIGINITRFQTLLALHRSYLTPGDSSSGWTAGAAAYYVGYLQPRTFLLKYNENGTITDAVDCALDPLSETKCTLKSFTVEKGIYQTSNFRVQPTESIVRFPNITNLCPFGEVFNATRFASVYAWNRKRISNCVADYSVLYNSASFSTFKCYGVSPTKLNDLCFTNVYADSFVIRGDEVRQIAPGQTGKIADYNYKLPDDFTGCVIAWNSNNLDSKVGGNYNYLYRLFRKSNLKPFERDISTEIYQAGSTPCNGVEGFNCYFPLQSYGFQPTNGVGYQPYRVVVLSFELLHAPATVCGPKKSTNLVKNKCVNFNFNGLTGTGVLTESNKKFLPFQQFGRDIADTTDAVRDPQTLEILDITPCSFGGVSVITPGTNTSNQVAVLYQDVNCTEVPVAIHADQLTPTWRVYSTGSNVFQTRAGCLIGAEHVNNSYECDIPIGAGICASYQTQTNSPRRARSVASQSIIAYTMSLGAENSVAYSNNSIAIPTNFTISVTTEILPVSMTKTSVDCTMYICGDSTECSNLLLQYGSFCTQLNRALTGIAVEQDKNTQEVFAQVKQIYKTPPIKDFGGFNFSQILPDPSKPSKRSFIEDLLFNKVTLADAGFIKQYGDCLGDIAARDLICAQKFNGLTVLPPLLTDEMIAQYTSALLAGTITSGWTFGAGAALQIPFAMQMAYRFNGIGVTQCVLYENQKLIANQFNSAIGKIQDSLSSTASALGKLQDVVNQNAQALNTLVKQLSSNFGAISSVLNDILSRLDKVEAEVQIDRLITGRLQSLQTYVTQQLIRAAEIRASANLAATKMSECVLGQSKRVDFCGKGYHLMSFPQSAPHGVVFLHVTYVPAQEKNFTTAPAICHDGKAHFPREGVFVSNGTHWFVTQRNFYEPQIITTDNTFVCGNCDVVIGIVNNTVYDPLQPELDSGGGSGGGQIYEGKLTAEGLRFGIVASRFNHALVDRLVEGAIDAIVRHGGREEDITLVRVPGSWEIPVAAGELARKEDIDAVIAIGVLIRGATPHFDYIASEVSKGLADLSLELRKPITFGVITADTLEQAIERAGTKHGNKGWEAALSAIEMANLFKSLR

SEQ ID NO: 13873 - protein, 1307 aa, Artificial Sequence
  SARS-CoV-2/Hong Kong/case85_VM20002868/2020__EPI_ISL_414519 spike protein (1-1147)(N914C_S1123C) LumSynth construct
MFVFLVLVPLVSSQCVNLTTRTQLPPAYTNSFTRGVYYPDKVFRSSVLHSTQDLFLPFFSNVTWFHAIHVSGTNGTKRFDNPVLPFNDGVYFASTEKSNIIRGWIFGTTLDSKTQSLLIVNNATNVVIKVCEFQFCNDPFLGVYYHKNNKSWMESEFRVYSSANNCTFEYVSQPFLMDLEGKQGNFKNLREFVFKNIDGYFKIYSKHTPINLVRDLPQGFSALEPLVDLPIGINITRFQTLLALHRSYLTPGDSSSGWTAGAAAYYVGYLQPRTFLLKYNENGTITDAVDCALDPLSETKCTLKSFTVEKGIYQTSNFRVQPTESIVRFPNITNLCPFGEVFNATRFASVYAWNRKRISNCVADYSVLYNSASFSTFKCYGVSPTKLNDLCFTNVYADSFVIRGDEVRQIAPGQTGKIADYNYKLPDDFTGCVIAWNSNNLDSKVGGNYNYLYRLFRKSNLKPFERDISTEIYQAGSTPCNGVEGFNCYFPLQSYGFQPTNGVGYQPYRVVVLSFELLHAPATVCGPKKSTNLVKNKCVNFNFNGLTGTGVLTESNKKFLPFQQFGRDIADTTDAVRDPQTLEILDITPCSFGGVSVITPGTNTSNQVAVLYQDVNCTEVPVAIHADQLTPTWRVYSTGSNVFQTRAGCLIGAEHVNNSYECDIPIGAGICASYQTQTNSPRRARSVASQSIIAYTMSLGAENSVAYSNNSIAIPTNFTISVTTEILPVSMTKTSVDCTMYICGDSTECSNLLLQYGSFCTQLNRALTGIAVEQDKNTQEVFAQVKQIYKTPPIKDFGGFNFSQILPDPSKPSKRSFIEDLLFNKVTLADAGFIKQYGDCLGDIAARDLICAQKFNGLTVLPPLLTDEMIAQYTSALLAGTITSGWTFGAGAALQIPFAMQMAYRFNGIGVTQCVLYENQKLIANQFNSAIGKIQDSLSSTASALGKLQDVVNQNAQALNTLVKQLSSNFGAISSVLNDILSRLDKVEAEVQIDRLITGRLQSLQTYVTQQLIRAAEIRASANLAATKMSECVLGQSKRVDFCGKGYHLMSFPQSAPHGVVFLHVTYVPAQEKNFTTAPAICHDGKAHFPREGVFVSNGTHWFVTQRNFYEPQIITTDNTFVCGNCDVVIGIVNNTVYDPLQPELDSGGGSGGGQIYEGKLTAEGLRFGIVASRFNHALVDRLVEGAIDAIVRHGGREEDITLVRVPGSWEIPVAAGELARKEDIDAVIAIGVLIRGATPHFDYIASEVSKGLADLSLELRKPITFGVITADTLEQAIERAGTKHGNKGWEAALSAIEMANLFKSLR

SEQ ID NO: 13874 - protein, 1307 aa, Artificial Sequence; identical to SEQ ID NO: 13864
  SARS-CoV-2/England/200990660/2020__EPI_ISL_414523 spike protein (1-1147)(N914C_S1123C) LumSynth construct

SEQ ID NO: 13875 - protein, 1307 aa, Artificial Sequence
  SARS-CoV-2/Australia/NSW09/2020__EPI_ISL_413595 spike protein (1-1147)(N914C_S1123C) LumSynth construct
MFVFLVLLPLVSSQCVNLTTRTQLPPAYTNSFTRGVYYPDKVFRSSVLHSTQDLFLPFFSNVTWFHAIHVSGTNGTKRFDNPVLPFNDGVYFASTEKSNIIRGWIFGTTLDSKTQSLLIVNNATNVVIKVCEFQFCNDPFLGVYYHKNNKSWMESEFRVYSSANNCTFEYVSQPFLMDLEGKQGNFKNLREFVFKNIDGYFKIYSKHTPINLVRDLPQGFSALEPLVDLPIGINITRFQTLLALHRSYLTPGDSSSGWTAGAAAYYVGYLQPRTFLLKYNENGTITDAVDCALDPLSETKCTLKSFTVEKGIYQTSNFRVQPTESIVRFPNITNLCPFGEVFNATRFASVYAWNRKRISNCVADYSVLYNSASFSTFKCYGVSPTKLNDLCFTNVYADSFVIRGDEVRQIAPGQTGKIADYNYKLPDDFTGCVIAWNSNNLDSKVGGNYNYLYRLFRKSNLKPFERDISTEIYQAGSTPCNGVEGFNCYFPLQSYGFQPTNGVGYQPYRVVVLSFELLHAPATVCGPKKSTNLVKNKCVNFNFNGLTGTGVLTESNKKFLPFQQFGRDIADTTDAVRDPQTLEILDITPCSFGGVSVITPGTNTSNQVAVLYQDVNCTEVPVAIHADQLTPTWRVYSTGSNVFQTRAGCLIGAEHVNNSYECDIPIGAGICASYQTQTNSPRRARSVASQSIIAYTMSLGAENSVAYSNNSIAIPTNFTISVTTEILPVSMTKTSVDCTMYICGDSTECSNLLLQYGSFCTQLNRALTGIAVEQDKNTQEVFAQVKQIYKTPPIKDFGGFNFSQILPDPSKPSKRSFIEDLLFNKVTLADAGFIKQYGDCLGDIAARDLICAQKFNGLTVLPPLLTDEMIAQYTSALLAGTITSGWTFGAGAALQIPFAMQMAYRFNGIGVTQCVLYENQKLIANQFNSAIGKIQDSLSFTASALGKLQDVVNQNAQALNTLVKQLSSNFGAISSVLNDILSRLDKVEAEVQIDRLITGRLQSLQTYVTQQLIRAAEIRASANLAATKMSECVLGQSKRVDFCGKGYHLMSFPQSAPHGVVFLHVTYVPAQEKNFTTAPAICHDGKAHFPREGVFVSNGTHWFVTQRNFYEPQIITTDNTFVCGNCDVVIGIVNNTVYDPLQPELDSGGGSGGGQIYEGKLTAEGLRFGIVASRFNHALVDRLVEGAIDAIVRHGGREEDITLVRVPGSWEIPVAAGELARKEDIDAVIAIGVLIRGATPHFDYIASEVSKGLADLSLELRKPITFGVITADTLEQAIERAGTKHGNKGWEAALSAIEMANLFKSLR

SEQ ID NO: 13876 - protein, 1307 aa, Artificial Sequence; identical to SEQ ID NO: 13856
  SARS-CoV-2/Australia/NSW10/2020__EPI_ISL_413596 spike protein (1-1147)(N914C_S1123C) LumSynth construct

SEQ ID NO: 13877 - protein, 1307 aa, Artificial Sequence
  SARS-CoV-2/Switzerland/1000477797/2020__EPI_ISL_413023 spike protein (1-1147)(N914C_S1123C) LumSynth construct
MFVFLVLLPLVSSQCVNLTTRTQLPPAYTNSFTRGVYYPDKVFRSSVLHSTQDLFLPFFSNVTWFHAIHVSGTNGTKRFDNPVLPFNDGVYFASTEKSNIIRGWIFGTTLDSKTQSLLIVNNATNVVIKVCEFQFCNDPFLGVYYHKNNKSWMESEFRVYSSANNCTFEYVSQPFLMDLEGKQGNFKNLREFVFKNIDGYFNIYSKHTPINLVRDLPQGFSALEPLVDLPIGINITRFQTLLALHRSYLTPGDSSSGWTAGAAAYYVGYLQPRTFLLKYNENGTITDAVDCALDPLSETKCTLKSFTVEKGIYQTSNFRVQPTESIVRFPNITNLCPFGEVFNATRFASVYAWNRKRISNCVADYSVLYNSASFSTFKCYGVSPTKLNDLCFTNVYADSFVIRGDEVRQIAPGQTGKIADYNYKLPDDFTGCVIAWNSNNLDSKVGGNYNYLYRLFRKSNLKPFERDISTEIYQAGSTPCNGVEGFNCYFPLQSYGFQPTNGVGYQPYRVVVLSFELLHAPATVCGPKKSTNLVKNKCVNFNFNGLTGTGVLTESNKKFLPFQQFGRDIADTTDAVRDPQTLEILDITPCSFGGVSVITPGTNTSNQVAVLYQGVNCTEVPVAIHADQLTPTWRVYSTGSNVFQTRAGCLIGAEHVNNSYECDIPIGAGICASYQTQTNSPRRARSVASQSIIAYTMSLGAENSVAYSNNSIAIPTNFTISVTTEILPVSMTKTSVDCTMYICGDSTECSNLLLQYGSFCTQLNRALTGIAVEQDKNTQEVFAQVKQIYKTPPIKDFGGFNFSQILPDPSKPSKRSFIEDLLFNKVTLADAGFIKQYGDCLGDIAARDLICAQKFNGLTVLPPLLTDEMIAQYTSALLAGTITSGWTFGAGAALQIPFAMQMAYRFNGIGVTQCVLYENQKLIANQFNSAIGKIQDSLSSTASALGKLQDVVNQNAQALNTLVKQLSSNFGAISSVLNDILSRLDKVEAEVQIDRLITGRLQSLQTYVTQQLIRAAEIRASANLAATKMSECVLGQSKRVDFCGKGYHLMSFPQSAPHGVVFLHVTYVPAQEKNFTTAPAICHDGKAHFPREGVFVSNGTHWFVTQRNFYEPQIITTDNTFVCGNCDVVIGIVNNTVYDPLQPELDSGGGSGGGQIYEGKLTAEGLRFGIVASRFNHALVDRLVEGAIDAIVRHGGREEDITLVRVPGSWEIPVAAGELARKEDIDAVIAIGVLIRGATPHFDYIASEVSKGLADLSLELRKPITFGVITADTLEQAIERAGTKHGNKGWEAALSAIEMANLFKSLR

SEQ ID NO: 13878 - protein, 1307 aa, Artificial Sequence
  SARS-CoV-2/Belgium/BA-02291/2020__EPI_ISL_415159 spike protein (1-1147)(N914C_S1123C) LumSynth construct
MFVFLVLLPLVSSQCVNLTTRTQLPPAYTNSFTRGVYYPDKVFRSSVLHSTQDLFLPFFSNVTWFHAIHVSGTNGTKRFDNPVLPFNDGVYFASTEKSNIIRGWIFGTTLDSKTQSLLIVNNATNVVIKVCEFQFCNDPFLGVYYHKNNKSWMESEFRVYSSANNCTFEYVSQPFLMDLEGKQGNFKNLREFVFKNIDGYFKIYSKHTPINLVRDLPQGFSALEPLVDLPIGINITRFQTLLALHRSYLTPGDSSSGWTAGAAAYYVGYLQPRTFLLKYNENGTITDAVDCALDPLSETKCTLKSFTVEKGIYQTSNFRVQPTESIVRFPNITNLCPFGEVFNATRFASVYAWNRKRISNCVADYSVLYNSASFSTFKCYGVSPTKLNDLCFTNVYADSFVIRGDEVRQIAPGQTGKIADYNYKLPDDFTGCVIAWNSNNLDSKVGGNYNYLYRLFRRSNLKPFERDISTEIYQAGSTPCNGVEGFNCYFPLQSYGFQPTNGVGYQPYRVVVLSFELLPAPATVCGPKKSTNLVKNKCVNFNFNGLTGTGVLTESNKKFLPFQQFGRDIADTTDAVRDPQTLEILDITPCSFGGVSVITPGTNTSNQVAVLYQGVNCTEVPVAIHADQLTPTWRVYSTGSNVFQTRAGCLIGAEHVNNSYECDIPIGAGICASYQTQTNSPRRARSVASQSIIAYTMSLGAENSVAYSNNSIAIPTNFTISVTTEILPVSMTKTSVDCTMYICGDSTECSNLLLQYGSFCTQLNRALTGIAVEQDKNTQEVFAQVKQIYKTPPIKDFGGFNFSQILPDPSKPSKRSFIEDLLFNKVTLADAGFIKQYGDCLGDIAARDLICAQKFNGLTVLPPLLTDEMIAQYTSALLAGTITSGWTFGAGAALQIPFAMQMAYRFNGIGVTQCVLYENQKLIANQFNSAIGKIQDSLSSAAPALGKLQDVVNQNAQALNTLVKQLSSNFGAISSVLNDILSRLDKVEAEVQIDRLITGRLQSLQTYVTQQLIRAAEIRASANLAATKMSECVLGQSKRVDFCGKGYHLMSFPQSAPHGVVFLHVTYVPAQEKNFTTAPAICHDGKAHFPREGVFVSNGTHWFVTQRNFYEPQIITTDNTFVCGNCDVVIGIVNNTVYDPLQPELDSGGGSGGGQIYEGKLTAEGLRFGIVASRFNHALVDRLVEGAIDAIVRHGGREEDITLVRVPGSWEIPVAAGELARKEDIDAVIAIGVLIRGATPHFDYIASEVSKGLADLSLELRKPITFGVITADTLEQAIERAGTKHGNKGWEAALSAIEMANLFKSLR

SEQ ID NO: 13879 - protein, 1307 aa, Artificial Sequence
  SARS-CoV-2/USA/WA8-UW5/2020__EPI_ISL_413486 spike protein (1-1147)(N914C_S1123C) LumSynth construct
MFVFLVLLPLVSSQCVNLTTRTQLPPAYTNSFTRGVYYPDKVFRSSVLHSTQDLFLPFFSNVTWFHAIHVSGTNGTKRFDNPVLPFNDGVYFASTEKSNIIRGWIFGTTLDSKTQSLLIVNNATNVVIKVCEFQFCNDPFLGVYYHKNNKSWMESEFRVYSSANNCTFEYVSQPFLMDLEGKQGNFKNLREFVFKNIDGYFKIYSKHTPINLVRDLPQGFSALEPLVDLPIGINITRFQTLLALHRSYLTPGDSSSGWTAGAAAYYVGYLQPRTFLLKYNENGTITDAVDCALDPLSETKCTLKSFTVEKGIYQTSNFRVQPTESIVRFPNITNLCPFGEVFNATRFASVYAWNRKRISNCVADYSVLYNSASFSTFKCYGVSPTKLNDLCFTNVYADSFVIRGDEVRQIAPGQTGKIADYNYKLPDDFTGCVIAWNSNNLDSKVGGNYNYLYRLFRKSNLKPFERDISTEIYQAGSTPCNGVEGFNCYFPLQSYGFQPTNGVGYQPYRVVVLSFELLHAPATVCGPKKSTNLVKNKCVNFNFNGLTGTGVLTESNKKFLPFQQFGRDIADTTDAVRDPQTLEILDITPCSFGGVSVITPGTNTSNQVAVLYQDVNCTEVPVAIHADQLTPTWRVYSTGSNVFQTRAGCLIGAEYVNNSYECDIPIGAGICASYQTQTNSPRRARSVASQSIIAYTMSLGAENSVAYSNNSIAIPTNFTISVTTEILPVSMTKTSVDCTMYICGDSTECSNLLLQYGSFCTQLNRALTGIAVEQDKNTQEVFAQVKQIYKTPPIKDFGGFNFSQILPDPSKPSKRSFIEDLLFNKVTLADAGFIKQYGDCLGDIAARDLICAQKFNGLTVLPPLLTDEMIAQYTSALLAGTITSGWTFGAGAALQIPFAMQMAYRFNGIGVTQCVLYENQKLIANQFNSAIGKIQDSLSSTASALGKLQDVVNQNAQALNTLVKQLSSNFGAISSVLNDILSRLDKVEAEVQIDRLITGRLQSLQTYVTQQLIRAAEIRASANLAATKMSECVLGQSKRVDFCGKGYHLMSFPQSAPHGVVFLHVTYVPAQEKNFTTAPAICHDGKAHFPREGVFVSNGTHWFVTQRNFYEPQIITTDNTFVCGNCDVVIGIVNNTVYDPLQPELDSGGGSGGGQIYEGKLTAEGLRFGIVASRFNHALVDRLVEGAIDAIVRHGGREEDITLVRVPGSWEIPVAAGELARKEDIDAVIAIGVLIRGATPHFDYIASEVSKGLADLSLELRKPITFGVITADTLEQAIERAGTKHGNKGWEAALSAIEMANLFKSLR

SEQ ID NO: 13880 - protein, 1307 aa, Artificial Sequence
  SARS-CoV-2/England/20102000506/2020__EPI_ISL_415147 spike protein (1-1147)(N914C_S1123C) LumSynth construct
MFVFLVLLPLVSSQCVNLTTRTQLPPAYTNSFTRGVYYPDKVFRSSVLHSTQDLFLPFFSNVTWFHAIHVSGTNGTKRFDNPVLPFNDGVYFASTEKSNIIRGWIFGTTLDSKTQSLLIVNNATNVVIKVCEFQFCNDPFLGVYYHKNNKSWMESEFRVYSSANNCTFEYVSQPFLMDLEGKQGNFKNLREFVFKNIDGYFKIYSKHTPINLVRDLPQGFSALEPLVDLPIGINITRFQTLLALHRSYLTPGDSSSGWTAGAAAYYVGYLQPRTFLLKYNENGTITDAVDCALDPLSETKCTLKSFTVEKGIYQTSNFRVQPTESIVRFPNITNLCPFGEVFNATRFASVYAWNRKRISNCVADYSVLYNSASFSTFKCYGVSPTKLNDLCFTNVYADSFVIRGDEVRQIAPGQTGKIADYNYKLPDDFTGCVIAWNSNNLDSKVGGNYNYLYRLFRKSNLKPFERDISTEIYQAGSTPCNGVEGFNCYFPLQSYGFQPTNGVGYQPYRVVVLSFELLHAPATVCGPKKSTNLVKNKCVNFNFNGLTGTGVLTESNKKFLPFQQFGRDIADTTDAVRDPQTLEILDITPCSFGGVSVITPGTNTSNQVAVLYQGVNCTEVPVAIHADQLTPTWRVYSTGSNVFQTRAGCLIGAEHVNNSYECDIPIGAGICASYQTQTNSPRRARSVASQSIIAYTMSLGAENSVAYSNNSIAIPTNFTISVTTEILPVSMTKTSVDCTMYICGDSTECSNLLLQYGSFCTQLNRALTGIAVEQDKNTQEVFAQVKQIYKTPPIKDFGGFNFSQILPDPSKPSKRSFIEDLLFNKVTLADAGFIKQYGYCLGDIAARDLICAQKFNGLTVLPPLLTDEMIAQYTSALLAGTITSGWTFGAGAALQIPFAMQMAYRFNGIGVTQCVLYENQKLIANQFNSAIGKIQDSLSSTASALGKLQDVVNQNAQALNTLVKQLSSNFGAISSVLNDILSRLDKVEAEVQIDRLITGRLQSLQTYVTQQLIRAAEIRASANLAATKMSECVLGQSKRVDFCGKGYHLMSFPQSAPHGVVFLHVTYVPAQEKNFTTAPAICHDGKAHFPREGVFVSNGTHWFVTQRNFYEPQIITTDNTFVCGNCDVVIGIVNNTVYDPLQPELDSGGGSGGGQIYEGKLTAEGLRFGIVASRFNHALVDRLVEGAIDAIVRHGGREEDITLVRVPGSWEIPVAAGELARKEDIDAVIAIGVLIRGATPHFDYIASEVSKGLADLSLELRKPITFGVITADTLEQAIERAGTKHGNKGWEAALSAIEMANLFKSLR

SEQ ID NO: 13881 - protein, 1307 aa, Artificial Sequence
  SARS-CoV-2/Belgium/VAG-03013/2020__EPI_ISL_415155 spike protein (1-1147)(N914C_S1123C) LumSynth construct
MFVFLVLLPLVSSQCVNLTTRTQLPPAYTNSFTRGVYYPDKVFRSSVLHSTQDLFLPFFSNVTWFHAIHVSGTNGTKRFDNPVLPFNDGVYFASTEKSNIIRGWIFGTTLDSKTQSLLIVNNATNVVIKVCEFQFCNDPFLGVYYHKNNKSWMESEFRVYSSANNCTFEYVSQPFLMDLEGKQGNFKNLREFVFKNIDGYFKIYSKHTPINLVRDLPQGFSALEPLVDLPIGINITRFQTLLALHRSYLTPGDSSSGWTAGAAAYYVGYLQPRTFLLKYNENGTITDAVDCALDPLSETKCTLKSFTVEKGIYQTSNFRVQPTESIVRFPNITNLCPFGEVFNATRFASVYAWNRKRISNCVADYSVLYNSASFSTFKCYGVSPTKLNDLCFTNVYADSFVIRGDEVRQIAPGQTGKIADYNYKLPDDFTGCVIAWNSNNLDSKVGGNYNYLYRLFRKSNLKPFERDISTEIYQAGSTPCNGVEGFNCYFPLQSYGFQPTNGVGYQPYRVVVLSFELLHAPATVCGPKKSTNLVKNKCVNFNFNGLTGTGVLTESNKKFLPFQQFGRDIADTTDAVRDPQTLEILDITPCSFGGVSVITPGTNTSNQVAVLYQGVNCTEVPVAIHADQLTPTWRVYSTGSNVFQTRAGCLIGAEHVNNSYECDIPIGAGICASYQTQTNSPRRARSVASQSIIAYTMSLGAENSVAYSNNSIAIPTNFTISVTTEILPVSMTKTSVDCTMYICGDSTECSNLLLQYGSFCTQLNRALTGIAVEQDKNTQEVFAQVKQIYKTPPIKDFGGFNFSQILPDPSKPSKRSFIEDLLFNKVTLADAGFIKQYGDCLGDIAARDLICAQKFNGLTVLPPLLTDEMIAQYTSALLAGTITSGWTFGAGAALQIPFAMQMAYRFNGIGVTQCVLYENQKLIANQFNSAIGKIQDSLSSTATALGKLQDVVNQNAQALNTLVKQLSSNFGAISSVLNDILSRLDKVEAEVQIDRLITGRLQSLQTYVTQQLIRAAEIRASANLAATKMSECVLGQSKRVDFCGKGYHLMSFPQSAPHGVVFLHVTYVPAQEKNFTTAPAICHDGKAHFPREGVFVSNGTHWFVTQRNFYEPQIITTDNTFVCGNCDVVIGIVNNTVYDPLQPELDSGGGSGGGQIYEGKLTAEGLRFGIVASRFNHALVDRLVEGAIDAIVRHGGREEDITLVRVPGSWEIPVAAGELARKEDIDAVIAIGVLIRGATPHFDYIASEVSKGLADLSLELRKPITFGVITADTLEQAIERAGTKHGNKGWEAALSAIEMANLFKSLR

SEQ ID NO: 13882 - protein, 1307 aa, Artificial Sequence
  SARS-CoV-2/Belgium/BC-03016/2020__EPI_ISL_415157 spike protein (1-1147)(N914C_S1123C) LumSynth construct
MFVFLVLLPLVSSQCVNLTTRTQLPPAYTNSFTRGVYYPDKVFRSSVLHSTQDLFLPFFSNVTWFHAIHVSGTNGTKRFDNPVLPFNDGVYFASTEKSNIIRGWIFGTTLDSKTQSLLIVNNATNVVIKVCEFQFCNDPFLGVYYHKNNKSWMESEFRVYSSANNCTFEYVSQPFLMDLEGKQGNFKNLREFVFKNIDGYFKIYSKHTPINLVRDLPQGFSALEPLVDLPIGINITRFQTLLALHRSYLTPGDSSSGWTAGAAAYYVGYLQPRTFLLKYNENGTITDAVDCALDPLSETKCTLKSFTVEKGIYQTSNFRVQPTESIVRFPNITNLCPFGEVFNATRFASVYAWNRKRISNCVADYSVLYNSASFSTFKCYGVSPTKLNDLCFTNVYADSFVIRGDEVRQIAPGQTGKIADYNYKLPDDFTGCVIAWNSNNLDSKVGGNYNYLYRLFRKSNLKPFERDISTEIYQAGSTPCNGVEGFNCYFPLQSYGFQPTNGVGYQPYRVVVLSFELLHAPATVCGPKKSTNLVKNKCVNFNFNGLTGTGVLTESNKKFLPFQQFGRDIADTTDAVRDPQTLEILDITPCSFGGVSVITPGTNTSNQVAVLYQGVNCTEVPVAIHADQLTPTWRVYSTGSNVFQTRAGCLIGAEHVNNSYECDIPIGAGICASYQTQTNSPRRARSVASQSIIAYTMSLGAENSVAYSNNSIAIPTNFTISVTTEILPVSMTKTSVDCTMYICGDSTECSNLLLQYGSFCTQLNRALTGIAVEQDKNTQEVFAQVKQIYKTPPIKDFGGFNFSQILPDPSKPSKRSFIEDLLFNKVTLADAGFIKQYGDCLGDIAARDLICAQKFNGLTVLPPLLTDEMIAQYTSALLAGTITSGWTFGAGAALQIPFAMQMAYRFNGIGVTQCVLYENQKLIANQFNSAIGKIQDSLSSTAPALGKLQDVVNQNAQALNTLVKQLSSNFGAISSVLNDILSRLDKVEAEVQIDRLITGRLQSLQTYVTQQLIRAAEIRASANLAATKMSECVLGQSKRVDFCGKGYHLMSFPQSAPHGVVFLHVTYVPAQEKNFTTAPAICHDGKAHFPREGVFVSNGTHWFVTQRNFYEPQIITTDNTFVCGNCDVVIGIVNNTVYDPLQPELDSGGGSGGGQIYEGKLTAEGLRFGIVASRFNHALVDRLVEGAIDAIVRHGGREEDITLVRVPGSWEIPVAAGELARKEDIDAVIAIGVLIRGATPHFDYIASEVSKGLADLSLELRKPITFGVITADTLEQAIERAGTKHGNKGWEAALSAIEMANLFKSLR

SEQ ID NO: 13883 - protein, 1307 aa, Artificial Sequence
  SARS-CoV-2/Germany/BavPat3/2020__EPI_ISL_414521 spike protein (1-1147)(N914C_S1123C) LumSynth construct
MFVFLVLLPLVSSQCVNLTTRTQLPPAYTNSFTRGVYYPDKVFRSSVLHSTQDLFLPFFSNVTWFHAIHVSGTNGTKRFDNPVLPFNDGVYFASTEKSNIIRGWIFGTTLDSKTQSLLIVNNATNVVIKVCEFQFCNDPFLGVYYHKNNKSWMESEFRVYSSANNCTFEYVSQPFLMDLEGKQGNFKNLREFVFKNIDGYFKIYSKHTPINLVRDLPQGFSALEPLVDLPIGINITRFQTLLALHRSYLTPGDSSSGWTAGAAAYYVGYLQPRTFLLKYNENGTITDAVDCALDPLSETKCTLKSFTVEKGIYQTSNFRVQPTESIVRFPNITNLCPFGEVFNATRFASVYAWNRKRISNCVADYSVLYNSASFSTFKCYGVSPTKLNDLCFTNVYADSFVIRGDEVRQIAPGQTGKIADYNYKLPDDFTGCVIAWNSNNLDSKVGGNYNYLYRLFRKSNLKPFERDISTEIYQAGSTPCNGVEGFNCYFPLQSYGFQPTNGVGYQPYRVVVLSFELLHAPATVCGPKKSTNLVKNKCVNFNFNGLTGTGVLTESNKKFLPFQQFGRDIADTTDAVRDPQTLEILDITPCSFGGVSVITPGTNTSNQVAVLYQDVNCTEVPVAIHADQLTPTWRVYSTGSNVFQTRAGCLIGAEHVNNSYECDIPIGAGICASYQTQTNSPRRARSVASQSIIAYTMSLGAENSVAYSNNSIAIPTNFTISVTTEILPVSMTKTSVDCTMYICGDSTECSNLLLQYGSFCTQLNRALTGIAVEQDKNTQQVFAQVKQIYKTPPIKDFGGFNFSQILPDPSKPSKRSFIEDLLFNKVTLADAGFIKQYGDCLGDIAARDLICAQKFNGLTVLPPLLTDEMIAQYTSALLAGTITSGWTFGAGAALQIPFAMQMAYRFNGIGVTQCVLYENQKLIANQFNSAIGKIQDSLSSTASALGKLQDVVNQNAQALNTLVKQLSSNFGAISSVLNDILSRLDKVEAEVQIDRLITGRLQSLQTYVTQQLIRAAEIRASANLAATKMSECVLGQSKRVDFCGKGYHLMSFPQSAPHGVVFLHVTYVPAQEKNFTTAPAICHDGKAHFPREGVFVSNGTHWFVTQRNFYEPQIITTDNTFVCGNCDVVIGIVNNTVYDPLQPELDSGGGSGGGQIYEGKLTAEGLRFGIVASRFNHALVDRLVEGAIDAIVRHGGREEDITLVRVPGSWEIPVAAGELARKEDIDAVIAIGVLIRGATPHFDYIASEVSKGLADLSLELRKPITFGVITADTLEQAIERAGTKHGNKGWEAALSAIEMANLFKSLR

SEQ ID NO: 13884 - protein, 1307 aa, Artificial Sequence
  SARS-CoV-2/France/HF1805/2020__EPI_ISL_414628 spike protein (1-1147)(N914C_S1123C) LumSynth construct
MFVFLVLLPLVSSQCVNLTTRTQLPPAYTNSFTRGVYYPDKVFRSSVLHSTQDLFLPFFSNVTWFHAIHVSGTNGTKRFDNPVLPFNDGVYFASTEKSNIIRGWIFGTTLDSKTQSLLIVNNATNVVIKVCEFQFCNDPFLGVYYHKNNKSWMESEFRVYSSANNCTFEYVSQPFLMDLEGKQGNFKNLREFVFKNIDGYFKIYSKHTPINLVRDLPQGFSALEPLVDLPIGINITRFQTLLALHRSYLTPGDSSSGWTAGAAAYYVGYLQPRTFLLKYNENGTITDAVDCALDPLSETKCTLKSFTVEKGIYQTSNFRVQPTESIVRFPNITNLCPFGEVFNATRFASVYAWNRKRISNCVADYSVLYNSASFSTFKCYGVSPTKLNDLCFTNVYADSFVIRGDEVRQIAPGQTGKIADYNYKLPDDFTGCVIAWNSNNLDSKVGGNYNYLYRLFRKSNLKPFERDISTEIYQAGSTPCNGVEGFNCYFPLQSYGFQPTNGVGYQPYRVVVLSFELLHAPATVCGPKKSTNLVKNKCVNFNFNGLTGTGVLTESNKKFLPFQQFGRDIADTTDAVRDPQTLEILDITPCSFGGVSVITPGTNTSNQVAVLYQGVNCTEVPVAIHADQLTPTWRVYSTGSNVFQTRAGCLIGAEHVNNSYECDIPIGAGICASYQTQTNSPRRARSVASQSIIAYTMSLGAENSVAYSNNSIAIPTNFTISVTTEILPVSMTKTSVDCTMYICGDSTECSNLLLQYGSFCTQLNRALTGIAVEQDKNTQEVFAQVKQIYKTPPIKDFGGFNFSQILPDPSKPSKRSFIEDLLFNKVTLADAGFIKQYGDCLGDIAARDLICAQKFNGLTVLPPLLTDEMIAQYTSALLAGTITSGWTFGAGAALQIPFAMQMAYRFNGIGVTQCVLYENQKLIANQFNSAIGKIQDSLSSTASALGKLQDVVNQNAQALNTLVKQLSSNFGAISSVLNDILSRLDKVEAEVQIDRLITGRLQSLQTYVTQQLIRAAEIRASANLAATKMSECVLGQSKRVDFCGKGYHLMSFPQSAPHGVVFLHVTYVPAQEKNFTTAPAICHDGKAHFPREGVFVSNGTHWFVTQRNFYEPQIITTDNTFVCGNCDVVIGVVNNTVYDPLQPELDSGGGSGGGQIYEGKLTAEGLRFGIVASRFNHALVDRLVEGAIDAIVRHGGREEDITLVRVPGSWEIPVAAGELARKEDIDAVIAIGVLIRGATPHFDYIASEVSKGLADLSLELRKPITFGVITADTLEQAIERAGTKHGNKGWEAALSAIEMANLFKSLR

SEQ ID NO: 13885 - protein, 1307 aa, Artificial Sequence
  SARS-CoV-2/Netherlands/ZuidHolland_9/2020__EPI_ISL_414445 spike protein (1-1147)(N914C_S1123C) LumSynth construct
MFVFLVLLPLVSSQCVNLTTRTQLPPAYTNSFTRGVYYPDKVFRSSVLHSTQDLFLPFFSNVTWFHAIHVSGTNGTKRFDNPVLPFNDGVYFASTEKSNIIRGWIFGTTLDSKTQSLLIVNNATNVVIKVCEFQFCNDPFLGVYYHKNNKSWMESEFRVYSSANNCTFEYVSQPFLMDLEGKQGNFKNLREFVFKNIDGYFKIYSKHTPINLVRDLPQGFSALEPLVDLPIGINITRFQTLLALHRSYLTPGDSSSGWTAGAAAYYVGYLQPRTFLLKYNENGTITDAVDCALDPLSETKCTLKSFTVEKGIYQTSNFRVQPTESIVRFPNITNLCPFGEVFNATRFASVYAWNRKRISNCVADYSVLYNSASFSTFKCYGVSPTKLNDLCFTNVYADSFVIRGDEVRQIAPGQTGKIADYNYKLPDDFTGCVIAWNSNNLDSKVGGNYNYLYRLFRKSNLKPFERDISTEIYQAGSTPCNGVEGFNCYFPLQSYGFQPTNGVGYQPYRVVVLSFELLHAPATVCGPKKSTNLVKNKCVNFNFNGLTGTGVLTESNKKFLPFQQFGRDIADTTDAVRDPQTLEILDITPCSFGGVSVITPGTNTSNQVAVLYQGVNCTEVPVAIHADQLTPTWRVYSTGSNVFQTRAGCLIGAEHVNNSYECDIPIGAGICASYQTQTNSPRRARSVASQSIIAYTMSLGAENSVAYSNNSIAIPTNFTISVTTEILPVSMTKTSVDCTMYICGDSTECSNLLLQYGSFCTQLNRALTGIAVEQDKNTQEVFAQVKQIYKTPPIKDFGGFNFSQILPDPSKPSKRSFIEDLLFNKVTLADAGFIKQYGDCLGDIAARDLICVQKFNGLTVLPPLLTDEMIAQYTSALLAGTITSGWTFGAGAALQIPFAMQMAYRFNGIGVTQCVLYENQKLIANQFNSAIGKIQDSLSSTASALGKLQDVVNQNAQALNTLVKQLSSNFGAISSVLNDILSRLDKVEAEVQIDRLITGRLQSLQTYVTQQLIRAAEIRASANLAATKMSECVLGQSKRVDFCGKGYHLMSFPQSAPHGVVFLHVTYVPAQEKNFTTAPAICHDGKAHFPREGVFVSNGTHWFVTQRNFYEPQIITTDNTFVCGNCDVVIGIVNNTVYDPLQPELDSGGGSGGGQIYEGKLTAEGLRFGIVASRFNHALVDRLVEGAIDAIVRHGGREEDITLVRVPGSWEIPVAAGELARKEDIDAVIAIGVLIRGATPHFDYIASEVSKGLADLSLELRKPITFGVITADTLEQAIERAGTKHGNKGWEAALSAIEMANLFKSLR

SEQ ID NO: 13886 - protein, 1307 aa, Artificial Sequence
  SARS-CoV-2/Finland/FIN03032020A/2020__EPI_ISL_413602 spike protein (1-1147)(N914C_S1123C) LumSynth construct
MFVFLVLLPLVSSQCVNLTTRTQLPPAYTNSFTRGVYYPDKVFRSSVLHSTQDLFLPFFSNVTWFHAIHVSGTNGTKRFDNPVLPFNDGVYFASTEKSNIIRGWIFGTTLDSKTQSLLIVNNATNVVIKVCEFQFCNDPFLGVYYHKNNKSWMESEFRVYSSANNCTFEYVSQPFLMDLEGKQGNFKNLREFVFKNIDGYFKIYSKHTPINLVRDLPQGFSALEPLVDLPIGINITRFQTLLALHRSYLTPGDSSSGWTAGAAAYYVGYLQPRTFLLKYNENGTITDAVDCALDPLSETKCTLKSFTVEKGIYQTSNFRVQPTESIVRFPNITNLCPFGEVFNATRFASVYAWNRKRISNCVADYSVLYNSASFSTFKCYGVSPTKLNDLCFTNVYADSFVIRGDEVRQIAPGQTGKIADYNYKLPDDFTGCVISWNSNNLDSKVGGNYNYLYRLFRKSNLKPFERDISTEIYQAGSTPCNGVEGFNCYFPLQSYGFQPTNGVGYQPYRVVVLSFELLHAPATVCGPKKSTNLVKNKCVNFNFNGLTGTGVLTESNKKFLPFQQFGRDIADTTDAVRDPQTLEILDITPCSFGGVSVITPGTNTSNQVAVLYQGVNCTEVPVAIHADQLTPTWRVYSTGSNVFQTRAGCLIGAEHVNNSYECDIPIGAGICASYQTQTNSPRRARSVASQSIIAYTMSLGAENSVAYSNNSIAIPTNFTISVTTEILPVSMTKTSVDCTMYICGDSTECSNLLLQYGSFCTQLNRALTGIAVEQDKNTQEVFAQVKQIYKTPPIKDFGGFNFSQILPDPSKPSKRSFIEDLLFNKVTLADAGFIKQYGDCLGDIAARDLICAQKFNGLTVLPPLLTDEMIAQYTSALLAGTITSGWTFGAGAALQIPFAMQMAYRFNGIGVTQCVLYENQKLIANQFNSAIGKIQDSLSSTASALGKLQDVVNQNAQALNTLVKQLSSNFGAISSVLNDILSRLDKVEAEVQIDRLITGRLQSLQTYVTQQLIRAAEIRASANLAATKMSECVLGQSKRVDFCGKGYHLMSFPQSAPHGVVFLHVTYVPAQEKNFTTAPAICHDGKAHFPREGVFVSNGTHWFVTQRNFYEPQIITTDNTFVCGNCDVVIGIVNNTVYDPLQPELDSGGGSGGGQIYEGKLTAEGLRFGIVASRFNHALVDRLVEGAIDAIVRHGGREEDITLVRVPGSWEIPVAAGELARKEDIDAVIAIGVLIRGATPHFDYIASEVSKGLADLSLELRKPITFGVITADTLEQAIERAGTKHGNKGWEAALSAIEMANLFKSLR

SEQ ID NO: 13887 - protein, 1307 aa, Artificial Sequence
  SARS-CoV-2/France/GE1977/2020__EPI_ISL_414632 spike protein (1-1147)(N914C_S1123C) LumSynth construct
MFVFLVLLPLVSSQCVNLTTRTQLPPAYTNSFTRGVYYPDKVFRSSVLHSTQDLFLPFFSNVTWFHAIHVSGTNGTKRFDNPVLPFNDGVYFASTEKSNIIRGWIFGTTLDSKTQSLLIVNNATNVVIKVCEFQFCNDPFLGVYYHKNNKSWMESEFRVYSSANNCTFEYVSQPFLMDLEGKQGNFKNLREFVFKNIDGYFKIYSKHTPINLVRDLPQGFSALEPLVDLPIGINITRFQTLLALHRSYLTPGDSSSGWTAGAAAYYVGYLQPRTFLLKYNENGTITDAVDCALDPLSETKCTLKSFTVEKGIYQTSNFRVQPTESIVRFPNITNLCPFGEVFNATRFASVYAWNRKRISNCVADYSVLYNSASFSTFKCYGVSPTKLNDLCFTNVYADSFVIRGDEVRQIAPGQTGKIADYNYKLPDDFTGCVIAWNSNNLDSKVGGNYNYLYRLFRKSNLKPFERDISTEIYQAGSTPCNGVEGFNCYFPLQSYGFQPTNGVGYQPYRVVVLSFELLHAPATVCGPKKSTNLVKNKCVNFNFNGLTGTGVLTESNKKFLPFQQFGRDIADTTDAVRDPQTLEILDITPCSFGGVSVITPGTNTSNQVAVLYQGVNCTEVPVAIHADQLTPTWRVYSTGSNVFQTRAGCLIGAEHVNNSYECDIPIGAGICASYQTQTNSPRRARSVASQSIIAYTMSLGAENSVAYSNNSIAIPTNFTISVTTEILPVSMTKTSVDCTMYICGDSTECSNLLLQYGSFCTQLNRALTGIAVEQDKNTQEVFAQVKQIYKTPPIKDFGGFNFSQILPDPSKPSKRSFIEDLLFNKVTLADAGFIKQYGDCLGDIAARDLICAQKFNGLTVLPPLLTDEMIAQYTSALLAGTITSGWTFGAGAALQIPFAMQMAYRFNGIGVTQCVLYENQKLIANQFNSAIGKIQDSLFSTASALGKLQDVVNQNAQALNTLVKQLSSNFGAISSVLNDILSRLDKVEAEVQIDRLITGRLQSLQTYVTQQLIRAAEIRASANLAATKMSECVLGQSKRVDFCGKGYHLMSFPQSAPHGVVFLHVTYVPAQEKNFTTAPAICHDGKAHFPREGVFVSNGTHWFVTQRNFYEPQIITTDNTFVCGNCDVVIGIVNNTVYDPLQPELDSGGGSGGGQIYEGKLTAEGLRFGIVASRFNHALVDRLVEGAIDAIVRHGGREEDITLVRVPGSWEIPVAAGELARKEDIDAVIAIGVLIRGATPHFDYIASEVSKGLADLSLELRKPITFGVITADTLEQAIERAGTKHGNKGWEAALSAIEMANLFKSLR

SEQ ID NO: 13888 - protein, 1307 aa, Artificial Sequence
  SARS-CoV-2/Finland/FIN-313/2020__EPI_ISL_414641 spike protein (1-1147)(N914C_S1123C) LumSynth construct
MFVFLVLLPLVSSQCVNLTTRTQLPPAYTNSFTRGVYYPDKVFRSSVLHSTQDLFLPFFSNVTWFHAIHVSGTNGTKRFDNPVLPFNDGVYFASTEKSNIIRGWIFGTTLDSKTQSLLIVNNATNVVIKVCEFQFCNDPFLGVYYHKNNKSWMESEFRVYSSANNCTFEYVSQPFLMDLEGKQGNFKNLREFVFKNIDGYFKIYSKHTPINLVRDLPQGFSALEPLVDLPIGINITRFKTLLALHRSYLTPGDSSSGWTAGAAAYYVGYLQPRTFLLKYNENGTITDAVDCALDPLSETKCTLKSFTVEKGIYQTSNFRVQPTESIVRFPNITNLCPFGEVFNATRFASVYAWNRKRISNCVADYSVLYNSASFSTFKCYGVSPTKLNDLCFTNVYADSFVIRGDEVRQIAPGQTGKIADYNYKLPDDFTGCVIAWNSNNLDSKVGGNYNYLYRLFRKSNLKPFERDISTEIYQAGSTPCNGVEGFNCYFPLQSYGFQPTNGVGYQPYRVVVLSFELLHAPATVCGPKKSTNLVKNKCVNFNFNGLTGTGVLTESNKKFLPFQQFGRDIADTTDAVRDPQTLEILDITPCSFGGVSVITPGTNTSNQVAVLYQGVNCTEVPVAIHADQLTPTWRVYSTGSNVFQTRAGCLIGAEHVNNSYECDIPIGAGICASYQTQTNSPRRARSVASQSIIAYTMSLGAENSVAYSNNSIAIPTNFTISVTTEILPVSMTKTSVDCTMYICGDSTECSNLLLQYGSFCTQLNRALTGIAVEQDKNTQEVFAQVKQIYKTPPIKDFGGFNFSQILPDPSKPSKRSFIEDLLFNKVTLADAGFIKQYGDCLGDIAARDLICAQKFNGLTVLPPLLTDEMIAQYTSALLAGTITSGWTFGAGAALQIPFAMQMAYRFNGIGVTQCVLYENQKLIANQFNSAIGKIQDSLSSTASALGKLQDVVNQNAQALNTLVKQLSSNFGAISSVLNDILSRLDKVEAEVQIDRLITGRLQSLQTYVTQQLIRAAEIRASANLAATKMSECVLGQSKRVDFCGKGYHLMSFPQSAPHGVVFLHVTYVPAQEKNFTTAPAICHDGKAHFPREGVFVSNGTHWFVTQRNFYEPQIITTDNTFVCGNCDVVIGIVNNTVYDPLQPELDSGGGSGGGQIYEGKLTAEGLRFGIVASRFNHALVDRLVEGAIDAIVRHGGREEDITLVRVPGSWEIPVAAGELARKEDIDAVIAIGVLIRGATPHFDYIASEVSKGLADLSLELRKPITFGVITADTLEQAIERAGTKHGNKGWEAALSAIEMANLFKSLR

SEQ ID NO: 13889 - protein, 1307 aa, Artificial Sequence
  SARS-CoV-2/Netherlands/ZuidHolland_2/2020__EPI_ISL_414556 spike protein (1-1147)(N914C_S1123C) LumSynth construct
MFVFLVLLPLVSSQCVNLTTRTQLPPAYTNSFTRGVYYPDKVFRSSVLHSTQDLFLPFFSNVTWFHAIHVSGTNGTKRFDNPVLPFNDGVYFASTEKSNIIRGWIFGTTLDSKTQSLLIVNNATNVVIKVCEFQFCNDPFLGVYYHKNNKSWMESEFRVYSSANNCTFEYVSQPFLMDLEGKQGNFKNLREFVFKNIDGYFKIYSKHTPINLVRDLPQGFSALEPLVDLPIGINITRFQTLLALHRSYLTPGDSSSGWTAGAAAYYVGYLQPRTFLLKYNENGTITDAVDCALDPLSETKCTLKSFTVEKGIYQTSNFRVQPTESIVRFPNITNLCPFGEVFNATRFASVYAWNRKRISNCVADYSVLYNSASFSTFKCYGVSPTKLNDLCFTNVYADSFVIRGDEVRQIAPGQTGKIADYNYKLPDDFTGCVIAWNSNNLDSKVGGNYNYLYRLFRKSNLKPFERDISTEIYQAGSTPCNGVEGFNCYFPLQSYGFQPTNGVGYQPYRVVVLSFELLHAPATVCGPKKSTNLVKNKCVNFNFNGLTGTGVLTESNKKFLPFQQFGRDIADTTDAVRDPQTLEILDITPCSFGGVSVITPGTNTSNQVAVLYQGVNCTEVPVAIHADQLTPTWRVYSTGSNVFQTRAGCLIGAEHVNNSYECDIPIGAGICASYQTQTNSPRRARSVASQSIIAYTMSLGAENSVAYSNNSIAIPTNFTISVTTEILPVSMTKTSVDCTMYICGDSTECSNLLLQYGSFCTQLNRALTGIALEQDKNTQEVFAQVKQIYKTPPIKDFGGFNFSQILPDPSKPSKRSFIEDLLFNKVTLADAGFIKQYGDCLGDIAARDLICAQKFNGLTVLPPLLTDEMIAQYTSALLAGTITSGWTFGAGAALQIPFAMQMAYRFNGIGVTQCVLYENQKLIANQFNSAIGKIQDSLSSTASALGKLQDVVNQNAQALNTLVKQLSSNFGAISSVLNDILSRLDKVEAEVQIDRLITGRLQSLQTYVTQQLIRAAEIRASANLAATKMSECVLGQSKRVDFCGKGYHLMSFPQSAPHGVVFLHVTYVPAQEKNFTTAPAICHDGKAHFPREGVFVSNGTHWFVTQRNFYEPQIITTDNTFVCGNCDVVIGIVNNTVYDPLQPELDSGGGSGGGQIYEGKLTAEGLRFGIVASRFNHALVDRLVEGAIDAIVRHGGREEDITLVRVPGSWEIPVAAGELARKEDIDAVIAIGVLIRGATPHFDYIASEVSKGLADLSLELRKPITFGVITADTLEQAIERAGTKHGNKGWEAALSAIEMANLFKSLR

SEQ ID NO: 13890 - protein, 1307 aa, Artificial Sequence
  SARS-CoV-2/USA/WA-UW31/2020__EPI_ISL_414618 spike protein (1-1147)(N914C_S1123C) LumSynth construct
MFVFLVLLPLVSSQCVNLTTRTQLPPAYTNSFTRGVYYPDKVFRSSVLHSTQDLFLPFFSNVTWFHAIHVSGTNGTKRFDNPVLPFNDGVYFASTEKSNIIRGWIFGTTLDSKTQSLLIVNNATNVVIKVCEFQFCNDPFLGVYYHKNNKSWMESEFRVYSSANNCTFEYVSQPFLMDLEGKQGNFKNLREFVFKNIDGYFKIYSKHTPINLVRDLPQGFSALEPLVDLPIGINITRFQTLLALHRSYLTPGDSSSGWTAGAAAYYVGYLQPRTFLLKYNENGTITDAVDCALDPLSETKCTLKSFTVEKGIYQTSNFRVQPTESIVRFPNITNLCPFGEVFNATRFASVYAWNRKRISNCVADYSVLYNSASFSTFKCYGVSPTKLNDLCFTNVYADSFVIRGDEVRQIAPGQTGKIADYNYKLPDDFTGCVIAWNSNNLDSKVGGNYNYLYRLFRKSNLKPFERDISTEIYQAGSTPCNGAEGFNCYFPLQSYGFQPTNGVGYQPYRVVVLSFELLHAPATVCGPKKSTNLVKNKCVNFNFNGLTGTGVLTESNKKFLPFQQFGRDIADTTDAVRDPQTLEILDITPCSFGGVSVITPGTNTSNQVAVLYQDVNCTEVPVAIHADQLTPTWRVYSTGSNVFQTRAGCLIGAEHVNNSYECDIPIGAGICASYQTQTNSPRRARSVASQSIIAYTMSLGAENSVAYSNNSIAIPTNFTISVTTEILPVSMTKTSVDCTMYICGDSTECSNLLLQYGSFCTQLNRALTGIAVEQDKNTQEVFAQVKQIYKTPPIKDFGGFNFSQILPDPSKPSKRSFIEDLLFNKVTLADAGFIKQYGDCLGDIAARDLICAQKFNGLTVLPPLLTDEMIAQYTSALLAGTITSGWTFGAGAALQIPFAMQMAYRFNGIGVTQCVLYENQKLIANQFNSAIGKIQDSLSSTASALGKLQDVVNQNAQALNTLVKQLSSNFGAISSVLNDILSRLDKVEAEVQIDRLITGRLQSLQTYVTQQLIRAAEIRASANLAATKMSECVLGQSKRVDFCGKGYHLMSFPQSAPHGVVFLHVTYVPAQEKNFTTAPAICHDGKAHFPREGVFVSNGTHWFVTQRNFYEPQIITTDNTFVCGNCDVVIGIVNNTVYDPLQPELDSGGGSGGGQIYEGKLTAEGLRFGIVASRFNHALVDRLVEGAIDAIVRHGGREEDITLVRVPGSWEIPVAAGELARKEDIDAVIAIGVLIRGATPHFDYIASEVSKGLADLSLELRKPITFGVITADTLEQAIERAGTKHGNKGWEAALSAIEMANLFKSLR

SEQ ID NO: 13891 - protein, 1307 aa, Artificial Sequence
  SARS-CoV-2/South Korea/SNU01/2020__EPI_ISL_411929 spike protein (1-1147)(N914C_S1123C) LumSynth construct
MFVFLVLLPLVSSQCVNLTTRTQLPPAYTNSFTRGVYYPDKVFRSSVLHSTQDLFLPFFSNVTWFHAIHVSGTNGTKRFDNPVLPFNDGVYFASTEKSNIIRGWIFGTTLDSKTQSLLIVNNATNVVIKVCEFQFCNDPFLGVYYHKNNKSWMESEFRVYSSANNCTFEYVSQPFLMDLEGKQGNFKNLREFVFKNIDGYFKIYSKHTPINLVRDLPQGFWALEPLVDLPIGINITRFQTLLALHRSYLTPGDSSSGWTAGAAAYYVGYLQPRTFLLKYNENGTITDAVDCALDPLSETKCTLKSFTVEKGIYQTSNFRVQPTESIVRFPNITNLCPFGEVFNATRFASVYAWNRKRISNCVADYSVLYNSASFSTFKCYGVSPTKLNDLCFTNVYADSFVIRGDEVRQIAPGQTGKIADYNYKLPDDFTGCVIAWNSNNLDSKVGGNYNYLYRLFRKSNLKPFERDISTEIYQAGSTPCNGVEGFNCYFPLQSYGFQPTNGVGYQPYRVVVLSFELLHAPATVCGPKKSTNLVKNKCVNFNFNGLTGTGVLTESNKKFLPFQQFGRDIADTTDAVRDPQTLEILDITPCSFGGVSVITPGTNTSNQVAVLYQDVNCTEVPVAIHADQLTPTWRVYSTGSNVFQTRAGCLIGAEHVNNSYECDIPIGAGICASYQTQTNSPRRARSVASQSIIAYTMSLGAENSVAYSNNSIAIPTNFTISVTTEILPVSMTKTSVDCTMYICGDSTECSNLLLQYGSFCTQLNRALTGIAVEQDKNTQEVFAQVKQIYKTPPIKDFGGFNFSQILPDPSKPSKRSFIEDLLFNKVTLADAGFIKQYGDCLGDIAARDLICAQKFNGLTVLPPLLTDEMIAQYTSALLAGTITSGWTFGAGAALQIPFAMQMAYRFNGIGVTQCVLYENQKLIANQFNSAIGKIQDSLSSTASALGKLQDVVNQNAQALNTLVKQLSSNFGAISSVLNDILSRLDKVEAEVQIDRLITGRLQSLQTYVTQQLIRAAEIRASANLAATKMSECVLGQSKRVDFCGKGYHLMSFPQSAPHGVVFLHVTYVPAQEKNFTTAPAICHDGKAHFPREGVFVSNGTHWFVTQRNFYEPQIITTDNTFVCGNCDVVIGIVNNTVYDPLQPELDSGGGSGGGQIYEGKLTAEGLRFGIVASRFNHALVDRLVEGAIDAIVRHGGREEDITLVRVPGSWEIPVAAGELARKEDIDAVIAIGVLIRGATPHFDYIASEVSKGLADLSLELRKPITFGVITADTLEQAIERAGTKHGNKGWEAALSAIEMANLFKSLR

SEQ ID NO: 13892 - protein, 1307 aa, Artificial Sequence
  SARS-CoV-2/China/WF0004/2020__EPI_ISL_413694 spike protein (1-1147)(N914C_S1123C) LumSynth construct
MFVFLVLLPLVSSQCVNLTTRTQLPPAYTNSFTRGVYYPDKVFRSSVLHSTQDLFLPFFSNVTWFHAIHVSGTNGTKRFDNPVLPFNDGVYFASTEKSNIIRGWIFGTTLDSKTQSLLIVNNATNVVIKVCEFQFCNDPFLGVYYHKNNKSWTESEFRVYSSANNCTFEYVSQPFLMDLEGKQGNFKNLREFVFKNIDGYFKIYSKHTPINLVRDLPQGFSALEPLVDLPIGINITRFQTLLALHRSYLTPGDSSSGWTAGAAAYYVGYLQPRTFLLKYNENGTITDAVDCALDPLSETKCTLKSFTVEKGIYQTSNFRVQPTESIVRFPNITNLCPFGEVFNATRFASVYAWNRKRISNCVADYSVLYNSASFSTFKCYGVSPTKLNDLCFTNVYADSFVIRGDEVRQIAPGQTGKIADYNYKLPDDFTGCVIAWNSNNLDSKVGGNYNYLYRLFRKSNLKPFERDISTEIYQAGSTPCNGVEGFNCYFPLQSYGFQPTNGVGYQPYRVVVLSFELLHAPATVCGPKKSTNLVKNKCVNFNFNGLTGTGVLTESNKKFLPFQQFGRDIADTTDAVRDPQTLEILDITPCSFGGVSVITPGTNTSNQVAVLYQDVNCTEVPVAIHADQLTPTWRVYSTGSNVFQTRAGCLIGAEHVNNSYECDIPIGAGICASYQTQTNSPRRARSVASQSIIAYTMSLGAENSVAYSNNSIAIPTNFTISVTTEILPVSMTKTSVDCTMYICGDSTECSNLLLQYGSFCTQLNRALTGIAVEQDKNTQEVFAQVKQIYKTPPIKDFGGFNFSQILPDPSKPSKRSFIEDLLFNKVTLADAGFIKQYGDCLGDIAARDLICAQKFNGLTVLPPLLTDEMIAQYTSALLAGTITSGWTFGAGAALQIPFAMQMAYRFNGIGVTQCVLYENQKLIANQFNSAIGKIQDSLSSTASALGKLQDVVNQNAQALNTLVKQLSSNFGAISSVLNDILSRLDKVEAEVQIDRLITGRLQSLQTYVTQQLIRAAEIRASANLAATKMSECVLGQSKRFDFCGKGYHLMSFPQSAPHGVVFLHVTYVPAQEKNFTTAPAICHDGKAHFPREGVFVSNGTHWFVTQRNFYEPQIITTDNTFVCGNCDVVIGIVNNTVYDPLQPELDSGGGSGGGQIYEGKLTAEGLRFGIVASRFNHALVDRLVEGAIDAIVRHGGREEDITLVRVPGSWEIPVAAGELARKEDIDAVIAIGVLIRGATPHFDYIASEVSKGLADLSLELRKPITFGVITADTLEQAIERAGTKHGNKGWEAALSAIEMANLFKSLR

SEQ ID NO: 13893 - protein, 1307 aa, Artificial Sequence
  SARS-CoV-2/China/WF0028/2020__EPI_ISL_413791 spike protein (1-1147)(N914C_S1123C) LumSynth construct
MFVFLVLLPLVSSQCVNLTTRTQLPPAYTNSFTRGVYYPDKVFRSSVLHSTQDLFLPFFSNVTWFHAIHVSGTNGTKRFDNPVLPFNDGVYFASTEKSNIIRGWIFGTTLDSKTQSLLIVNNATNVVIKVCEFQFCNDPFLGVYYHKNNKSWMESEFRVYSSANNCTFEYVSQPFLMDLEGKQGNFKNLREFVFKNIDGYFKIYSKHTPINLVRDLPQGFSALEPLVDLPIGINITRFQTLLALHRSYLTPGDSSSGWTAGAAAYYVGYLQPRTFLLKYNENGTITDAVDCALDPLSETKCTLKSFTVEKGIYQTSNFRVQPTESIVRFPNITNLCPFGEVFNATRFASVYAWNRKRISNCVADYSVLYNSASFSTFKCYGVSPTKLNDLCFTNVYADSFVIRGDEVRQIAPGQTGKIADYNYKLPDDFTGCVIAWNSNNLDSKVGGNYNYLYRLFRKSNLKPFERDISTEIYQAGSTPCNGVEGFNCYFPLQSYGFQPTNGVGYQPYRVVVLSFELLHAPATVCGPKKSTNLVKNKCVNFNFNGLTGTGVLTESNKKFLPFQQFGRDIADTTDAVRDPQTLEILDITPCSFGGVSVITPGTNTSNQVAVLYQDVNCTEVPVAIHADQLTPTWRVYSTGSNVFQTRAGCLIGAEHVNNSYECDIPIGAGICASYQTQTNSPRRARSVASQSIIAYTMSLGAENSVAYSNNSIAIPTNFTISVTTEILPVSMTKTSVDCTMYICGDSTECSNLLLQYGSFCTQLNRALTGIAVEQDKNTQEVFAQVKQIYKTPPIKDFGGFNFSQILPDPSKPSKRSFIEDLLFNKVTLADAGFIKQYGDCLGDIAARDLICAQKFNGLTVLPPLLTDEMIAQYTSALLAGTITSGWTFGAGAALQIPFAMQMAYRFNGIGVTQCVLYENQKLIANQFNSAIGKIQDSLSSTASALGKLQDVVNQNAQALNTLVKQLSSNFGAISSVLNDILSRLDKVEAEVQIDRLITGRLQSLQTYVTQQLIRAAEIRASANLAATKMSECVLGQSKRVDFCGKGYHLMSFPQSAPHGVVFLHVTYVPAQEKNFTTAPAICHDGKAHFPREGVFVSNGTHWFVTQRNFYEPQIITTDNTFVCGNCDVVIGIVNNTVYDPLQPELESGGGSGGGQIYEGKLTAEGLRFGIVASRFNHALVDRLVEGAIDAIVRHGGREEDITLVRVPGSWEIPVAAGELARKEDIDAVIAIGVLIRGATPHFDYIASEVSKGLADLSLELRKPITFGVITADTLEQAIERAGTKHGNKGWEAALSAIEMANLFKSLR

SEQ ID NO: 13894 - protein, 1307 aa, Artificial Sequence
  SARS-CoV-2/2019-nCoV/USA-CruiseA-18/2020__MT159716.1 spike protein (1-1147)(N914C_S1123C) LumSynth construct
MFVFLVLLPLVSSQCVNLTTRTQLPPAYTNSFTRGVYYPDKVFRSSVLHSTQDLFLPFFSNVTWFHAIHVSGTNGTKRFDNPVLPFNDGVYFASTEKSNIIRGWIFGTTLDSKTQSLLIVNNATNVVIKVCEFQFCNDPFLGVYYHKNNKSWMESELRVYSSANNCTFEYVSQPFLMDLEGKQGNFKNLREFVFKNIDGYFKIYSKHTPINLVRDLPQGFSALEPLVDLPIGINITRFQTLLALHRSYLTPGDSSSGWTAGAAAYYVGYLQPRTFLLKYNENGTITDAVDCALDPLSETKCTLKSFTVEKGIYQTSNFRVQPTESIVRFPNITNLCPFGEVFNATRFASVYAWNRKRISNCVADYSVLYNSASFSTFKCYGVSPTKLNDLCFTNVYADSFVIRGDEVRQIAPGQTGKIADYNYKLPDDFTGCVIAWNSNNLDSKVGGNYNYLYRLFRKSNLKPFERDISTEIYQAGSTPCNGVEGFNCYFPLQSYGFQPTNGVGYQPYRVVVLSFELLHAPATVCGPKKSTNLVKNKCVNFNFNGLTGTGVLTESNKKFLPFQQFGRDIADTTDAVRDPQTLEILDITPCSFGGVSVITPGTNTSNQVAVLYQDVNCTEVPVAIHADQLTPTWRVYSTGSNVFQTRAGCLIGAEHVNNSYECDIPIGAGICASYQTQTNSPRRARSVASQSIIAYTMSLGAENSVAYSNNSIAIPTNFTISVTTEILPVSMTKTSVDCTMYICGDSTECSNLLLQYGSFCTQLNRALTGIAVEQDKNTQEVFAQVKQIYKTPPIKDFGGFNFSQILPDPSKPSKRSFIEDLLFNKVTLADAGFIKQYGDCLGDIAARDLICAQKFNGLTVLPPLLTDEMIAQYTSALLAGTITSGWTFGAGAALQIPFAMQMAYRFNGIGVTQCVLYENQKLIANQFNSAIGKIQDSLSSTASALGKLQDVVNQNAQALNTLVKQLSSNFGAISSVLNDILSRLDKVEAEVQIDRLITGRLQSLQTYVTQQLIRAAEIRASANLAATKMSECVLGQSKRVDFCGKGYHLMSFPQSAPHGVVFLHVTYVPAQEKNFTTAPAICHDGKAHFPREGVFVSNGTHWFVTQRNFYEPQIITTDNTFVCGNCDVVIGIVNNTVYDPLQPELDSGGGSGGGQIYEGKLTAEGLRFGIVASRFNHALVDRLVEGAIDAIVRHGGREEDITLVRVPGSWEIPVAAGELARKEDIDAVIAIGVLIRGATPHFDYIASEVSKGLADLSLELRKPITFGVITADTLEQAIERAGTKHGNKGWEAALSAIEMANLFKSLR

SEQ ID NO: 13895 - protein, 1307 aa, Artificial Sequence
  SARS-CoV-2/SARS-CoV-2/Yunnan-01/human/2020/CHN__MT049951.1 spike protein (1-1147)(N914C_S1123C) LumSynth construct
MFVFLVLLPLVSSQCVNLTTRTQLPPANTNSFTRGVYYPDKVFRSSVLHSTQDLFLPFFSNVTWFHAIHVSGTNGTKRFDNPVLPFNDGVYFASTEKSNIIRGWIFGTTLDSKTQSLLIVNNATNVVIKVCEFQFCNDPFLGVYYHKNNKSWMESEFRVYSSANNCTFEYVSQPFLMDLEGKQGNFKNLREFVFKNIDGYFKIYSKHTPINLVRDLPQGFSALEPLVDLPIGINITRFQTLLALHRSYLTPGDSSSGWTAGAAAYYVGYLQPRTFLLKYNENGTITDAVDCALDPLSETKCTLKSFTVEKGIYQTSNFRVQPTESIVRFPNITNLCPFGEVFNATRFASVYAWNRKRISNCVADYSVLYNSASFSTFKCYGVSPTKLNDLCFTNVYADSFVIRGDEVRQIAPGQTGKIADYNYKLPDDFTGCVIAWNSNNLDSKVGGNYNYLYRLFRKSNLKPFERDISTEIYQAGSTPCNGVEGFNCYFPLQSYGFQPTNGVGYQPYRVVVLSFELLHAPATVCGPKKSTNLVKNKCVNFNFNGLTGTGVLTESNKKFLPFQQFGRDIADTTDAVRDPQTLEILDITPCSFGGVSVITPGTNTSNQVAVLYQDVNCTEVPVAIHADQLTPTWRVYSTGSNVFQTRAGCLIGAEHVNNSYECDIPIGAGICASYQTQTNSPRRARSVASQSIIAYTMSLGAENSVAYSNNSIAIPTNFTISVTTEILPVSMTKTSVDCTMYICGDSTECSNLLLQYGSFCTQLNRALTGIAVEQDKNTQEVFAQVKQIYKTPPIKDFGGFNFSQILPDPSKPSKRSFIEDLLFNKVTLADAGFIKQYGDCLGDIAARDLICAQKFNGLTVLPPLLTDEMIAQYTSALLAGTITSGWTFGAGAALQIPFAMQMAYRFNGIGVTQCVLYENQKLIANQFNSAIGKIQDSLSSTASALGKLQDVVNQNAQALNTLVKQLSSNFGAISSVLNDILSRLDKVEAEVQIDRLITGRLQSLQTYVTQQLIRAAEIRASANLAATKMSECVLGQSKRVDFCGKGYHLMSFPQSAPHGVVFLHVTYVPAQEKNFTTAPAICHDGKAHFPREGVFVSNGTHWFVTQRNFYEPQIITTDNTFVCGNCDVVIGIVNNTVYDPLQPELDSGGGSGGGQIYEGKLTAEGLRFGIVASRFNHALVDRLVEGAIDAIVRHGGREEDITLVRVPGSWEIPVAAGELARKEDIDAVIAIGVLIRGATPHFDYIASEVSKGLADLSLELRKPITFGVITADTLEQAIERAGTKHGNKGWEAALSAIEMANLFKSLR

SEQ ID NO: 13896 - protein, 1307 aa, Artificial Sequence
  SARS-CoV-2/USA/WA-UW292/2020__EPI_ISL_418077 spike protein (1-1147)(N914C_S1123C) LumSynth construct
MFVFLVLLPLVSSQCVNLTTRTQLPPAYTNSFTRGVYYPDKVFRSSVLHSTQDLFLPFFSNVTWFHAIHVSGTNGTKRFDNPVLPFNDGVYFASTEKSNIIRGWIFGTTLDSKTQSLLIVNNATNVVIKVCEFQFCNDPFLGVYYHKNNKSWMESEFRVYSSANNCTFEYVSQPFLMDLEGKQGNFKNLREFVFKNIDGYFKIYSKHTPINLVRDLPQGFSALEPLVDLPIGINITRFQTLLALHRSYLTPGDSSSGWTAGAAAYYVGYLQPRTFLLKYNENGTITDAVDCALDPLSETKCTLKSFTVEKGIYQTSNFRVQPTESIVRFPNITNLCPFGEVFNATRFASVYAWNRKRISNCVADYSVLYNSASFSTFKCYGVSPTKLNDLCFTNVYADSFVIRGDEVRQIAPGQTGKIADYNYKLPDDFTGCVIAWNSNNLDSKVGGNYNYLYRLFRKSNLKPFERDISTEIYQASSTPCNGVEGFNCYFPLQSYGFQPTNGVGYQPYRVVVLSFELLHAPATVCGPKKSTNLVKNKCVNFNFNGLTGTGVLTESNKKFLPFQQFGRDIADTTDAVRDPQTLEILDITPCSFGGVSVITPGTNTSNQVAVLYQDVNCTEVPVAIHADQLTPTWRVYSTGSNVFQTRAGCLIGAEHVNNSYECDIPIGAGICASYQTQTNSPRRARSVASQSIIAYTMSLGAENSVAYSNNSIAIPTNFTISVTTEILPVSMTKTSVDCTMYICGDSTECSNLLLQYGSFCTQLNRALTGIAVEQDKNTQEVFAQVKQIYKTPPIKDFGGFNFSQILPDPSKPSKRSFIEDLLFNKVTLADAGFIKQYGDCLGDIAARDLICAQKFNGLTVLPPLLTDEMIAQYTSALLAGTITSGWTFGAGAALQIPFAMQMAYRFNGIGVTQCVLYENQKLIANQFNSAIGKIQDSLSSTASALGKLQDVVNQNAQALNTLVKQLSSNFGAISSVLNDILSRLDKVEAEVQIDRLITGRLQSLQTYVTQQLIRAAEIRASANLAATKMSECVLGQSKRVDFCGKGYHLMSFPQSAPHGVVFLHVTYVPAQEKNFTTAPAICHDGKAHFPREGVFVSNGTHWFVTQRNFYEPQIITTDNTFVCGNCDVVIGIVNNTVYDPLQPELDSGGGSGGGQIYEGKLTAEGLRFGIVASRFNHALVDRLVEGAIDAIVRHGGREEDITLVRVPGSWEIPVAAGELARKEDIDAVIAIGVLIRGATPHFDYIASEVSKGLADLSLELRKPITFGVITADTLEQAIERAGTKHGNKGWEAALSAIEMANLFKSLR

SEQ ID NO: 13897 - protein, 1307 aa, Artificial Sequence
  SARS-CoV-2/Iceland/192/2020__EPI_ISL_417819 spike protein (1-1147)(N914C_S1123C) LumSynth construct
MFVFFVLLPLVSSQCVNLTTRTQLPPAYTNSFTRGVYYPDKVFRSSVLHSTQDLFLPFFSNVTWFHAIHVSGTNGTKRFDNPVLPFNDGVYFASTEKSNIIRGWIFGTTLDSKTQSLLIVNNATNVVIKVCEFQFCNDPFLGVYYHKNNKSWMESEFRVYSSANNCTFEYVSQPFLMDLEGKQGNFKNLREFVFKNIDGYFKIYSKHTPINLVRDLPQGFSALEPLVDLPIGINITRFQTLLALHRSYLTPGDSSSGWTAGAAAYYVGYLQPRTFLLKYNENGTITDAVDCALDPLSETKCTLKSFTVEKGIYQTSNFRVQPTESIVRFPNITNLCPFGEVFNATRFASVYAWNRKRISNCVADYSVLYNSASFSTFKCYGVSPTKLNDLCFTNVYADSFVIRGDEVRQIAPGQTGKIADYNYKLPDDFTGCVIAWNSNNLDSKVGGNYNYLYRLFRKSNLKPFERDISTEIYQAGSTPCNGVEGFNCYFPLQSYGFQPTNGVGYQPYRVVVLSFELLHAPATVCGPKKSTNLVKNKCVNFNFNGLTGTGVLTESNKKFLPFQQFGRDIADTTDAVRDPQTLEILDITPCSFGGVSVITPGTNTSNQVAVLYQGVNCTEVPVAIHADQLTPTWRVYSTGSNVFQTRAGCLIGAEHVNNSYECDIPIGAGICASYQTQTNSPRRARSVASQSIIAYTMSLGAENSVAYSNNSIAIPTNFTISVTTEILPVSMTKTSVDCTMYICGDSTECSNLLLQYGSFCTQLNRALTGIAVEQDKNTQEVFAQVKQIYKTPPIKDFGGFNFSQILPDPSKPSKRSFIEDLLFNKVTLADAGFIKQYGDCLGDIAARDLICAQKFNGLTVLPPLLTDEMIAQYTSALLAGTITSGWTFGAGAALQIPFAMQMAYRFNGIGVTQCVLYENQKLIANQFNSAIGKIQDSLSSTASALGKLQDVVNQNAQALNTLVKQLSSNFGAISSVLNDILSRLDKVEAEVQIDRLITGRLQSLQTYVTQQLIRAAEIRASANLAATKMSECVLGQSKRVDFCGKGYHLMSFPQSAPHGVVFLHVTYVPAQEKNFTTAPAICHDGKAHFPREGVFVSNGTHWFVTQRNFYEPQIITTDNTFVCGNCDVVIGIVNNTVYDPLQPELDSGGGSGGGQIYEGKLTAEGLRFGIVASRFNHALVDRLVEGAIDAIVRHGGREEDITLVRVPGSWEIPVAAGELARKEDIDAVIAIGVLIRGATPHFDYIASEVSKGLADLSLELRKPITFGVITADTLEQAIERAGTKHGNKGWEAALSAIEMANLFKSLR

SEQ ID NO: 13898 - protein, 1307 aa, Artificial Sequence
  SARS-CoV-2/Belgium/ULG-6939/2020__EPI_ISL_417020 spike protein (1-1147)(N914C_S1123C) LumSynth construct
MFVFLVLLPLVSSQCVNLTTRTQLPPAYTNSFTRGVYYPDKVFRSSVLHSTQDLFLPFFSNVTWFHAIHVSGTNGTKRFDNPVLPFNDGVYFASTEKSNIIRGWIFGTTLDSKTQSLLIVNNATNVVIKVCEFQFCNDPFLGVYYHKNNKSWMESEFRVYSSANNCTFEYVSQPFLMDLEGKQGNFKNLREFVFKNIDGYFKIYSKHTPINLVRDLPQGFSALEPLVDLPIGINITRFQTLLALHRSYLTPGDSSSGWTAGAAAYYVGYLQPRTFLLKYNENGTITDAVDCALDPLSETKCTLKSFTVEKGIYQTSNFRVQPTESIVRFPNITNLCPFGEVFNATRFASVYAWNRKRISNCVADYSVLYNSASFSTFKCYGVSPTKLNDLCFTNVYADSFVIRGDEVRQIAPGQTGKIADYNYKLPDDFTGCVIAWNSNNLDSKVGGNYNYLYRLFRKSNLKPFERDISTEIYQAGSTPCNGVEGFNCYFPLQSYGFQPTNGVGYQPYRVVVLSFELLHAPATVCGPKKSTNLVKNKCVNFNFNGLTGTGVLTESNKKFLPFQQFGRDIADTTDAVRDPQTLEILDITPCSFGGVSVITPGTNTSNQVAVLYQGVNCTEVPVAIHADQLTPTWRVYSTGSNVFQTRAGCLIGAEHVNNSYECDIPIGAGICASYQTQTNSPRRARSVASQSIIAYTMSLGAENSVVYSNNSIAIPTNFTISVTTEILPVSMTKTSVDCTMYICGDSTECSNLLLQYGSFCTQLNRALTGIAVEQDKNTQEVFAQVKQIYKTPPIKDFGGFNFSQILPDPSKPSKRSFIEDLLFNKVTLADAGFIKQYGDCLGDIAARDLICAQKFNGLTVLPPLLTDEMIAQYTSALLAGTITSGWTFGAGAALQIPFAMQMAYRFNGIGVTQCVLYENQKLIANQFNSAIGKIQDSLSSTASALGKLQDVVNQNAQALNTLVKQLSSNFGAISSVLNDILSRLDKVEAEVQIDRLITGRLQSLQTYVTQQLIRAAEIRASANLAATKMSECVLGQSKRVDFCGKGYHLMSFPQSAPHGVVFLHVTYVPAQEKNFTTAPAICHDGKAHFPREGVFVSNGTHWFVTQRNFYEPQIITTDNTFVCGNCDVVIGIVNNTVYDPLQPELDSGGGSGGGQIYEGKLTAEGLRFGIVASRFNHALVDRLVEGAIDAIVRHGGREEDITLVRVPGSWEIPVAAGELARKEDIDAVIAIGVLIRGATPHFDYIASEVSKGLADLSLELRKPITFGVITADTLEQAIERAGTKHGNKGWEAALSAIEMANLFKSLR

SEQ ID NO: 13899 - protein, 1307 aa, Artificial Sequence
  SARS-CoV-2/France/HF2496/2020__EPI_ISL_418231 spike protein (1-1147)(N914C_S1123C) LumSynth construct
MFVFLVLLPLVSSQCVNLTTRTQLPPAYTNSFTRGVYYPDKVFRSSVLHSTQDLFLPFFSNVTWFHAIHVSGTNGTKRFDNPVLPFNDGVYFASTEKSNIIRGWIFGTTLDSKTQSLLIVNNATNVVIKVCEFQFCNDPFLGVYYHKNNKSWMESEFRVYSSANNCTFEYVSQPFLMDLEGKQGNFKNLREFVFKNIDGYFKIYSKHTPINLVRDLPQGFSALEPLVDLPIGINITRFQTLLALHRSYLTPGDSSSGWTAGAAAYYVGYLQPRTFLLKYNENGTITDAVDCALDPLSETKCTLKSFTVEKGIYQTSNFRVQPTESIVRFPNITNLCPFGEVFNATRFASVYAWNRKRISNCVADYSVLYNSASFSTFKCYGVSPTKLNDLCFTNVYADSFVIRGDEVRQIAPGQTGKIADYNYKLPDDFTGCVIAWNSNNLDSKVGGNYNYLYRLFRKSNLKPFERDISTEIYQAGSTPCNGVEGFNCYFPLQSYGFQPTNGVGYQPYRVVVLSFELLHAPATVCGPKKSTNLVKNKCVNFNFNGLTGTGVLTESNKKFLPFQQFGRDIADTTDAVRDPQTLEILDITPCSFGGVSVITPGTNTSNQVAVLYQGVNCTEVPVAIHADQLTPTWRVYSTGSNVFQTRAGCLIGAEHVNNSYECDIPIGAGICASYQTQTNSPRRARSVASQSIIAYTMSLGAENSVAYSNNSIAIPTNFTISVTTEILPVSMTKTSVDCTMYICGDSTECSNLLLQYGSFCTQLNRALTGIAVEQDKNTQEVFAQVKQIYKTPPIKDFGGFNFSQILPDPSKPSKRSFIEDLLFNKVTLADAGFIKQYGDCLGDIVARDLICAQKFNGLTVLPPLLTDEMIAQYTSALLAGTITSGWTFGAGAALQIPFAMQMAYRFNGIGVTQCVLYENQKLIANQFNSAIGKIQDSLSSTASALGKLQDVVNQNAQALNTLVKQLSSNFGAISSVLNDILSRLDKVEAEVQIDRLITGRLQSLQTYVTQQLIRAAEIRASANLAATKMSECVLGQSKRVDFCGKGYHLMSFPQSAPHGVVFLHVTYVPAQEKNFTTAPAICHDGKAHFPREGVFVSNGTHWFVTQRNFYEPQIITTDNTFVCGNCDVVIGIVNNTVYDPLQPELDSGGGSGGGQIYEGKLTAEGLRFGIVASRFNHALVDRLVEGAIDAIVRHGGREEDITLVRVPGSWEIPVAAGELARKEDIDAVIAIGVLIRGATPHFDYIASEVSKGLADLSLELRKPITFGVITADTLEQAIERAGTKHGNKGWEAALSAIEMANLFKSLR

SEQ ID NO: 13900 - protein, 1307 aa, Artificial Sequence
  SARS-CoV-2/USA/WA-UW291/2020__EPI_ISL_418076 spike protein (1-1147)(N914C_S1123C) LumSynth construct
MFVFLVLLPLVSSQCVNLTTRTQLPPAYTNSFTRGVYYPDKVFRSSVLHSTQDLFLPFFSNVTWFHAIHVSGTNGTKRFDNPVLPFNDGVYFASTEKSNIIRGWIFGTTLDSKTQSLLIVNNATNVVIKVCEFQFCNDPFLGVYYHKNNKSWMESEFRVYSSANNCTFEYVSQPFLMDLEGKQGNFKNLREFVFKNIDGYFKIYSKHTPINLVRDLPQGFSALEPLVDLPIGINITRFQTLLALHRSYLTPGDSSSGWTAGAAAYYVGYLQPRTFLLKYNENGTITDAVDCALDPLSETKCTLKSFTVEKGIYQTSNFRVQPTESIVRFPNITNLCPFGEVFNATRFASVYAWNRKRISNCVADYSVLYNSASFSTFKCYGVSPTKLNDLCFTNVYADSFVIRGDEVRQIAPGQTGKIADYNYKLPDDFTGCVIAWNSNNLDSKVGGNYNYLYRLFRKSNLKPFERDISTEIYQAGSTPCNGVEGFNCYFPLQSYGFQPTNGVGYQPYRVVVLSFELLHAPATVCGPKKSTNLVKNKCVNFNFNGLTGTGVLTESNKKFLPFQQFGRDIADTTDAVRDPQTLEILDITPCSFGGVSVITPGTNTSNQVAVLYQGVNCTEVPVAIHADQLTPTWRVYSTGSNVFQTRAGCLIGAEHVNNSYECDIPIGAGICASYQTQTNSPRRARSVASQSIIAYTMSLGAENSVAYSNNSIAIPTNFTISVTTEILPVSMTKTSVDCTMYICGDSTECSNLLLQYGSFCTQLNRALTGIAVEQDKNTQEVFAQVKQIYKTPPIKDFGGFNFSQILPDPSKPSKRSFIEDLLFNKVTLADAGFIKQYGDCLGDIAARDLICAQKFNGLTVLPPLLTDEMIAQYTSALLAGTITSGWTFGAGAALQIPFAMQMAYRFNGIGVTQCVLYENQKLIANQFNSAIGKIQYSLSSTASALGKLQDVVNQNAQALNTLVKQLSSNFGAISSVLNDILSRLDKVEAEVQIDRLITGRLQSLQTYVTQQLIRAAEIRASANLAATKMSECVLGQSKRVDFCGKGYHLMSFPQSAPHGVVFLHVTYVPAQEKNFTTAPAICHDGKAHFPREGVFVSNGTHWFVTQRNFYEPQIITTDNTFVCGNCDVVIGIVNNTVYDPLQPELDSGGGSGGGQIYEGKLTAEGLRFGIVASRFNHALVDRLVEGAIDAIVRHGGREEDITLVRVPGSWEIPVAAGELARKEDIDAVIAIGVLIRGATPHFDYIASEVSKGLADLSLELRKPITFGVITADTLEQAIERAGTKHGNKGWEAALSAIEMANLFKSLR

SEQ ID NO: 13901 - protein, 1307 aa, Artificial Sequence; identical to SEQ ID NO: 13864
  SARS-CoV-2/Portugal/PT0034/2020__EPI_ISL_418019 spike protein (1-1147)(N914C_S1123C) LumSynth construct

SEQ ID NO: 13902 - protein, 1307 aa, Artificial Sequence; identical to SEQ ID NO: 13856
  SARS-CoV-2/Iceland/202/2020__EPI_ISL_417750 spike protein (1-1147)(N914C_S1123C) LumSynth construct

SEQ ID NO: 13903 - protein, 1307 aa, Artificial Sequence
  SARS-CoV-2/USA/WA-UW261/2020__EPI_ISL_418046 spike protein (1-1147)(N914C_S1123C) LumSynth construct
MFVFLVLLPLVSSQCVNLTTRTQLPPAYTNSFTRGVYYPDKVFRSSVLHSTQDLFLPFFSNVTWFHAIHVSGTNGTKRFDNPVLPFNDGVYFASTEKSNIIRGWIFGTTLDSKTQSLLIVNNATNVVIKVCEFQFCNDPFLGVYYHKNNKSWMESEFRVYSSANNCTFEYVSQPFLMDLEGKQGNFKNLREFVFKNIDGYFKIYSKHTPINLVRDLPQGFSALEPLVDLPIGINITRFQTLLALHRSYLTPGDSSSGWTAGAAAYYVGYLQPRTFLLKYNENGTITDAVDCALDPLSETKCTLKSFTVEKGIYQTSNFRVQPTESIVRFPNITNLCPFGEVFNATRFTSVYAWNRKRISNCVADYSVLYNSASFSTFKCYGVSPTKLNDLCFTNVYADSFVIRGDEVRQIAPGQTGKIADYNYKLPDDFTGCVIAWNSNNLDSKVGGNYNYLYRLFRKSNLKPFERDISTEIYQAGSTPCNGVEGFNCYFPLQSYGFQPTNGVGYQPYRVVVLSFELLHAPATVCGPKKSTNLVKNKCVNFNFNGLTGTGVLTESNKKFLPFQQFGRDIADTTDAVRDPQTLEILDITPCSFGGVSVITPGTNTSNQVAVLYQDVNCTEVPVAIHADQLTPTWRVYSTGSNVFQTRAGCLIGAEHVNNSYECDIPIGAGICASYQTQTNSPRRARSVASQSIIAYTMSLGAENSVAYSNNSIAIPTNFTISVTTEILPVSMTKTSVDCTMYICGDSTECSNLLLQYGSFCTQLNRALTGIAVEQDKNTQEVFAQVKQIYKTPPIKDFGGFNFSQILPDPSKPSKRSFIEDLLFNKVTLADAGFIKQYGDCLGDIAARDLICAQKFNGLTVLPPLLTDEMIAQYTSALLAGTITSGWTFGAGAALQIPFAMQMAYRFNGIGVTQCVLYENQKLIANQFNSAIGKIQDSLSSTASALGKLQDVVNQNAQALNTLVKQLSSNFGAISSVLNDILSRLDKVEAEVQIDRLITGRLQSLQTYVTQQLIRAAEIRASANLAATKMSECVLGQSKRVDFCGKGYHLMSFPQSAPHGVVFLHVTYVPAQEKNFTTAPAICHDGKAHFPREGVFVSNGTHWFVTQRNFYEPQIITTDNTFVCGNCDVVIGIVNNTVYDPLQPELDSGGGSGGGQIYEGKLTAEGLRFGIVASRFNHALVDRLVEGAIDAIVRHGGREEDITLVRVPGSWEIPVAAGELARKEDIDAVIAIGVLIRGATPHFDYIASEVSKGLADLSLELRKPITFGVITADTLEQAIERAGTKHGNKGWEAALSAIEMANLFKSLR

SEQ ID NO: 13904 - protein, 1307 aa, Artificial Sequence
  SARS-CoV-2/Portugal/PT0035/2020__EPI_ISL_418020 spike protein (1-1147)(N914C_S1123C) LumSynth construct
MFVFLVLLPLVSSQCVNLTTRTQLPPAYTNSFTRGVYYPDKVFRSSVLHSTQDLFLPFFSNVTWFHAIHVSGTNGTKRFDNPVLPFNDGVYFASTEKSNIIRGWIFGTTLDSKTQSLLIVNNATNVVIKVCEFQFCNDPFLGVYYHKNNKSWMESEFRVYSSANNCTFEYVSQPFLMDLEGKQGNFKNLREFVFKNIDGYFKIYSKHTPINLVRDLPQGFSALEPLVDLPIGINITRFQTLLALHRSYLTPGDSSSGWTAGAAAYYVGYLQPRTFLLKYNENGTITDAVDCALDPLSETKCTLKSFTVEKGIYQTSNFRVQPTESIVRFPNITNLCPFGEVFNATRFASVYAWNRKRISNCVADYSVLYNSASFSTFKCYGVSPTKLNDLCFTNVYADSFVIRGDEVRQIAPGQTGKIADYNYKLPDDFTGCVIAWNSNNLDSKVGGNYNYLYRLFRKSNLKPFERDISTEIYQAGSTPCNGVEGFNCYFPLQSYGFQPTNGVGYQPYRVVVLSFELLHAPATVCGPKKSTNLVKNKCVNFNFNGLTGTGVLTESNKKFLPFQQFGRDIADTTDAVRDPQTLEILDITPCSFGGVSVITPGTNTSNQVAVLYQDVNCTEVPVAIHADQLTPTWRVYSTGSNVFQTRAGCLIGAEHVNNSYECDIPIGAGICASYQTQTNSPRRARSVASQSIIAYTMSLGAENSVAYSNNSIAIPTNFTISVTTEILPVSMTKTSVDCTMYICGDSTECSNLLLQYGSFCTQLNRALTGIAVEQDKNTQEVFAQVKQIYKTPPIKDFGGFNFSQILPDPSKPSKRSFIEDLLFNKVTLADAGFIKQYGDCLGDISARDLICAQKFNGLTVLPPLLTDEMIAQYTSALLAGTITSGWTFGAGAALQIPFAMQMAYRFNGIGVTQCVLYENQKLIANQFNSAIGKIQDSLSSTASALGKLQDVVNQNAQALNTLVKQLSSNFGAISSVLNDILSRLDKVEAEVQIDRLITGRLQSLQTYVTQQLIRAAEIRASANLAATKMSECVLGQSKRVDFCGKGYHLMSFPQSAPHGVVFLHVTYVPAQEKNFTTAPAICHDGKAHFPREGVFVSNGTHWFVTQRNFYEPQIITTDNTFVCGNCDVVIGIVNNTVYDPLQPELDSGGGSGGGQIYEGKLTAEGLRFGIVASRFNHALVDRLVEGAIDAIVRHGGREEDITLVRVPGSWEIPVAAGELARKEDIDAVIAIGVLIRGATPHFDYIASEVSKGLADLSLELRKPITFGVITADTLEQAIERAGTKHGNKGWEAALSAIEMANLFKSLR

SEQ ID NO: 13905 - protein, 1307 aa, Artificial Sequence
  SARS-CoV-2/USA/NY-NYUMC7/2020__EPI_ISL_418192 spike protein (1-1147)(N914C_S1123C) LumSynth construct
MFVFLVLLPLVSSQCVNLTTRTQLPPAYTNSFTRGVYYPDKVFRSSVLHSTQDLFLPFFSNVTWFHAIHVSGTNGTKRFDNPVLPFNDGVYFASTEKSNIIRGWIFGTTLDSKTQSLLIVNNATNVVIKVCEFQFCNDPFLGVYHHKNNKSWMESEFRVYSSANNCTFEYVSQPFLMDLEGKQGNFKNLREFVFKNIDGYFKIYSKHTPINLVRDLPQGFSALEPLVDLPIGINITRFQTLLALHRSYLTPGDSSSGWTAGAAAYYVGYLQPRTFLLKYNENGTITDAVDCALDPLSETKCTLKSFTVEKGIYQTSNFRVQPTESIVRFPNITNLCPFGEVFNATRFASVYAWNRKRISNCVADYSVLYNSASFSTFKCYGVSPTKLNDLCFTNVYADSFVIRGDEVRQIAPGQTGKIADYNYKLPDDFTGCVIAWNSNNLDSKVGGNYNYLYRLFRKSNLKPFERDISTEIYQAGSTPCNGVEGFNCYFPLQSYGFQPTNGVGYQPYRVVVLSFELLHAPATVCGPKKSTNLVKNKCVNFNFNGLTGTGVLTESNKKFLPFQQFGRDIADTTDAVRDPQTLEILDITPCSFGGVSVITPGTNTSNQVAVLYQGVNCTEVPVAIHADQLTPTWRVYSTGSNVFQTRAGCLIGAEHVNNSYECDIPIGAGICASYQTQTNSPRRARSVASQSIIAYTMSLGAENSVAYSNNSIAIPTNFTISVTTEILPVSMTKTSVDCTMYICGDSTECSNLLLQYGSFCTQLNRALTGIAVEQDKNTQEVFAQVKQIYKTPPIKDFGGFNFSQILPDPSKPSKRSFIEDLLFNKVTLADAGFIKQYGDCLGDIAARDLICAQKFNGLTVLPPLLTDEMIAQYTSALLAGTITSGWTFGAGAALQIPFAMQMAYRFNGIGVTQCVLYENQKLIANQFNSAIGKIQDSLSSTASALGKLQDVVNQNAQALNTLVKQLSSNFGAISSVLNDILSRLDKVEAEVQIDRLITGRLQSLQTYVTQQLIRAAEIRASANLAATKMSECVLGQSKRVDFCGKGYHLMSFPQSAPHGVVFLHVTYVPAQEKNFTTAPAICHDGKAHFPREGVFVSNGTHWFVTQRNFYEPQIITTDNTFVCGNCDVVIGIVNNTVYDPLQPELDSGGGSGGGQIYEGKLTAEGLRFGIVASRFNHALVDRLVEGAIDAIVRHGGREEDITLVRVPGSWEIPVAAGELARKEDIDAVIAIGVLIRGATPHFDYIASEVSKGLADLSLELRKPITFGVITADTLEQAIERAGTKHGNKGWEAALSAIEMANLFKSLR

SEQ ID NO: 13906 - protein, 1307 aa, Artificial Sequence
  SARS-CoV-2/Iceland/189/2020__EPI_ISL_417709 spike protein (1-1147)(N914C_S1123C) LumSynth construct
MFVFLVLLPLVSSQCVNLTTRTQLPPAYTNSFTRGVYYPDKVFRSSVLHSTQDLFLPFFSNVTWFHAIHVSGTNGTKRFDNPVLPFNDGVYFASTEKSNIIRGWIFGTTLDSKTQSLLIVNNATNVVIKVCEFQFCNDPFLGVYYHKNNKSWMESEFRVYSSANNCTFEYVSQPFLMDLEGKQGNFKNLREFVFKNIDGYFKIYSKHTPINLVRDLPQGFSALEPLVDLPIGINITRFQTLLALHRSYLTPGDSSSGWTAGAAAYYVGYLQPRTFLLKYNENGTITDAVDCALDPLSETKCTLKSFTVEKGIYQTSNFRVQPTESIVRFPNITNLCPFGEVFNATRFASVYAWNRKRISNCVADYSVLYNSASFSTFKCYGVSPTKLNDLCFTNVYADSFVIRGDEVRQIAPGQTGKIADYNYKLPDDFTGCVIAWNSNNLDSKVGGNYNYLYRLFRKSNLKPFERDISTEIYQAGSTPCNGVEGFNCYFPLQSYGFQPTNGVGYQPYRVVVLSFELLHAPATVCGPKKSTNLVKNKCVNFNFNGLTGTGVLTESNKKFLPFQQFGRDIADTTDAVRDPQTLEILDITPCSFGGVSVITPGTNTSNQVAVLYQGVNCTEVPVAIHADQLTPTWRVYSTGSNVFQTRAGCLIGAEHVNNSYECDIPIGAGICASYQTQTNSPRRARSVASQSIIAYTMSLGAENSVAYSNNSIAIPTNFTISVTTEILPVSMTKTSVDCTMYICGDSTECSNLLLQYGSFCTQLNRALTGIAVEQDKNTQEVFAQVKQIYKTPPIKDFGGFNFSQILPDPSKPSKRSFIEDLLFNKVTLADAGFTKQYGDCLGDIAARDLICAQKFNGLTVLPPLLTDEMIAQYTSALLAGTITSGWTFGAGAALQIPFAMQMAYRFNGIGVTQCVLYENQKLIANQFNSAIGKIQDSLSSTASALGKLQDVVNQNAQALNTLVKQLSSNFGAISSVLNDILSRLDKVEAEVQIDRLITGRLQSLQTYVTQQLIRAAEIRASANLAATKMSECVLGQSKRVDFCGKGYHLMSFPQSAPHGVVFLHVTYVPAQEKNFTTAPAICHDGKAHFPREGVFVSNGTHWFVTQRNFYEPQIITTDNTFVCGNCDVVIGIVNNTVYDPLQPELDSGGGSGGGQIYEGKLTAEGLRFGIVASRFNHALVDRLVEGAIDAIVRHGGREEDITLVRVPGSWEIPVAAGELARKEDIDAVIAIGVLIRGATPHFDYIASEVSKGLADLSLELRKPITFGVITADTLEQAIERAGTKHGNKGWEAALSAIEMANLFKSLR

SEQ ID NO: 13907 - protein, 1307 aa, Artificial Sequence
  SARS-CoV-2/Australia/NSW56/2020__EPI_ISL_417408 spike protein (1-1147)(N914C_S1123C) LumSynth construct
MFVFLVLLPLVSSQCVNLTTRTQLPPAYTNSFTRGVYYPDKVFRSSVLHSTQDLFLPFFSNVTWFHAIHVSGTNGTKRFDNPVLPFNDGVYFASTEKSNIIRGWIFGTTLDSKTQSLLIVNNATNVVIKVCEFQFCNDPFLGVYYHKNNKSWMESEFRVYSSANNCTFEYVSQPFLMDLEGKQGNFKNLREFVFKNIDGYFKIYSKHTPINLVRDLPQGFSALEPLVDLPIGINITRFQTLLALHRSYLTPGDSSSGWTAGAAAYYVGYLQPRTFLLKYNENGTITDAVDCALDPLSETKCTLKSFTVEKGIYQTSNFRVQPTESIVRFPNITNLCPFGEVFNATRFASVYAWNRKRISNCVADYSVLYNSASFSTFKCYGVSPTKLNDLCFTNVYADSFVIRGDEVRQIAPGQTGKIADYNYKLPDDFTGCVIAWNSNNLDSKVGGNYNYLYRLFRKSNLKPFERDISTEIYQAGSTPCNGVEGFNCYFPLQSYGFQPTNGVGYQPYRVVVLSFELLHAPATVCGPKKSTNLVKNKCVNFNFNGLTGTGVLTESNKKFLPFQQFGRDIADTTDAVRDPQTLEILDITPCSFGGVSVITPGTNTSNQVAVLYQDVNCTEVPVAIHADQLTPTWRVYSTGSNVFQTRAGCLIGAEHVNNSYECDIPIGAGICASYQTQTNSPRRARSVASQSIIAYTMSLGAENSVAYSNNSIAIPTNFTISVTTEILPVSMTKTSVDCTMYICGDSTECSNLLLQYGSFCTQLNRALTGIAVEQDKNTQEVFAQVKQIYKTPPIKDFGGFNFSQILPDSSKPSKRSFIEDLLFNKVTLADAGFIKQYGDCLGDIAARDLICAQKFNGLTVLPPLLTDEMIAQYTSALLAGTITSGWTFGAGAALQIPFAMQMAYRFNGIGVTQCVLYENQKLIANQFNSAIGKIQDSLSSTASALGKLQDVVNQNAQALNTLVKQLSSNFGAISSVLNDILSRLDKVEAEVQIDRLITGRLQSLQTYVTQQLIRAAEIRASANLAATKMSECVLGQSKRVDFCGKGYHLMSFPQSAPHGVVFLHVTYVPAQEKNFTTAPAICHDGKAHFPREGVFVSNGTHWFVTQRNFYEPQIITTDNTFVCGNCDVVIGIVNNTVYDPLQPELDSGGGSGGGQIYEGKLTAEGLRFGIVASRFNHALVDRLVEGAIDAIVRHGGREEDITLVRVPGSWEIPVAAGELARKEDIDAVIAIGVLIRGATPHFDYIASEVSKGLADLSLELRKPITFGVITADTLEQAIERAGTKHGNKGWEAALSAIEMANLFKSLR

SEQ ID NO: 13908 - protein, 1307 aa, Artificial Sequence
  SARS-CoV-2/Iceland/280/2020__EPI_ISL_417608 spike protein (1-1147)(N914C_S1123C) LumSynth construct
MFVFLVLLPLVSSQCVNLTTRTQLPPAYTNSFTRGVYYPDKVFRSSVLHSTQDLFLPFFSNVTWFHAIHVSGTNGTKRFDNPVLPFNDGVYFASTEKSNIIRGWIFGTTLDSKTQSLLIVNNATNVVIKVCEFQFCNDPFLGVYYHKNNKSWMESEFRVYSSANNCTFEYVSQPFLMDLEGKQGNFKNLREFVFKNIDGYFKIYSKHTPINLVRDLPQGFSALEPLVDLPIGINITRFQTLLALHRSYLTPGDSSSGWTAGAAAYYVGYLQPRTFLLKYNENGTITDAVDCALDPLSETKCTLKSFTVEKGIYQTSNFRVQPTESIVRFPNITNLCPFGEVFNATRFASVYAWNRKRISNCVADYSVLYNSASFSTFKCYGVSPTKLNDLCFTNVYADSFVIRGDEVRQIAPGQTGKIADYNYKLPDDFTGCVIAWNSNNLDSKVGGNYNYLYRLFRKSNLKPFERDISTEIYQAGSTPCNGVEGFNCYFPLQSYGFQPTNGVGYQPYRVVVLSFELLHAPATVCGPKKSTNLVKNKCVNFNFNGLTGTGVLTESNKKFLPFQQFGRDIADTTDAVRDPQTLEILDITPCSFGGVSVITPGTNTSNQVAVLYQGVNCTEVPVAIHADQLTPTWRVYSTGSNVFQTRAGCLIGAEHVNNSYECDIPIGAGICASYHTQTNSPRRARSVASQSIIAYTMSLGAENSVAYSNNSIAIPTNFTISVTTEILPVSMTKTSVDCTMYICGDSTECSNLLLQYGSFCTQLNRALTGIAVEQDKNTQEVFAQVKQIYKTPPIKDFGGFNFSQILPDPSKPSKRSFIEDLLFNKVTLADAGFIKQYGDCLGDIAARDLICAQKFNGLTVLPPLLTDEMIAQYTSALLAGTITSGWTFGAGAALQIPFAMQMAYRFNGIGVTQCVLYENQKLIANQFNSAIGKIQDSLSSTASALGKLQDVVNQNAQALNTLVKQLSSNFGAISSVLNDILSRLDKVEAEVQIDRLITGRLQSLQTYVTQQLIRAAEIRASANLAATKMSECVLGQSKRVDFCGKGYHLMSFPQSAPHGVVFLHVTYVPAQEKNFTTAPAICHDGKAHFPREGVFVSNGTHWFVTQRNFYEPQIITTDNTFVCGNCDVVIGIVNNTVYDPLQPELDSGGGSGGGQIYEGKLTAEGLRFGIVASRFNHALVDRLVEGAIDAIVRHGGREEDITLVRVPGSWEIPVAAGELARKEDIDAVIAIGVLIRGATPHFDYIASEVSKGLADLSLELRKPITFGVITADTLEQAIERAGTKHGNKGWEAALSAIEMANLFKSLR

SEQ ID NO: 13909 - protein, 1307 aa, Artificial Sequence; identical to SEQ ID NO: 13864
  SARS-CoV-2/Iceland/247/2020__EPI_ISL_417575 spike protein (1-1147)(N914C_S1123C) LumSynth construct

SEQ ID NO: 13910 - protein, 1307 aa, Artificial Sequence
  SARS-CoV-2/Iceland/238/2020__EPI_ISL_417566 spike protein (1-1147)(N914C_S1123C) LumSynth construct
MFVFLVLLPLVSSQCVNLTTRTQLPPAYTNSFTRGVYYPDKVFRSSVLHSTQDLFLPFFSNVTWFHAIHVSGTNGTKRFDNPVLPFNDGVYFASTEKSNIIRGWIFGTTLDSKTQSLLIVNNATNVVIKVCEFQFCNDPFLGVYYHKNNKSWMESEFRVYSSANNCTFEYVSQPFLMDLEGKQGNFKNLREFVFKNIDGYFKIYSKHTPINLVRDLPQGFSALEPLVDLPIGINITRFQTLLALHRSYLTPGDSSSGWTAGAAAYYVGYLQPRTFLLKYNENGTITDAVDCALDPLSETKCTLKSFTVEKGIYQTSNFRVQPTESIVRFPNITNLCPFGEVFNATRFASVYAWNRKRISNCVADYSVLYNSASFSTFKCYGVSPTKLNDLCFTNVYADSFVIRGDEVRQIAPGQTGKIADYNYKLPDDFTGCVIAWNSNNLDSKVGGNYNYLYRLFRKSNLKPFERDISTEIYQAGSTPCNGVEGFNCYFPLQSYGFQPTNGVGYQPYRVVVLSFELLHAPATVCGPKKSTNLVKNKCVNFNFNGLTGTGVLTESNKKFLPFQQFGRDIADTTDAVRDPQTLEILDITPCSFGGVSVITPGTNTSNQVAVLYQGVNCTEVPVAIHADQLTPTWRVYSTGSNVFQTRAGCLIGAEHVNNSYECDIPIGAGICASYQTQTNSPRRARSVASQSIIAYTMSLGAENSVAYSNNSIAIPTNFTISVTTEILPVSMTKTSVDCTMYICGDSTECSNLLLQYGSFCTQLNRALTGIAVEQDKNTQEVFAQVKQIYKTPPIKDFGGFNFSQILPDPSKPSKRSFIEDLLFNKVTLADVGFIKQYGDCLGDIAARDLICAQKFNGLTVLPPLLTDEMIAQYTSALLAGTITSGWTFGAGAALQIPFAMQMAYRFNGIGVTQCVLYENQKLIANQFNSAIGKIQDSLSSTASALGKLQDVVNQNAQALNTLVKQLSSNFGAISSVLNDILSRLDKVEAEVQIDRLITGRLQSLQTYVTQQLIRAAEIRASANLAATKMSECVLGQSKRVDFCGKGYHLMSFPQSAPHGVVFLHVTYVPAQEKNFTTAPAICHDGKAHFPREGVFVSNGTHWFVTQRNFYEPQIITTDNTFVCGNCDVVIGIVNNTVYDPLQPELDSGGGSGGGQIYEGKLTAEGLRFGIVASRFNHALVDRLVEGAIDAIVRHGGREEDITLVRVPGSWEIPVAAGELARKEDIDAVIAIGVLIRGATPHFDYIASEVSKGLADLSLELRKPITFGVITADTLEQAIERAGTKHGNKGWEAALSAIEMANLFKSLR

SEQ ID NO: 13911 - protein, 1307 aa, Artificial Sequence
  SARS-CoV-2/Greece/16/2020__EPI_ISL_418265 spike protein (1-1147)(N914C_S1123C) LumSynth construct
MFVFLVLLPLVSSQCVNLTTRTQLPPAYTNSFTRGVYYPDKVFRSSVLHSTQDLFLPFFSNVTWFHAIHVSGTNGTKRFDNPVLPFNDGVYFASTEKSNIIRGWIFGTTLDSKTQSLLIVNNATNVVIKVCEFQFCNDPFLGVYYHKNNKSWMESEFRVYSSANNCTFEYVSQPFLMDLEGKQGNFKNLREFVFKNVDGYFKIYSKHTPINLVRDLPQGFSALEPLVDLPIGINITRFQTLLALHRSYLTPGDSSSGWTAGAAAYYVGYLQPRTFLLKYNENGTITDAVDCALDPLSETKCTLKSFTVEKGIYQTSNFRVQPTESIVRFPNITNLCPFGEVFNATRFASVYAWNRKRISNCVADYSVLYNSASFSTFKCYGVSPTKLNDLCFTNVYADSFVIRGDEVRQIAPGQTGKIADYNYKLPDDFTGCVIAWNSNNLDSKVGGNYNYLYRLFRKSNLKPFERDISTEIYQAGSTPCNGVEGFNCYFPLQSYGFQPTNGVGYQPYRVVVLSFELLHAPATVCGPKKSTNLVKNKCVNFNFNGLTGTGVLTESNKKFLPFQQFGRDIADTTDAVRDPQTLEILDITPCSFGGVSVITPGTNTSNQVAVLYQDVNCTEVPVAIHADQLTPTWRVYSTGSNVFQTRAGCLIGAEHVNNSYECDIPIGAGICASYQTQTNSPRRARSVASQSIIAYTMSLGAENSVAYSNNSIAIPTNFTISVTTEILPVSMTKTSVDCTMYICGDSTECSNLLLQYGSFCTQLNRALTGIAVEQDKNTQEVFAQVKQIYKTPPIKDFGGFNFSQILPDPSKPSKRSFIEDLLFNKVTLADAGFIKQYGDCLGDIAARDLICAQKFNGLTVLPPLLTDEMIAQYTSALLAGTITSGWTFGAGAALQIPFAMQMAYRFNGIGVTQCVLYENQKLIANQFNSAIGKIQDSLSSTASALGKLQDVVNQNAQALNTLVKQLSSNFGAISSVLNDILSRLDKVEAEVQIDRLITGRLQSLQTYVTQQLIRAAEIRASANLAATKMSECVLGQSKRVDFCGKGYHLMSFPQSAPHGVVFLHVTYVPAQEKNFTTAPAICHDGKAHFPREGVFVSNGTHWFVTQRNFYEPQIITTDNTFVCGNCDVVIGIVNNTVYDPLQPELDSGGGSGGGQIYEGKLTAEGLRFGIVASRFNHALVDRLVEGAIDAIVRHGGREEDITLVRVPGSWEIPVAAGELARKEDIDAVIAIGVLIRGATPHFDYIASEVSKGLADLSLELRKPITFGVITADTLEQAIERAGTKHGNKGWEAALSAIEMANLFKSLR

SEQ ID NO: 13912 - protein, 1307 aa, Artificial Sequence
  SARS-CoV-2/Iceland/319/2020__EPI_ISL_417648 spike protein (1-1147)(N914C_S1123C) LumSynth construct
MFVFLVLLPLVSSQCVNLTTRTQLPPAYTNSFTRGVYYPDKVFRSSVLHSTQDLFLPFFSNVTWFHAIHVSGTNGTKRFDNPVLPFNDGVYFASTEKSNIIRGWIFGTTLDSKTQSLLIVNNATNVVIKVCEFQFCNDPFLGVYYHKNNKSWMESEFRVYSSANNCTFEYVSQPFLIDLEGKQGNFKNLREFVFKNIDGYFKIYSKHTPINLVRDLPQGFSALEPLVDLPIGINITRFQTLLALHRSYLTPGDSSSGWTAGAAAYYVGYLQPRTFLLKYNENGTITDAVDCALDPLSETKCTLKSFTVEKGIYQTSNFRVQPTESIVRFPNITNLCPFGEVFNATRFASVYAWNRKRISNCVADYSVLYNSASFSTFKCYGVSPTKLNDLCFTNVYADSFVIRGDEVRQIAPGQTGKIADYNYKLPDDFTGCVIAWNSNNLDSKVGGNYNYLYRLFRKSNLKPFERDISTEIYQAGSTPCNGVEGFNCYFPLQSYGFQPTNGVGYQPYRVVVLSFELLHAPATVCGPKKSTNLVKNKCVNFNFNGLTGTGVLTESNKKFLPFQQFGRDIADTTDAVRDPQTLEILDITPCSFGGVSVITPGTNTSNQVAVLYQGVNCTEVPVAIHADQLTPTWRVYSTGSNVFQTRAGCLIGAEHVNNSYECDIPIGAGICASYQTQTNSPRRARSVASQSIIAYTMSLGAENSVAYSNNSIAIPTNFTISVTTEILPVSMTKTSVDCTMYICGDSTECSNLLLQYGSFCTQLNRALTGIAVEQDKNTQEVFAQVKQIYKTPPIKDFGGFNFSQILPDPSKPSKRSFIEDLLFNKVTLADAGFIKQYGDCLGDIAARDLICAQKFNGLTVLPPLLTDEMIAQYTSALLAGTITSGWTFGAGAALQIPFAMQMAYRFNGIGVTQCVLYENQKLIANQFNSAIGKIQDSLSSTASALGKLQDVVNQNAQALNTLVKQLSSNFGAISSVLNDILSRLDKVEAEVQIDRLITGRLQSLQTYVTQQLIRAAEIRASANLAATKMSECVLGQSKRVDFCGKGYHLMSFPQSAPHGVVFLHVTYVPAQEKNFTTAPAICHDGKAHFPREGVFVSNGTHWFVTQRNFYEPQIITTDNTFVCGNCDVVIGIVNNTVYDPLQPELDSGGGSGGGQIYEGKLTAEGLRFGIVASRFNHALVDRLVEGAIDAIVRHGGREEDITLVRVPGSWEIPVAAGELARKEDIDAVIAIGVLIRGATPHFDYIASEVSKGLADLSLELRKPITFGVITADTLEQAIERAGTKHGNKGWEAALSAIEMANLFKSLR

SEQ ID NO: 13913 - protein, 1307 aa, Artificial Sequence
  SARS-CoV-2/Congo/94/2020__EPI_ISL_417947 spike protein (1-1147)(N914C_S1123C) LumSynth construct
MFVFLVLLPLVSSQCVNLTTRTQLPPAYTNSFTRGVYYPDKVFRSSVLHSTQDLFLPFFSNVTWFHAIHVSGTNGTKRFDNPVLPFNDGVYFASTEKSNIIRGWIFGTTLDSKTQSLLIVNNATNVVIKVCEFQFCNDPFLGVYYHKNNKSWMESEFRVYSSANNCTFEYVSQPFLMDLEGKQGNFKNLREFVFKNIDGYFKIYSKHTPINLVRDLPQGFSALEPLVDLPIGINITRFQTLLALHRSYLTPGDSSSGWTAGAAAYYVGYLQPRTFLLKYNENGTITDAVDCALDPLSETKCTLKSFTVEKGIYQTSNFRVQPTESIVRFPNITNLCPFGEVFNATRFASVYAWNRKRISNCVADYSVLYNSASFSTFKCYGVSPTKLNDLCFTNVYADSFVIRGDEVRQIAPGQTGKIADYNYKLPDDFTGCVIAWNSNNLDSKVGGNYNYLYRLFRKSNLKPFERDISTEIYQAGSTPCNGVEGFNCYFPLQSYGFQPTNGVGYQPYRVVVLSFELLHAPATVCGPKKSTNLVKNKCVNFNFNGLTGTGVLTESNKKFLPFQQFGRDIADTTDAVRDPQTLEILDITPCSFGGVSVITPGTNTSNQVAVLYQGVNCTEVPVAIHADQLTPTWRVYSTGSNVFQTRAGCLIGAEHVNNSYECDIPIGAGICASYQTQTNSPRRARSVASQSIIAYTMSLGAENSVAYSNNSIAIPTNFTISVTTEILPVSMTKTSVDCTMYICGDSTECSNLLLQYGSFCTQLNRALTGIAVEQDKNTQEVFAQVKQIYKTPPIKDFGGFNFSQILPDPSKPSKRSFIEDILFNKVTLADAGFIKQYGDCLGDIAARDLICAQKFNGLTVLPPLLTDEMIAQYTSALLAGTITSGWTFGAGAALQIPFAMQMAYRFNGIGVTQCVLYENQKLIANQFNSAIGKIQDSLSSTASALGKLQDVVNQNAQALNTLVKQLSSNFGAISSVLNDILSRLDKVEAEVQIDRLITGRLQSLQTYVTQQLIRAAEIRASANLAATKMSECVLGQSKRVDFCGKGYHLMSFPQSAPHGVVFLHVTYVPAQEKNFTTAPAICHDGKAHFPREGVFVSNGTHWFVTQRNFYEPQIITTDNTFVCGNCDVVIGIVNNTVYDPLQPELDSGGGSGGGQIYEGKLTAEGLRFGIVASRFNHALVDRLVEGAIDAIVRHGGREEDITLVRVPGSWEIPVAAGELARKEDIDAVIAIGVLIRGATPHFDYIASEVSKGLADLSLELRKPITFGVITADTLEQAIERAGTKHGNKGWEAALSAIEMANLFKSLR

SEQ ID NO: 13914 - protein, 1307 aa, Artificial Sequence
  SARS-CoV-2/Congo/158/2020__EPI_ISL_417950 spike protein (1-1147)(N914C_S1123C) LumSynth construct
MFVFLVLLPLVSSQCVNLTTRTQLPPAYTNSFTRGVYYPDKVFRSSVLHSTQDLFLPFFSNVTWFHAIHVSGTNGTKRFDNPVLPFNDGVYFASTEKSNIIRGWIFGTTLDSKTQSLLIVNNATNVVIKVCEFQFCNDPFLGVYYHKNNKSWMESEFRVYSSANNCTFEYVSQPFLMDLEGKQGNFKNLREFVFKNIDGYFKIYSKHTPINLVRDLPQGFSALEPLVDLPIGINITRFQTLLALHRSYLTPGDSSSGWTAGAAAYYVGYLQPRTFLLKYNENGTITDAVDCALDPLSETKCTLKSFTVEKGIYQTSNFRVQPTESIVRFPNITNLCPFGEVFNATRFASVYAWNRKRISNCVADYSVLYNSASFSTFKCYGVSPTKLNDLCFTNVYADSFVIRGDEVRQIAPGQTGKIADYNYKLPDDFTGCVIAWNSNNLDSKVGGNYNYLYRLFRKSNLKPFERDISTEIYQAGSTPCNGVEGFNCYFPLQSYGFQPTNGVGYQPYRVVVLSFELLHAPATVCGPKKSTNLVKNKCVNFNFNGLTGTGVLTESNKKFLPFQQFGRDIADTTDAVRDPQTLEILDITPCSFGGVSVITPGTNTSNQVAVLYQDVNCTEVPVAIHADQLTPTWRVYSTGSNVFQTRAGCLIGAEHVNNSYECDIPIGAGICASYQTQTNSPRRARSVASQSIIAYTMSLGAENSVAYSNNSIAIPTNFTISVTTEILPVSMTKTSVDCTMYICGDSTECSNLLLQYGSFCTQLNRALTGIAVEQDKNTQEVFAQVKQIYKTPPIKDFGGFNFSQILPDPSKPSKRSFIEDLLFNKVTLADAGFIKQYGDCLGDIAARDLICAQKFNGLTVLPPLLTDEMIAQYTSALLAGTITSGWTFGAGAALQIPFAMQMAYRFNGIGVTQCVLYENQKLIANQFNSAIGKIQDSLSSTASALGKLQDVVNQNAQALNTLVKQLSSNFGAISSVLNDILSRLDKVEAEVQIDRLITGRLQSLQTYVTQQLIRAAEIRASANLAATKMSECVLGQSKRVDFCGKGYHLMSFPQSAPHGVVFLHVTYVPAQEKNFTTAPAICHDGKAHFPREGVFVSNGTHWFVTQRNFYEPQIITTDNTFLCGNCDVVIGIVNNTVYDPLQPELDSGGGSGGGQIYEGKLTAEGLRFGIVASRFNHALVDRLVEGAIDAIVRHGGREEDITLVRVPGSWEIPVAAGELARKEDIDAVIAIGVLIRGATPHFDYIASEVSKGLADLSLELRKPITFGVITADTLEQAIERAGTKHGNKGWEAALSAIEMANLFKSLR

SEQ ID NO: 13915 - protein, 1307 aa, Artificial Sequence
  SARS-CoV-2/USA/UT-00034/2020__EPI_ISL_417977 spike protein (1-1147)(N914C_S1123C) LumSynth construct
MFVFLVLLPLVSSQCVNLTTRTQLPPAYTNSFTRGVYYPDKVFRSSVLHSTQDLFLPFFSNVTWFHAIHVSGTNGTKRFDNPVLPFNDGVYFASTEKSNIIRGWIFGTTLDSKTQSLLIVNNATNVVIKVCEFQFCNDPFLGVYYYKNNKSWMESEFRVYSSANNCTFEYVSQPFLMDLEGKQGNFKNLREFVFKNIDGYFKIYSKHTPINLVRDLPQGFSALEPLVDLPIGINITRFQTLLALHRSYLTPGDSSSGWTAGAAAYYVGYLQPRTFLLKYNENGTITDAVDCALDPLSETKCTLKSFTVEKGIYQTSNFRVQPTESIVRFPNITNLCPFGEVFNATRFASVYAWNRKRISNCVADYSVLYNSASFSTFKCYGVSPTKLNDLCFTNVYADSFVIRGDEVRQIAPGQTGKIADYNYKLPDDFTGCVIAWNSNNLDSKVGGNYNYLYRLFRKSNLKPFERDISTEIYQAGSTPCNGVEGFNCYFPLQSYGFQPTNGVGYQPYRVVVLSFELLHAPATVCGPKKSTNLVKNKCVNFNFNGLTGTGVLTESNKKFLPFQQFGRDIADTTDAVRDPQTLEILDITPCSFGGVSVITPGTNTSNQVAVLYQGVNCTEVPVAIHADQLTPTWRVYSTGSNVFQTRAGCLIGAEHVNNSYECDIPIGAGICASYQTQTNSPRRARSVASQSIIAYTMSLGAENSVAYSNNSIAIPTNFTISVTTEILPVSMTKTSVDCTMYICGDSTECSNLLLQYGSFCTQLNRALTGIAVEQDKNTQEVFAQVKQIYKTPPIKDFGGFNFSQILPDPSKPSKRSFIEDLLFNKVTLADAGFIKQYGDCLGDIAARDLICAQKFNGLTVLPPLLTDEMIAQYTSALLAGTITSGWTFGAGAALQIPFAMQMAYRFNGIGVTQCVLYENQKLIANQFNSAIGKIQDSLSSTASALGKLQDVVNQNAQALNTLVKQLSSNFGAISSVLNDILSRLDKVEAEVQIDRLITGRLQSLQTYVTQQLIRAAEIRASANLAATKMSECVLGQSKRVDFCGKGYHLMSFPQSAPHGVVFLHVTYVPAQEKNFTTAPAICHDGKAHFPREGVFVSNGTHWFVTQRNFYEPQIITTDNTFVCGNCDVVIGIVNNTVYDPLQPELDSGGGSGGGQIYEGKLTAEGLRFGIVASRFNHALVDRLVEGAIDAIVRHGGREEDITLVRVPGSWEIPVAAGELARKEDIDAVIAIGVLIRGATPHFDYIASEVSKGLADLSLELRKPITFGVITADTLEQAIERAGTKHGNKGWEAALSAIEMANLFKSLR

SEQ ID NO: 13916 - protein, 1307 aa, Artificial Sequence
  SARS-CoV-2/USA/UT-00033/2020__EPI_ISL_417976 spike protein (1-1147)(N914C_S1123C) LumSynth construct
MFVFLVLLPLVSSQCVNLTTRTQLPPAYTNSFTRGVYYPDKVFRSSVLHSTQDLFLPFFSNVTWFHAIHVSGTNGTKRFDNPVLPFNDGVYFASTEKSNIIRGWIFGTTLDSKTQSLLIVNNATNVVIKVCEFQFCNDPFLGVYYHKNNKSWMESEFRVYSSANNCTFEYVSQPFLMDLEGKQGNFKNLREFVFKNIDGYFKIYSKHTPINLVRDLPQGFSALEPLVDLPIGINITRFQTLLALHRSYLTPGDSSSGLTAGAAAYYVGYLQPRTFLLKYNENGTITDAVDCALDPLSETKCTLKSFTVEKGIYQTSNFRVQPTESIVRFPNITNLCPFGEVFNATRFASVYAWNRKRISNCVADYSVLYNSASFSTFKCYGVSPTKLNDLCFTNVYADSFVIRGDEVRQIAPGQTGKIADYNYKLPDDFTGCVIAWNSNNLDSKVGGNYNYLYRLFRKSNLKPFERDISTEIYQAGSTPCNGVEGFNCYFPLQSYGFQPTNGVGYQPYRVVVLSFELLHAPATVCGPKKSTNLVKNKCVNFNFNGLTGTGVLTESNKKFLPFQQFGRDIADTTDAVRDPQTLEILDITPCSFGGVSVITPGTNTSNQVAVLYQGVNCTEVPVAIHADQLTPTWRVYSTGSNVFQTRAGCLIGAEHVNNSYECDIPIGAGICASYQTQTNSPRRARSVASQSIIAYTMSLGAENSVAYSNNSIAIPTNFTISVTTEILPVSMTKTSVDCTMYICGDSTECSNLLLQYGSFCTQLNRALTGIAVEQDKNTQEVFAQVKQIYKTPPIKDFGGFNFSQILPDPSKPSKRSFIEDLLFNKVTLADAGFIKQYGDCLGDIAARDLICAQKFNGLTVLPPLLTDEMIAQYTSALLAGTITSGWTFGAGAALQIPFAMQMAYRFNGIGVTQCVLYENQKLIANQFNSAIGKIQDSLSSTASALGKLQDVVNQNAQALNTLVKQLSSNFGAISSVLNDILSRLDKVEAEVQIDRLITGRLQSLQTYVTQQLIRAAEIRASANLAATKMSECVLGQSKRVDFCGKGYHLMSFPQSAPHGVVFLHVTYVPAQEKNFTTAPAICHDGKAHFPREGVFVSNGTHWFVTQRNFYEPQIITTDNTFVCGNCDVVIGIVNNTVYDPLQPELDSGGGSGGGQIYEGKLTAEGLRFGIVASRFNHALVDRLVEGAIDAIVRHGGREEDITLVRVPGSWEIPVAAGELARKEDIDAVIAIGVLIRGATPHFDYIASEVSKGLADLSLELRKPITFGVITADTLEQAIERAGTKHGNKGWEAALSAIEMANLFKSLR

SEQ ID NO: 13917 - protein, 1307 aa, Artificial Sequence
  SARS-CoV-2/USA/WI-13/2020__EPI_ISL_417516 spike protein (1-1147)(N914C_S1123C) LumSynth construct
MFVFLVLLPLVSSQCVNLTTRTQLPPAYTNSFTRGVYYPDKVFRSSVLHSTQDLFLPFFSNVTWFHAIHVSGTNGTKRFDNPVLPFNDGVYFASTEKSNIIRGWIFGTTLDSKTQSLLIVNNATNVVIKVCEFQFCNDPFLGVYYHKNNKSWMESEFRVYSSANNCTFEYVSQPFLMDLEGKQGNFKNLREFVFKNIDGYFKIYSKHTPINLVRDLPQGFSALEPLVDLPIGINITRFQTLLALHRSYLTPGDSSSGWTAGAAAYYVGYLQPRTFLLKYNENGTITDAVDCALDPLSETKCTLKSFTVEKGIYQTSNFRVLPTESIVRFPNITNLCPFGEVFNATRFASVYAWNRKRISNCVADYSVLYNSASFSTFKCYGVSPTKLNDLCFTNVYADSFVIRGDEVRQIAPGQTGKIADYNYKLPDDFTGCVIAWNSNNLDSKVGGNYNYLYRLFRKSNLKPFERDISTEIYQAGSTPCNGVEGFNCYFPLQSYGFQPTNGVGYQPYRVVVLSFELLHAPATVCGPKKSTNLVKNKCVNFNFNGLTGTGVLTESNKKFLPFQQFGRDIADTTDAVRDPQTLEILDITPCSFGGVSVITPGTNTSNQVAVLYQGVNCTEVPVAIHADQLTPTWRVYSTGSNVFQTRAGCLIGAEHVNNSYECDIPIGAGICASYQTQTNSPRRARSVASQSIIAYTMSLGAENSVAYSNNSIAIPTNFTISVTTEILPVSMTKTSVDCTMYICGDSTECSNLLLQYGSFCTQLNRALTGIAVEQDKNTQEVFAQVKQIYKTPPIKDFGGFNFSQILPDPSKPSKRSFIEDLLFNKVTLADAGFIKQYGDCLGDIAARDLICAQKFNGLTVLPPLLTDEMIAQYTSALLAGTITSGWTFGAGAALQIPFAMQMAYRFNGIGVTQCVLYENQKLIANQFNSAIGKIQDSLSSTASALGKLQDVVNQNAQALNTLVKQLSSNFGAISSVLNDILSRLDKVEAEVQIDRLITGRLQSLQTYVTQQLIRAAEIRASANLAATKMSECVLGQSKRVDFCGKGYHLMSFPQSAPHGVVFLHVTYVPAQEKNFTTAPAICHDGKAHFPREGVFVSNGTHWFVTQRNFYEPQIITTDNTFVCGNCDVVIGIVNNTVYDPLQPELDSGGGSGGGQIYEGKLTAEGLRFGIVASRFNHALVDRLVEGAIDAIVRHGGREEDITLVRVPGSWEIPVAAGELARKEDIDAVIAIGVLIRGATPHFDYIASEVSKGLADLSLELRKPITFGVITADTLEQAIERAGTKHGNKGWEAALSAIEMANLFKSLR

SEQ ID NO: 13918 - protein, 1306 aa, Artificial Sequence
  SARS-CoV-2/India/1-27/2020__EPI_ISL_413522 spike protein (1-1146)(N913C_S1122C) LumSynth construct
MFVFLVLLPLVSSQCVNLTTRTQLPPAYTNSFTRGVYYPDKVFRSSVLHSTQDLFLPFFSNVTWFHAIHVSGTNGTKRFDNPVLPFNDGVYFASTEKSNIIRGWIFGTTLDSKTQSLLIVNNATNVVIKVCEFQFCNDPFLGVYHKNNKSWMESEFRVYSSANNCTFEYVSQPFLMDLEGKQGNFKNLREFVFKNIDGYFKIYSKHTPINLVRDLPQGFSALEPLVDLPIGINITRFQTLLALHRSYLTPGDSSSGWTAGAAAYYVGYLQPRTFLLKYNENGTITDAVDCALDPLSETKCTLKSFTVEKGIYQTSNFRVQPTESIVRFPNITNLCPFGEVFNATRFASVYAWNRKRISNCVADYSVLYNSASFSTFKCYGVSPTKLNDLCFTNVYADSFVIRGDEVIQIAPGQTGKIADYNYKLPDDFTGCVIAWNSNNLDSKVGGNYNYLYRLFRKSNLKPFERDISTEIYQAGSTPCNGVEGFNCYFPLQSYGFQPTNGVGYQPYRVVVLSFELLHAPATVCGPKKSTNLVKNKCVNFNFNGLTGTGVLTESNKKFLPFQQFGRDIADTTDAVRDPQTLEILDITPCSFGGVSVITPGTNTSNQVAVLYQDVNCTEVPVAIHADQLTPTWRVYSTGSNVFQTRAGCLIGAEHVNNSYECDIPIGAGICASYQTQTNSPRRARSVASQSIIAYTMSLGAENSVAYSNNSIAIPTNFTISVTTEILPVSMTKTSVDCTMYICGDSTECSNLLLQYGSFCTQLNRALTGIAVEQDKNTQEVFAQVKQIYKTPPIKDFGGFNFSQILPDPSKPSKRSFIEDLLFNKVTLADAGFIKQYGDCLGDIAARDLICAQKFNGLTVLPPLLTDEMIAQYTSALLAGTITSGWTFGAGAALQIPFAMQMAYRFNGIGVTQCVLYENQKLIANQFNSAIGKIQDSLSSTASALGKLQDVVNQNAQALNTLVKQLSSNFGAISSVLNDILSRLDKVEAEVQIDRLITGRLQSLQTYVTQQLIRAAEIRASANLAATKMSECVLGQSKRVDFCGKGYHLMSFPQSAPHGVVFLHVTYVPAQEKNFTTAPAICHDGKAHFPREGVFVSNGTHWFVTQRNFYEPQIITTDNTFVCGNCDVVIGIVNNTVYDPLQPELDSGGGSGGGQIYEGKLTAEGLRFGIVASRFNHALVDRLVEGAIDAIVRHGGREEDITLVRVPGSWEIPVAAGELARKEDIDAVIAIGVLIRGATPHFDYIASEVSKGLADLSLELRKPITFGVITADTLEQAIERAGTKHGNKGWEAALSAIEMANLFKSLR

SEQ ID NO: 13919 - protein, 1301 aa, Artificial Sequence
  SARS-CoV-2/pangolin/Guangxi/P4L/2017__EPI_ISL_410538 spike protein (1-1141)(N908C_S1117C) LumSynth construct
MFVFLFVLPLVSSQCVNLTTRTGIPPGYTNSSTRGVYYPDKVFRSSILHLTQDLFLPFFSNVTWFNTINYQGGFKKFDNPVLPFNDGVYFASTEKSNIIRGWIFGTTLDARTQSLLIVNNATNVVIKVCEFQFCTDPFLGVYYHNNNKTWVENEFRVYSSANNCTFEYISQPFLMDLEGKQGNFKNLREFVFKNVDGYFKIYSKHTPIDLVRDLPRGFAALEPLVDLPIGINITRFQTLLALHRSYLTPGNLESGWTTGAAAYYVGYLQQRTFLLSYNQNGTITDAVDCSLDPLSETKCTLKSLTVEKGIYQTSNFRVQPTISIVRFPNITNLCPFGEVFNASKFASVYAWNRKRISNCVADYSVLYNSTSFSTFKCYGVSPTKLNDLCFTNVYADSFVVKGDEVRQIAPGQTGVIADYNYKLPDDFTGCVIAWNSVKQDALTGGNYGYLYRLFRKSKLKPFERDISTEIYQAGSTPCNGQVGLNCYYPLERYGFHPTTGVNYQPFRVVVLSFELLNGPATVCGPKLSTTLVKDKCVNFNFNGLTGTGVLTTSKKQFLPFQQFGRDISDTTDAVRDPQTLEILDITPCSFGGVSVITPGTNTSNQVAVLYQDVNCTEVPMAIHAEQLTPAWRVYSAGANVFQTRAGCLVGAEHVNNSYECDIPVGAGICASYHSMSSLRSVNQRSIIAYTMSLGAENSVAYSNNSIAIPTNFTISVTTEILPVSMTKTSVDCTMYICGDSIECSNLLLQYGSFCTQLNRALTGIAVEQDKNTQEVFAQVKQIYKTPPIKDFGGFNFSQILPDPSKPSKRSFIEDLLFNKVTLADAGFIKQYGDCLGDIAARDLICAQKFNGLTVLPPLLTDEMIAQYTSALLAGTITSGWTFGAGAALQIPFAMQMAYRFNGIGVTQCVLYENQKLIANQFNSAIGKIQDSLSSTASALGKLQDVVNQNAQALNTLVKQLSSNFGAISSVLNDILSRLDKVEAEVQIDRLITGRLQSLQTYVTQQLIRAAEIRASANLAATKMSECVLGQSKRVDFCGKGYHLMSFPQSAPHGVVFLHVTYVPAQEKNFTTAPAICHEGKAHFPREGVFVSNGTHWFITQRNFYEPQIITTDNTFVCGSCDVVIGIVNNTVYDPLQPELDSGGGSGGGQIYEGKLTAEGLRFGIVASRFNHALVDRLVEGAIDAIVRHGGREEDITLVRVPGSWEIPVAAGELARKEDIDAVIAIGVLIRGATPHFDYIASEVSKGLADLSLELRKPITFGVITADTLEQAIERAGTKHGNKGWEAALSAIEMANLFKSLR

SEQ ID NO: 13920 - protein, 1301 aa, Artificial Sequence
  SARS-CoV-2/pangolin/Guangxi/P5L/2017__EPI_ISL_410540 spike protein (1-1141)(N908C_S1117C) LumSynth construct
MFVFLFVLPLVSSQCVNLTTRTGIPPGYTNSSTRGVYYPDKVFRSSILHLTQDLFLPFFSNVTWFNTINYQGGFKKFDNPVLPFNDGVYFASTEKSNIIRGWIFGTTLDARTQSLLIVNNATNVVIKVCEFQFCTDPFLGVYYHNNNKTWVENEFRVYSSANNCTFEYISQPFLMDLEGKQGNFKNLREFVFKNVDGYFKIYSKHTPIDLVRDLPRGFAALEPLVDLPIGINITRFQTLLALHRSYLTPGKLESGWTTGAAAYYVGYLQQRTFLLSYNQNGTITDAVDCSLDPLSETKCTLKSLTVEKGIYQTSNFRVQPTISIVRFPNITNLCPFGEVFNASKFASVYAWNRKRISNCVADYSVLYNSTSFSTFKCYGVSPTKLNDLCFTNVYADSFVVKGDEVRQIAPGQTGVIADYNYKLPDDFTGCVIAWNSVKQDALTGGNYGYLYRLFRKSKLKPFERDISTEIYQAGSTPCNGQVGLNCYYPLERYGFHPTTGVNYQPFRVVVLSFELLNGPATVCGPKLSTTLVKDKCVNFNFNGLTGTGVLTTSKKQFLPFQQFGRDISDTTDAVRDPQTLEILDITPCSFGGVSVITPGTNTSNQVAVLYQDVNCTEVPMAIHAEQLTPAWRVYSAGANVFQTRAGCLVGAEHVNNSYECDIPVGAGICASYHSMSSFRSVNQRSIIAYTMSLGAENSVAYSNNSIAIPTNFTISVTTEILPVSMTKTSVDCTMYICGDSIECSNLLLQYGSFCTQLNRALTGIAVEQDKNTQEVFAQVKQIYKTPPIKDFGGFNFSQILPDPSKPSKRSFIEDLLFNKVTLADAGFIKQYGDCLGDIAARDLICAQKFNGLTVLPPLLTDEMIAQYTSALLAGTITSGWTFGAGAALQIPFAMQMAYRFNGIGVTQCVLYENQKLIANQFNSAIGKIQDSLSSTASALGKLQDVVNQNAQALNTLVKQLSSNFGAISSVLNDILSRLDKVEAEVQIDRLITGRLQSLQTYVTQQLIRAAEIRASANLAATKMSECVLGQSKRVDFCGKGYHLMSFPQSAPHGVVFLHVTYVPAQEKNFTTAPAICHEGKAHFPREGVFVSNGTHWFITQRNFYEPQIITTDNTFVCGSCDVVIGIVNNTVYDPLQPELDSGGGSGGGQIYEGKLTAEGLRFGIVASRFNHALVDRLVEGAIDAIVRHGGREEDITLVRVPGSWEIPVAAGELARKEDIDAVIAIGVLIRGATPHFDYIASEVSKGLADLSLELRKPITFGVITADTLEQAIERAGTKHGNKGWEAALSAIEMANLFKSLR

SEQ ID NO: 13921 - protein, 1301 aa, Artificial Sequence
  SARS-CoV-2/pangolin/Guangxi/P5E/2017__EPI_ISL_410541 spike protein (1-1141)(N908C_S1117C) LumSynth construct
MFVFLFVLPLVSSQCVNLTTRTGIPPGYTNSSTRGVYYPDKVFRSSILHLTQDLFLPFFSNVTWFNTITYQGGSKKFDNPVLPFNDGVYFASTEKSNIIRGWIFGTTLDARTQSLLIVNNATNVVIKVCEFQFCTDPFLGVYYHNNNKTWVENEFRVYSSANNCTFEYISQPFLMDLEGKQGNFKNLREFVFKNVDGYFKIYSKHTPIDLVRDLPRGFAALEPLVDLPIGINITRFQTLLALHRSYLTPGKLESGWTTGAAAYYVGYLQQRTFLLSYNQNGTITDAVDCSLDPLSETKCTLKSLTVEKGIYQTSNFRVQPTISIVRFPNITNLCPFGEVFNASKFASVYAWNRKRISNCVADYSVLYNSTSFSTFKCYGVSPTKLNDLCFTNVYADSFVVKGDEVRQIAPGQTGVIADYNYKLPDDFTGCVIAWNSVKQDALTGDNYGYLYRLFRKSKLKPFERDISTEIYQAGSTPCNGQVGLNCYYPLERYGFHPTTGVNYQPFRVVVLSFELLNGPATVCGPKLSTTLVKDKCVNFNFNGLTGTGVLTTSKKQFLPFQQFGRDISDTTDAVRDPQTLEILDITPCSFGGVSVITPGTNTSNQVAVLYQDVNCTEVPMAIHAEQLTPAWRVYSAGANVFQTRAGCLVGAEHVNNSYECDIPVGAGICASYHSMSSFRSVNQRSIIAYTMSLGAENSVAYSNNSIAIPTNFTISVTTEILPVSMTKTSVDCTMYICGDSIECSNLLLQYGSFCTQLNRALTGIAVEQDKNTQEVFAQVKQIYKTPPIKDFGGFNFSQILPDPSKPSKRSFIEDLLFNKVTLADAGFIKQYGDCLGDIAARDLICAQKFNGLTVLPPLLTDEMIAQYTSALLAGTITSGWTFGAGAALQIPFAMQMAYRFNGIGVTQCVLYENQKLIANQFNSAIGKIQDSLSSTASALGKLQDVVNQNAQALNTLVKQLSSNFGAISSVLNDILSRLDKVEAEVQIDRLITGRLQSLQTYVTQQLIRAAEIRASANLAATKMSECVLGQSKRVDFCGKGYHLMSFPQSAPHGVVFLHVTYVPAQEKNFTTAPAICHEGKAHFPREGVFVSNGTHWFITQRNFYEPQIITTDNTFVCGSCDVVIGIVNNTVYDPLQPELDSGGGSGGGQIYEGKLTAEGLRFGIVASRFNHALVDRLVEGAIDAIVRHGGREEDITLVRVPGSWEIPVAAGELARKEDIDAVIAIGVLIRGATPHFDYIASEVSKGLADLSLELRKPITFGVITADTLEQAIERAGTKHGNKGWEAALSAIEMANLFKSLR

SEQ ID NO: 13922 - protein, 1299 aa, Artificial Sequence
  SARS-CoV-2/pangolin/Guangxi/P1E/2017__EPI_ISL_410539 spike protein (1-1139)(N906C_S1115C) LumSynth construct
MFVFLFVLPLVSSQCVNLTTRTGIQPGYTNSSTRGVYYPDKVFRSSILHLTQDLFLPFFSNVTWFNTINYQGGFKKFDNPVLPFNDGVYFASTEKSNIIRGWIFGTTLDARTQSLLIVNNATNVVIKVCEFQFCTDPFLGVYYHNNNKTWVENEFRVYSSANNCTFEYISQPFLMDLEGKQGNFKNLREFVFKNVDGYFKIYSKHTPIDLVRDLPRGFAALEPLVDLPIGINITRFQTLLALHRSYLTPGKLESGWTTGAAAYYVGYLQQRTFLLSYNQNGTITDAVDCSLDPLSETKCTLKSLTVEKGIYQTSNFRVQPTISIVRFPNITNLCPFGEVFNASKFASVYAWNRKRISNCVADYSVLYNSTSFSTFKCYGVSPTKLNDLCFTNVYADSFVVKGDEVRQIAPGQTGVIADYNYKLPDDFTGCVIAWNSVKQDALTGGNYLYRLFRKSKLKPFERDISTEIYQAGSTPCNGQVGLNCYYPLERYGFHPTTGVNYQPFRVVVLSFELLNGPATVCGPKLSTTLVKDKCVNFNFNGLTGTGVLTTSKKQFLPFQQFGRDISDTTDAVRDPQTLEILDITPCSFGGVSVITPGTNTSNQVAVLYQDVNCTEVPMAIHAEQLTPAWRVYSAGANVFQTRAGCLVGAEHVNNSYECDIPVGAGICASYHSMSSLRSVNQRSIIAYTMSLGAENSVAYSNNSIAIPTNFTISVTTEILPVSMTKTSVDCTMYICGDSIECSNLLLQYGSFCTQLNRALTGIAVEQDKNTQEVFAQVKQIYKTPPIKDFGGFNFSQILPDPSKPSKRSFIEDLLFNKVTLADAGFIKQYGDCLGDIAARDLICAQKFNGLTVLPPLLTDEMIAQYTSALLAGTITSGWTFGAGAALQIPFAMQMAYRFNGIGVTQCVLYENQKLIANQFNSAIGKIQDSLSSTASALGKLQDVVNQNAQALNTLVKQLSSNFGAISSVLNDILSRLDKVEAEVQIDRLITGRLQSLQTYVTQQLIRAAEIRASANLAATKMSECVLGQSKRVDFCGKGYHLMSFPQSAPHGVVFLHVTYVPAQEKNFTTAPAICHEGKAHFPREGVFVSNGTHWFITQRNFYEPQIITTDNTFVCGSCDVVIGIVNNTVYDPLQPELDSGGGSGGGQIYEGKLTAEGLRFGIVASRFNHALVDRLVEGAIDAIVRHGGREEDITLVRVPGSWEIPVAAGELARKEDIDAVIAIGVLIRGATPHFDYIASEVSKGLADLSLELRKPITFGVITADTLEQAIERAGTKHGNKGWEAALSAIEMANLFKSLR

SEQ ID NO: 13923 - protein, 1315 aa, Artificial Sequence
  SARS-CoV-2/Wuhan/WIV05/2019__EPI_ISL_402128 spike protein (1-1147)(N914C_S1123C) Ferritin construct
MFVFLVLLPLVSSQCVNLTTRTQLPPAYTNSFTRGVYYPDKVFRSSVLHSTQDLFLPFFSNVTWFHAIHVSGTNGTKRFDNPVLPFNDGVYFASTEKSNIIRGWIFGTTLDSKTQSLLIVNNATNVVIKVCEFQFCNDPFLGVYYHKNNKSWMESEFRVYSSANNCTFEYVSQPFLMDLEGKQGNFKNLREFVFKNIDGYFKIYSKHTPINLVRDLPQGFSALEPLVDLPIGINITRFQTLLALHRSYLTPGDSSSGWTAGAAAYYVGYLQPRTFLLKYNENGTITDAVDCALDPLSETKCTLKSFTVEKGIYQTSNFRVQPTESIVRFPNITNLCPFGEVFNATRFASVYAWNRKRISNCVADYSVLYNSASFSTFKCYGVSPTKLNDLCFTNVYADSFVIRGDEVRQIAPGQTGKIADYNYKLPDDFTGCVIAWNSNNLDSKVGGNYNYLYRLFRKSNLKPFERDISTEIYQAGSTPCNGVEGFNCYFPLQSYGFQPTNGVGYQPYRVVVLSFELLHAPATVCGPKKSTNLVKNKCVNFNFNGLTGTGVLTESNKKFLPFQQFGRDIADTTDAVRDPQTLEILDITPCSFGGVSVITPGTNTSNQVAVLYQDVNCTEVPVAIHADQLTPTWRVYSTGSNVFQTRAGCLIGAEHVNNSYECDIPIGAGICASYQTQTNSPRRARSVASQSIIAYTMSLGAENSVAYSNNSIAIPTNFTISVTTEILPVSMTKTSVDCTMYICGDSTECSNLLLQYGSFCTQLNRALTGIAVEQDKNTQEVFAQVKQIYKTPPIKDFGGFNFSQILPDPSKPSKRSFIEDLLFNKVTLADAGFIKQYGDCLGDIAARDLICAQKFNGLTVLPPLLTDEMIAQYTSALLAGTITSGWTFGAGAALQIPFAMQMAYRFNGIGVTQCVLYENQKLIANQFNSAIGKIQDSLSSTASALGKLQDVVNQNAQALNTLVKQLSSNFGAISSVLNDILSRLDKVEAEVQIDRLITGRLQSLQTYVTQQLIRAAEIRASANLAATKMSECVLGQSKRVDFCGKGYHLMSFPQSAPHGVVFLHVTYVPAQEKNFTTAPAICHDGKAHFPREGVFVSNGTHWFVTQRNFYEPQIITTDNTFVCGNCDVVIGIVNNTVYDPLQPELDSGGGGSDIIKLLNEQVNKEMQSSNLYMSMSSWCYTHSLDGAGLFLFDHAAEEYEHAKKLIIFLNENNVPVQLTSISAPEHKFEGLTQIFQKAYEHEQHISESINNIVDHAIKSKDHATFNFLQWYVAEQHEEEVLFKDILDKIELIGNENHGLYLADQYVKGIAKSRKS

SEQ ID NO: 13924 - protein, 1311 aa, Artificial Sequence
  SARS-CoV-2/bat/Yunnan/RaTG13/2013__EPI_ISL_402131 spike protein (1-1143)(N910C_S1119C) Ferritin construct
MFVFLVLLPLVSSQCVNLTTRTQLPPAYTNSSTRGVYYPDKVFRSSVLHLTQDLFLPFFSNVTWFHAIHVSGTNGIKRFDNPVLPFNDGVYFASTEKSNIIRGWIFGTTLDSKTQSLLIVNNATNVVIKVCEFQFCNDPFLGVYYHKNNKSWMESEFRVYSSANNCTFEYVSQPFLMDLEGKQGNFKNLREFVFKNIDGYFKIYSKHTPINLVRDLPPGFSALEPLVDLPIGINITRFQTLLALHRSYLTPGDSSSGWTAGAAAYYVGYLQPRTFLLKYNENGTITDAVDCALDPLSETKCTLKSFTVEKGIYQTSNFRVQPTDSIVRFPNITNLCPFGEVFNATTFASVYAWNRKRISNCVADYSVLYNSTSFSTFKCYGVSPTKLNDLCFTNVYADSFVITGDEVRQIAPGQTGKIADYNYKLPDDFTGCVIAWNSKHIDAKEGGNFNYLYRLFRKANLKPFERDISTEIYQAGSKPCNGQTGLNCYYPLYRYGFYPTDGVGHQPYRVVVLSFELLNAPATVCGPKKSTNLVKNKCVNFNFNGLTGTGVLTESNKKFLPFQQFGRDIADTTDAVRDPQTLEILDITPCSFGGVSVITPGTNASNQVAVLYQDVNCTEVPVAIHADQLTPTWRVYSTGSNVFQTRAGCLIGAEHVNNSYECDIPIGAGICASYQTQTNSRSVASQSIIAYTMSLGAENSVAYSNNSIAIPTNFTISVTTEILPVSMTKTSVDCTMYICGDSTECSNLLLQYGSFCTQLNRALTGIAVEQDKNTQEVFAQVKQIYKTPPIKDFGGFNFSQILPDPSKPSKRSFIEDLLFNKVTLADAGFIKQYGDCLGDIAARDLICAQKFNGLTVLPPLLTDEMIAQYTSALLAGTITSGWTFGAGAALQIPFAMQMAYRFNGIGVTQCVLYENQKLIANQFNSAIGKIQDSLSSTASALGKLQDVVNQNAQALNTLVKQLSSNFGAISSVLNDILSRLDKVEAEVQIDRLITGRLQSLQTYVTQQLIRAAEIRASANLAATKMSECVLGQSKRVDFCGKGYHLMSFPQSAPHGVVFLHVTYVPAQEKNFTTAPAICHDGKAHFPREGVFVSNGTHWFVTQRNFYEPQIITTDNTFVCGSCDVVIGIVNNTVYDPLQPELDSGGGGSDIIKLLNEQVNKEMQSSNLYMSMSSWCYTHSLDGAGLFLFDHAAEEYEHAKKLIIFLNENNVPVQLTSISAPEHKFEGLTQIFQKAYEHEQHISESINNIVDHAIKSKDHATFNFLQWYVAEQHEEEVLFKDILDKIELIGNENHGLYLADQYVKGIAKSRKS

SEQ ID NO: 13925 - protein, 1315 aa, Artificial Sequence
  SARS-CoV-2/Wuhan/HBCDC-HB-01/2019__EPI_ISL_402132 spike protein (1-1147)(N914C_S1123C) Ferritin construct
MFVFLVLLPLVSSQCVNLTTRTQLPPAYTNSITRGVYYPDKVFRSSVLHSTQDLFLPFFSNVTWFHAIHVSGTNGTKRFDNPVLPFNDGVYFASTEKSNIIRGWIFGTTLDSKTQSLLIVNNATNVVIKVCEFQFCNDPFLGVYYHKNNKSWMESEFRVYSSANNCTFEYVSQPFLMDLEGKQGNFKNLREFVFKNIDGYFKIYSKHTPINLVRDLPQGFSALEPLVDLPIGINITRFQTLLALHRSYLTPGDSSSGWTAGAAAYYVGYLQPRTFLLKYNENGTITDAVDCALDPLSETKCTLKSFTVEKGIYQTSNFRVQPTESIVRFPNITNLCPFGEVFNATRFASVYAWNRKRISNCVADYSVLYNSASFSTFKCYGVSPTKLNDLCFTNVYADSFVIRGDEVRQIAPGQTGKIADYNYKLPDDFTGCVIAWNSNNLDSKVGGNYNYLYRLFRKSNLKPFERDISTEIYQAGSTPCNGVEGFNCYFPLQSYGFQPTNGVGYQPYRVVVLSFELLHAPATVCGPKKSTNLVKNKCVNFNFNGLTGTGVLTESNKKFLPFQQFGRDIADTTDAVRDPQTLEILDITPCSFGGVSVITPGTNTSNQVAVLYQDVNCTEVPVAIHADQLTPTWRVYSTGSNVFQTRAGCLIGAEHVNNSYECDIPIGAGICASYQTQTNSPRRARSVASQSIIAYTMSLGAENSVAYSNNSIAIPTNFTISVTTEILPVSMTKTSVDCTMYICGDSTECSNLLLQYGSFCTQLNRALTGIAVEQDKNTQEVFAQVKQIYKTPPIKDFGGFNFSQILPDPSKPSKRSFIEDLLFNKVTLADAGFIKQYGDCLGDIAARDLICAQKFNGLTVLPPLLTDEMIAQYTSALLAGTITSGWTFGAGAALQIPFAMQMAYRFNGIGVTQCVLYENQKLIANQFNSAIGKIQDSLSSTASALGKLQDVVNQNAQALNTLVKQLSSNFGAISSVLNDILSRLDKVEAEVQIDRLITGRLQSLQTYVTQQLIRAAEIRASANLAATKMSECVLGQSKRVDFCGKGYHLMSFPQSAPHGVVFLHVTYVPAQEKNFTTAPAICHDGKAHFPREGVFVSNGTHWFVTQRNFYEPQIITTDNTFVCGNCDVVIGIVNNTVYDPLQPELDSGGGGSDIIKLLNEQVNKEMQSSNLYMSMSSWCYTHSLDGAGLFLFDHAAEEYEHAKKLIIFLNENNVPVQLTSISAPEHKFEGLTQIFQKAYEHEQHISESINNIVDHAIKSKDHATFNFLQWYVAEQHEEEVLFKDILDKIELIGNENHGLYLADQYVKGIAKSRKS

SEQ ID NO: 13926 - protein, 1315 aa, Artificial Sequence
  SARS-CoV-2/Guangdong/20SF028/2020__EPI_ISL_403936 spike protein (1-1147)(N914C_S1123C) Ferritin construct
MFVFLVLLPLVSSQCVNLTTRTQLPPAYTNSFTRGVYYPDKVFRSSVLYSTQDLFLPFFSNVTWFHAIHVSGTNGTKRFDNPVLPFNDGVYFASTEKSNIIRGWIFGTTLDSKTQSLLIVNNATNVVIKVCEFQFCNDPFLGVYYHKNNKSWMESEFRVYSSANNCTFEYVSQPFLMDLEGKQGNFKNLREFVFKNIDGYFKIYSKHTPINLVRDLPQGFSALEPLVDLPIGINITRFQTLLALHRSYLTPGDSSSGWTAGAAAYYVGYLQPRTFLLKYNENGTITDAVDCALDPLSETKCTLKSFTVEKGIYQTSNFRVQPTESIVRFPNITNLCPFGEVFNATRFASVYAWNRKRISNCVADYSVLYNSASFSTFKCYGVSPTKLNDLCFTNVYADSFVIRGDEVRQIAPGQTGKIADYNYKLPDDFTGCVIAWNSNNLDSKVGGNYNYLYRLFRKSNLKPFERDISTEIYQAGSTPCNGVEGFNCYFPLQSYGFQPTNGVGYQPYRVVVLSFELLHAPATVCGPKKSTNLVKNKCVNFNFNGLTGTGVLTESNKKFLPFQQFGRDIADTTDAVRDPQTLEILDITPCSFGGVSVITPGTNTSNQVAVLYQDVNCTEVPVAIHADQLTPTWRVYSTGSNVFQTRAGCLIGAEHVNNSYECDIPIGAGICASYQTQTNSPRRARSVASQSIIAYTMSLGAENSVAYSNNSIAIPTNFTISVTTEILPVSMTKTSVDCTMYICGDSTECSNLLLQYGSFCTQLNRALTGIAVEQDKNTQEVFAQVKQIYKTPPIKDFGGFNFSQILPDPSKPSKRSFIEDLLFNKVTLADAGFIKQYGDCLGDIAARDLICAQKFNGLTVLPPLLTDEMIAQYTSALLAGTITSGWTFGAGAALQIPFAMQMAYRFNGIGVTQCVLYENQKLIANQFNSAIGKIQDSLSSTASALGKLQDVVNQNAQALNTLVKQLSSNFGAISSVLNDILSRLDKVEAEVQIDRLITGRLQSLQTYVTQQLIRAAEIRASANLAATKMSECVLGQSKRVDFCGKGYHLMSFPQSAPHGVVFLHVTYVPAQEKNFTTAPAICHDGKAHFPREGVFVSNGTHWFVTQRNFYEPQIITTDNTFVCGNCDVVIGIVNNTVYDPLQPELDSGGGGSDIIKLLNEQVNKEMQSSNLYMSMSSWCYTHSLDGAGLFLFDHAAEEYEHAKKLIIFLNENNVPVQLTSISAPEHKFEGLTQIFQKAYEHEQHISESINNIVDHAIKSKDHATFNFLQWYVAEQHEEEVLFKDILDKIELIGNENHGLYLADQYVKGIAKSRKS

SEQ ID NO: 13927 - protein, 1315 aa, Artificial Sequence
  SARS-CoV-2/Shenzhen/SZTH-001/2020__EPI_ISL_406592 spike protein (1-1147)(N914C_S1123C) Ferritin construct
MFVFLVLLPLVSSQCVNLTTRTQLPPAYTNSFTRGVYYPDKVFRSSVLHSTQDLFLPFFSNVTWFHAIHVSGTNGTKRFDNPVLPFNDGVYFASTEKSNIIRGWIFGTTLDSKTQSLLIVNNATNVVIKVCEFQFCNDPFLGVYYHKNNKSWMESEFRVYSSANNCTFEYVSQPFLMDLEGKQGNFKNLREFVFKNIDGYFKIYSKHTPINLVRDLPQGFSALEPLVDLPIGINITRFQTLLALHRSYLTPGDSSSGWTAGAAAYYVGYLQPRTFLLKYNENGTITDAVDCALDPLSETKCTLKSFTVEKGIYQTSNFRVQPTESIVRFPNITNLCPFGEVFNATRFASVYAWNRKRISNCVADYSVLYNSASFSTFKCYGVSPTKLNDLCFTNVYADSFVIRGDEVRQIAPGQTGKIADYNYKLPDDFTGCVIAWNSNNLDSKVGGNYNYLYRLFRKSNLKPFERDISTEIYQAGSTPCNGVEGFNCYFPLQSYGFQPTNGVGYQPYRVVVLSFELLHAPATVCGPKKSTNLVKNKCVNFNFNGLTGTGVLTESNKKFLPFQQFGRDIADTTDAVRDPQTLEILDITPCSFGGVSVITPGTNTSNQVAVLYQDVNCTEVPVAIHADQLTPTWRVYSTGSNVFQTRAGCLIGAEHVNNSYECDIPIGAGICASYQTQTNSPRRARSVASQSIIAYTMSLGAENSVAYSNNSIAIPTNFTISVTTEILPVSMTKTSVDCTMYICGDSTECSNLLLQYGSFCTQLNRALTGIAVEQDKNTQEVFAQVKQIYKTPPIKDFGGFNFSQILPDPSKPSKRSFIEDLLFNKVTLADAGFIKQYGDCLGDIAARDLICAQKFNGLTVLPPLLTDEMIAQYTSALLAGTITSGWTFGAGAALQIPFAMQMAYRFNGIGVTQCVLYENQKLIANQFNSAIGKIQDSLSSTASALGKLQDVVNQNAQALNTLVKQLSSNFGAISSVLNDILSRLDKVEAEVQIDRLITGRLQSLQTYVTQQLIRAAEIRASANLAATKMSECVLGQSKRVDFCGKGYHLMSFPQSAPHGVVFLHVTYVPAQEKNFTTAPAICHDGKAHFPREGVFVSNGTHWFVTQRNFYEPQIITTDNTFVCGNCDVLIGIVNNTVYDPLQPELDSGGGGSDIIKLLNEQVNKEMQSSNLYMSMSSWCYTHSLDGAGLFLFDHAAEEYEHAKKLIIFLNENNVPVQLTSISAPEHKFEGLTQIFQKAYEHEQHISESINNIVDHAIKSKDHATFNFLQWYVAEQHEEEVLFKDILDKIELIGNENHGLYLADQYVKGIAKSRKS

SEQ ID NO: 13928 - protein, 1315 aa, Artificial Sequence
  SARS-CoV-2/Shenzhen/SZTH-004/2020__EPI_ISL_406595 spike protein (1-1147)(N914C_S1123C) Ferritin construct
MFVFLVLLPLVSSQCVNLTTRTQLPPAYTNSFTRGVYYPDKVFRSSVLHSTQDLFLPFFSNVTWFHAIHVSGTNGTKRFDNPVLPFNDGVYFASTEKSNIIRGWIFGTTLDSKTQSLLIVNNATNVVIKVCEFQFCNDPFLGVYYHKNNKSWMESEFRVYSSANNCTFEYVSQPFLMDLEGKQGNFKNLREFVFKNIDGYFKIYSKHTPINLVRDLPQGFSALEPLVDLPIGINITRFQTLLALHRSYLTPGDSSSGWTAGAAAYYVGYLQPRTFLLKYNENGTITDAVDCALDPLSETKCTLKSFTVEKGIYQTSNFRVQPTESIVRFPNITNLCPFGEVFNATRFASVYAWDRKRISNCVAYYSVLYNSASFSTFKCYGVSPTKLNDLCFTNVYADSFVIRGDEVRQIAPGQTGKIADYNYKLPDDFTGCVIAWNSNNLDSKVGGNYNYLYRLFRKSNLKPFERDISTEIYQAGSTPCNGVEGFNCYFPLQSYGFQPTNGVGYQPYRVVVLSFELLHAPATVCGPKKSTNLVKNKCVNFNFNGLTGTGVLTESNKKFLPFQQFGRDIADTTDAVRDPQTLEILDITPCSFGGVSVITPGTNTSNQVAVLYQDVNCTEVPVAIHADQLTPTWRVYSTGSNVFQTRAGCLIGAEHVNNSYECDIPIGAGICASYQTQTNSPRRARSVASQSIIAYTMSLGAENSVAYSNNSIAIPTNFTISVTTEILPVSMTKTSVDCTMYICGDSTECSNLLLQYGSFCTQLNRALTGIAVEQDKNTQEVFAQVKQIYKTPPIKDFGGFNFSQILPDPSKPSKRSFIEDLLFNKVTLADAGFIKQYGDCLGDIAARDLICAQKFNGLTVLPPLLTDEMIAQYTSALLAGTITSGWTFGAGAALQIPFAMQMAYRFNGIGVTQCVLYENQKLIANQFNSAIGKIQDSLSSTASALGKLQDVVNQNAQALNTLVKQLSSNFGAISSVLNDILSRLDKVEAEVQIDRLITGRLQSLQTYVTQQLIRAAEIRASANLAATKMSECVLGQSKRVDFCGKGYHLMSFPQSAPHGVVFLHVTYVPAQEKNFTTAPAICHDGKAHFPREGVFVSNGTHWFVTQRNFYEPQIITTDNTFVCGNCDVVIGIVNNTVYDPLQPELDSGGGGSDIIKLLNEQVNKEMQSSNLYMSMSSWCYTHSLDGAGLFLFDHAAEEYEHAKKLIIFLNENNVPVQLTSISAPEHKFEGLTQIFQKAYEHEQHISESINNIVDHAIKSKDHATFNFLQWYVAEQHEEEVLFKDILDKIELIGNENHGLYLADQYVKGIAKSRKS

SEQ ID NO: 13929 - protein, 1315 aa, Artificial Sequence
  SARS-CoV-2/France/IDF0372/2020__EPI_ISL_406596 spike protein (1-1147)(N914C_S1123C) Ferritin construct
MFVFLVLLPLVSSQCVNLTTRTQLPPAYTNSFTRGVYYPDKVFRSSVLHSTQDLFLPFFSNVTWFHAIHVSGTNGTKRFDNPVLPFNDGVYFASTEKSNIIRGWIFGTTLDSKTQSLLIVNNATNVVIKVCEFQFCNDPFLGVYYHKNNKSWMESEFRVYSSANNCTFEYVSQPFLMDLEGKQGNFKNLREFVFKNIDGYFKIYSKHTPINLVRDLPQGFSALEPLVDLPIGINITRFQTLLALHRSYLTPGDSSSGWTAGAAAYYVGYLQPRTFLLKYNENGTITDAVDCALDPLSETKCTLKSFTVEKGIYQTSNFRVQPTESIVRFPNITNLCPFGEVFNATRFASVYAWNRKRISNCVADYSFLYNSASFSTFKCYGVSPTKLNDLCFTNVYADSFVIRGDEVRQIAPGQTGKIADYNYKLPDDFTGCVIAWNSNNLDSKVGGNYNYLYRLFRKSNLKPFERDISTEIYQAGSTPCNGVEGFNCYFPLQSYGFQPTNGVGYQPYRVVVLSFELLHAPATVCGPKKSTNLVKNKCVNFNFNGLTGTGVLTESNKKFLPFQQFGRDIADTTDAVRDPQTLEILDITPCSFGGVSVITPGTNTSNQVAVLYQDVNCTEVPVAIHADQLTPTWRVYSTGSNVFQTRAGCLIGAEHVNNSYECDIPIGAGICASYQTQTNSPRRARSVASQSIIAYTMSLGAENSVAYSNNSIAIPTNFTISVTTEILPVSMTKTSVDCTMYICGDSTECSNLLLQYGSFCTQLNRALTGIAVEQDKNTQEVFAQVKQIYKTPPIKDFGGFNFSQILPDPSKPSKRSFIEDLLFNKVTLADAGFIKQYGDCLGDIAARDLICAQKFNGLTVLPPLLTDEMIAQYTSALLAGTITSGWTFGAGAALQIPFAMQMAYRFNGIGVTQCVLYENQKLIANQFNSAIGKIQDSLSSTASALGKLQDVVNQNAQALNTLVKQLSSNFGAISSVLNDILSRLDKVEAEVQIDRLITGRLQSLQTYVTQQLIRAAEIRASANLAATKMSECVLGQSKRVDFCGKGYHLMSFPQSAPHGVVFLHVTYVPAQEKNFTTAPAICHDGKAHFPREGVFVSNGTHWFVTQRNFYEPQIITTDNTFVCGNCDVVIGIVNNTVYDPLQPELDSGGGGSDIIKLLNEQVNKEMQSSNLYMSMSSWCYTHSLDGAGLFLFDHAAEEYEHAKKLIIFLNENNVPVQLTSISAPEHKFEGLTQIFQKAYEHEQHISESINNIVDHAIKSKDHATFNFLQWYVAEQHEEEVLFKDILDKIELIGNENHGLYLADQYVKGIAKSRKS

SEQ ID NO: 13930 - protein, 1315 aa, Artificial Sequence
  SARS-CoV-2/Australia/VIC01/2020__EPI_ISL_406844 spike protein (1-1147)(N914C_S1123C) Ferritin construct
MFVFLVLLPLVSSQCVNLTTRTQLPPAYTNSFTRGVYYPDKVFRSSVLHSTQDLFLPFFSNVTWFHAIHVSGTNGTKRFDNPVLPFNDGVYFASTEKSNIIRGWIFGTTLDSKTQSLLIVNNATNVVIKVCEFQFCNDPFLGVYYHKNNKSWMESEFRVYSSANNCTFEYVSQPFLMDLEGKQGNFKNLREFVFKNIDGYFKIYSKHTPINLVRDLPQGFSALEPLVDLPIGINITRFQTLLALHRRYLTPGDSSSGWTAGAAAYYVGYLQPRTFLLKYNENGTITDAVDCALDPLSETKCTLKSFTVEKGIYQTSNFRVQPTESIVRFPNITNLCPFGEVFNATRFASVYAWNRKRISNCVADYSVLYNSASFSTFKCYGVSPTKLNDLCFTNVYADSFVIRGDEVRQIAPGQTGKIADYNYKLPDDFTGCVIAWNSNNLDSKVGGNYNYLYRLFRKSNLKPFERDISTEIYQAGSTPCNGVEGFNCYFPLQSYGFQPTNGVGYQPYRVVVLSFELLHAPATVCGPKKSTNLVKNKCVNFNFNGLTGTGVLTESNKKFLPFQQFGRDIADTTDAVRDPQTLEILDITPCSFGGVSVITPGTNTSNQVAVLYQDVNCTEVPVAIHADQLTPTWRVYSTGSNVFQTRAGCLIGAEHVNNSYECDIPIGAGICASYQTQTNSPRRARSVASQSIIAYTMSLGAENSVAYSNNSIAIPTNFTISVTTEILPVSMTKTSVDCTMYICGDSTECSNLLLQYGSFCTQLNRALTGIAVEQDKNTQEVFAQVKQIYKTPPIKDFGGFNFSQILPDPSKPSKRSFIEDLLFNKVTLADAGFIKQYGDCLGDIAARDLICAQKFNGLTVLPPLLTDEMIAQYTSALLAGTITSGWTFGAGAALQIPFAMQMAYRFNGIGVTQCVLYENQKLIANQFNSAIGKIQDSLSSTASALGKLQDVVNQNAQALNTLVKQLSSNFGAISSVLNDILSRLDKVEAEVQIDRLITGRLQSLQTYVTQQLIRAAEIRASANLAATKMSECVLGQSKRVDFCGKGYHLMSFPQSAPHGVVFLHVTYVPAQEKNFTTAPAICHDGKAHFPREGVFVSNGTHWFVTQRNFYEPQIITTDNTFVCGNCDVVIGIVNNTVYDPLQPELDSGGGGSDIIKLLNEQVNKEMQSSNLYMSMSSWCYTHSLDGAGLFLFDHAAEEYEHAKKLIIFLNENNVPVQLTSISAPEHKFEGLTQIFQKAYEHEQHISESINNIVDHAIKSKDHATFNFLQWYVAEQHEEEVLFKDILDKIELIGNENHGLYLADQYVKGIAKSRKS

SEQ ID NO: 13931 - protein, 1315 aa, Artificial Sequence
  SARS-CoV-2/Germany/BavPat1/2020__EPI_ISL_406862 spike protein (1-1147)(N914C_S1123C) Ferritin construct
MFVFLVLLPLVSSQCVNLTTRTQLPPAYTNSFTRGVYYPDKVFRSSVLHSTQDLFLPFFSNVTWFHAIHVSGTNGTKRFDNPVLPFNDGVYFASTEKSNIIRGWIFGTTLDSKTQSLLIVNNATNVVIKVCEFQFCNDPFLGVYYHKNNKSWMESEFRVYSSANNCTFEYVSQPFLMDLEGKQGNFKNLREFVFKNIDGYFKIYSKHTPINLVRDLPQGFSALEPLVDLPIGINITRFQTLLALHRSYLTPGDSSSGWTAGAAAYYVGYLQPRTFLLKYNENGTITDAVDCALDPLSETKCTLKSFTVEKGIYQTSNFRVQPTESIVRFPNITNLCPFGEVFNATRFASVYAWNRKRISNCVADYSVLYNSASFSTFKCYGVSPTKLNDLCFTNVYADSFVIRGDEVRQIAPGQTGKIADYNYKLPDDFTGCVIAWNSNNLDSKVGGNYNYLYRLFRKSNLKPFERDISTEIYQAGSTPCNGVEGFNCYFPLQSYGFQPTNGVGYQPYRVVVLSFELLHAPATVCGPKKSTNLVKNKCVNFNFNGLTGTGVLTESNKKFLPFQQFGRDIADTTDAVRDPQTLEILDITPCSFGGVSVITPGTNTSNQVAVLYQGVNCTEVPVAIHADQLTPTWRVYSTGSNVFQTRAGCLIGAEHVNNSYECDIPIGAGICASYQTQTNSPRRARSVASQSIIAYTMSLGAENSVAYSNNSIAIPTNFTISVTTEILPVSMTKTSVDCTMYICGDSTECSNLLLQYGSFCTQLNRALTGIAVEQDKNTQEVFAQVKQIYKTPPIKDFGGFNFSQILPDPSKPSKRSFIEDLLFNKVTLADAGFIKQYGDCLGDIAARDLICAQKFNGLTVLPPLLTDEMIAQYTSALLAGTITSGWTFGAGAALQIPFAMQMAYRFNGIGVTQCVLYENQKLIANQFNSAIGKIQDSLSSTASALGKLQDVVNQNAQALNTLVKQLSSNFGAISSVLNDILSRLDKVEAEVQIDRLITGRLQSLQTYVTQQLIRAAEIRASANLAATKMSECVLGQSKRVDFCGKGYHLMSFPQSAPHGVVFLHVTYVPAQEKNFTTAPAICHDGKAHFPREGVFVSNGTHWFVTQRNFYEPQIITTDNTFVCGNCDVVIGIVNNTVYDPLQPELDSGGGGSDIIKLLNEQVNKEMQSSNLYMSMSSWCYTHSLDGAGLFLFDHAAEEYEHAKKLIIFLNENNVPVQLTSISAPEHKFEGLTQIFQKAYEHEQHISESINNIVDHAIKSKDHATFNFLQWYVAEQHEEEVLFKDILDKIELIGNENHGLYLADQYVKGIAKSRKS

SEQ ID NO: 13932 - protein, 1315 aa, Artificial Sequence
  SARS-CoV-2/Wuhan/HBCDC-HB-02/2020__EPI_ISL_412978 spike protein (1-1147)(N914C_S1123C) Ferritin construct
MFVFLVLLPLVSSQCVNLTTRTQLPPAYTNSFTRGVYYPDKVFRSSVLHSTQDLFLPFFSNVTWFHAIHVSGTNGTKRFDNPVLPFNDGVYFASTEKSNIIRGWIFGTTLDSKTQSLLIVNNATNVVIKVCEFQFCNDPFLGVYYHKNNKSWMESEFRVYSSANNCTFEYVSQPFLMDLEGKQGNFKNLREFVFKNIDGYFKIYSKHTPINLVRDLPQGFSALEPLVDLPIGINITRFQTLLALHRSYLTPGDSSSGWTAGAAAYYVGYLQPRTFLLKYNENGTITDAVDCALDPLSETKCTLKSFTVEKGIYQTSNFRVQPTESIVRFPNITNLCPFGEVFNATRFASVYAWNRKRISNCVADYSVLYNSASFSTFKCYGVSPTKLNDLCFTNVYADSFVIRGDEVRQIAPGQTGKIADYNYKLPDDFTGCVIAWNSNNLDSKVGGNYNYLYRLFRKSNLKPFERDISTEIYQAGSTPCNGVEGFNCYFPLQSYGFQPTNGVGYQPYRVVVLSFELLHAPATVCGPKKSTNLVKNKCVNFNFNGLTGTGVLTESNKKFLPFQQFGRDIADTTDAVRDPQTLEILDITPCSFGGVSVITPGTNTSNQVAVLYQDVNCTEVPVAIHADQLTPTWRVYSTGSNVFQTRAGCLIGAEHVNNSYECDIPIGAGICASYQTQTNSPRRARSVASQSIIAYTMSLGAENSVAYSNNSIAIPTNFTISVTTEILPVSMTKTSVDCTMYICGDSTECSNFLLQYGSFCTQLNRALTGIAVEQDKNTQEVFAQVKQIYKTPPIKDFGGFNFSQILPDPSKPSKRSFIEDLLFNKVTLADAGFIKQYGDCLGDIAARDLICAQKFNGLTVLPPLLTDEMIAQYTSALLAGTITSGWTFGAGAALQIPFAMQMAYRFNGIGVTQCVLYENQKLIANQFNSAIGKIQDSLSSTASALGKLQDVVNQNAQALNTLVKQLSSNFGAISSVLNDILSRLDKVEAEVQIDRLITGRLQSLQTYVTQQLIRAAEIRASANLAATKMSECVLGQSKRVDFCGKGYHLMSFPQSAPHGVVFLHVTYVPAQEKNFTTAPAICHDGKAHFPREGVFVSNGTHWFVTQRNFYEPQIITTDNTFVCGNCDVVIGIVNNTVYDPLQPELDSGGGGSDIIKLLNEQVNKEMQSSNLYMSMSSWCYTHSLDGAGLFLFDHAAEEYEHAKKLIIFLNENNVPVQLTSISAPEHKFEGLTQIFQKAYEHEQHISESINNIVDHAIKSKDHATFNFLQWYVAEQHEEEVLFKDILDKIELIGNENHGLYLADQYVKGIAKSRKS

SEQ ID NO: 13933 - protein, 1315 aa, Artificial Sequence
  SARS-CoV-2/Australia/QLD02/2020__EPI_ISL_407896 spike protein (1-1147)(N914C_S1123C) Ferritin construct
MFVFLVLLPLVSSQCVNLTTRTQLPPAYTNSFTRGVYYPDKVFRSSVLHSTQDLFLPFFSNVTWFHAIHVSGTNGTKRFDNPVLPFNDGVYFASTEKSNIIRGWIFGTTLDSKTQSLLIVNNATNVVIKVCEFQFCNDPFLGVYYHKNNKSWMESEFRVYSSANNCTFEYVSQPFLMDLEGKQGNFKNLREFVFKNIDGYFKIYSKHTPINLVRDLPQGFSALEPLVDLPIGINITRFQTLLALHRSYLTPGDSSSGWTAGAAAYYVGYLQPRTFLLKYNENGTITDAVDCALDPLSETKCTLKSFTVEKGIYQTSNFRVQPTESIVRFPNITNLCPFGEVFNATRFASVYAWNRKRISNCVADYSVLYNSASFSTFKCYGVSPTKLNDLCFTNVYADSFVIRGDEVRQIAPGQTGKIADYNYKLPDDFTGCVIAWNSNNLDSKVGGNYNYLYRLFRKSNLKPFERDISTEIYQAGSTPCNGVEGFNCYFPLQSYGFQPTNGVGYQPYRVVVLSFELLHAPATVCGPKKSTNLVKNKCVNFNFNGLTGTGVLTESNKKFLPFQQFGRDIADTTDAVRDPQTLEILDITPCSFGGVSVITPGTNTSNQVAVLYQDVNCTEVPVAIHADQLTPTWRVYSTGSNVFQTRAGCLIGAEHVNNSYECDIPIGAGICASYQTQTNSPRRARSVASQSIIAYTMSLGAENSVAYSNNSIAIPTNFTISVTTEILPVSMTKTSVDCTMYICGDSTECSNLLLQYGSFCTQLNRALTGIAVEQDKNTQEVFAQVKQIYKTPPIKDFGGFNFSQILPDPSKPSKRSFIEDLLFNKVTLADAGFIKQYGDCLGDIAARDLICAQKFNGLTVLPPLLTDEMIAQYTSALLAGTITSGWTFGAGAALQIPFAMQMAYRFNGIGVTQCVLYENQKLIANQFNSAIGKIQDSLSSTASALGKLQDVVNQNAQALNTLVKQLSSNFGAISSVLNDILSRLDKVEAEVQIDRLITGRLQSLQTYVTQQLIRAAEIRASANLAATKMSECVLGQSKRVDFCGKGYHLMSFPQSAPHGVVFLHVTYVPAQEKNFTTAPAICHDGKAHFPREGVFVSNGTHWFVTQRNFYEPQIITTDNTFVCGNCDVVIGIVNNTVYDPLQLELDSGGGGSDIIKLLNEQVNKEMQSSNLYMSMSSWCYTHSLDGAGLFLFDHAAEEYEHAKKLIIFLNENNVPVQLTSISAPEHKFEGLTQIFQKAYEHEQHISESINNIVDHAIKSKDHATFNFLQWYVAEQHEEEVLFKDILDKIELIGNENHGLYLADQYVKGIAKSRKS

SEQ ID NO: 13934 - protein, 1315 aa, Artificial Sequence
  SARS-CoV-2/India/1-31/2020__EPI_ISL_413523 spike protein (1-1147)(N914C_S1123C) Ferritin construct
MFVFLVLLPLVSSQCVNLTTRTQLPPAYTNSFTRGVYYPDKVFRSSVLHSTQDLFLPFFSNVTWFHAIHVSGTNGTKRFDNPVLPFNDGVYFASTEKSNIIRGWIFGTTLDSKTQSLLIVNNATNVVIKVCEFQFCNDPFLGVYYHKNNKSWMESEFRVYSSANNCTFEYVSQPFLMDLEGKQGNFKNLREFVFKNIDGYFKIYSKHTPINLVRDLPQGFSALEPLVDLPIGINITRFQTLLALHRSYLTPGDSSSGWTAGAAAYYVGYLQPRTFLLKYNENGTITDAVDCALDPLSETKCTLKSFTVEKGIYQTSNFRVQPTESIVRFPNITNLCPFGEVFNATRFASVYAWNRKRISNCVADYSVLYNSASFSTFKCYGVSPTKLNDLCFTNVYADSFVIRGDEVRQIAPGQTGKIADYNYKLPDDFTGCVIAWNSNNLDSKVGGNYNYLYRLFRKSNLKPFERDISTEIYQAGSTPCNGVEGFNCYFPLQSYGFQPTNGVGYQPYRVVVLSFELLHAPATVCGPKKSTNLVKNKCVNFNFNGLTGTGVLTESNKKFLPFQQFGRDIADTTDAVRDPQTLEILDITPCSFGGVSVITPGTNTSNQVAVLYQDVNCTEVPVAIHADQLTPTWRVYSTGSNVFQTRAGCLIGAEHVNNSYECDIPIGAGICASYQTQTNSPRRARSVASQSIIAYTMSLGAENSVAYSNNSIAIPTNFTISVTTEILPVSMTKTSVDCTMYICGDSTECSNLLLQYGSFCTQLNRALTGIAVEQDKNTQEVFAQVKQIYKTPPIKDFGGFNFSQILPDPSKPSKRSFIEDLLFNKVTLADAGFIKQYGDCLGDIAARDLICAQKFNGLTVLPPLLTDEMIAQYTSALLAGTITSGWTFGAGAALQIPFAMQMAYRFNGIGVTQCVLYENQKLIANQFNSVIGKIQDSLSSTASALGKLQDVVNQNAQALNTLVKQLSSNFGAISSVLNDILSRLDKVEAEVQIDRLITGRLQSLQTYVTQQLIRAAEIRASANLAATKMSECVLGQSKRVDFCGKGYHLMSFPQSAPHGVVFLHVTYVPAQEKNFTTAPAICHDGKAHFPREGVFVSNGTHWFVTQRNFYEPQIITTDNTFVCGNCDVVIGIVNNTVYDPLQPELDSGGGGSDIIKLLNEQVNKEMQSSNLYMSMSSWCYTHSLDGAGLFLFDHAAEEYEHAKKLIIFLNENNVPVQLTSISAPEHKFEGLTQIFQKAYEHEQHISESINNIVDHAIKSKDHATFNFLQWYVAEQHEEEVLFKDILDKIELIGNENHGLYLADQYVKGIAKSRKS

SEQ ID NO: 13935 - protein, 1315 aa, Artificial Sequence
  SARS-CoV-2/Guangdong/GD2020087-P0008/2020__EPI_ISL_413863 spike protein (1-1147)(N914C_S1123C) Ferritin construct
MFVFLVLLPLVSSQCVNLTTRTQLPPAYTNSFTRGVYYPDKVFRSSVLHSTQDLFLPFFSNVTWFHAIHVSGTNGTKRFDNPVLPFNDGVYFASTEKSNIIRGWIFGTTLDSKTQSLLIVNNATNVVIKVCEFQFCNDPFLGVYYHKNNKSWMESEFRVYSSANNCTFEYVSQPFLMDLEGKQGNFKNLREFVFKNIDGYFKIYSKHTPINLVRDLPQGFSALEPLVDLPIGINITRFQTLLALHRSYLTPGDSSSGWTAGAAAYYVGYLQPRTFLLKYNENGTITDAVDCALDPLSETKCTLKSFTVEKGIYQTSNFRVQPTESIVRFPNITNLCPFGEVFNATRFASVYAWNRKRISNCVADYSVLYNSASFSTFKCYGVSPTKLNDLCFTNVYADSFVIRGDEVREIAPGQTGKIADYNYKLPDDFTGCVIAWNSNNLDSKVGGNYNYLYRLFRKSNLKPFERDISTEIYQAGSTPCNGVEGFNCYFPLQSYGFQPTNGVGYQPYRVVVLSFELLHAPATVCGPKKSTNLVKNKCVNFNFNGLTGTGVLTESNKKFLPFQQFGRDIADTTDAVRDPQTLEILDITPCSFGGVSVITPGTNTSNQVAVLYQDVNCTEVPVAIHADQLTPTWRVYSTGSNVFQTRAGCLIGAEHVNNSYECDIPIGAGICASYQTQTNSPRRARSVASQSIIAYTMSLGAENSVAYSNNSIAIPTNFTISVTTEILPVSMTKTSVDCTMYICGDSTECSNLLLQYGSFCTQLNRALTGIAVEQDKNTQEVFAQVKQIYKTPPIKDFGGFNFSQILPDPSKPSKRSFIEDLLFNKVTLADAGFIKQYGDCLGDIAARDLICAQKFNGLTVLPPLLTDEMIAQYTSALLAGTITSGWTFGAGAALQIPFAMQMAYRFNGIGVTQCVLYENQKLIANQFNSAIGKIQDSLSSTASALGKLQDVVNQNAQALNTLVKQLSSNFGAISSVLNDILSRLDKVEAEVQIDRLITGRLQSLQTYVTQQLIRAAEIRASANLAATKMSECVLGQSKRVDFCGKGYHLMSFPQSAPHGVVFLHVTYVPAQEKNFTTAPAICHDGKAHFPREGVFVSNGTHWFVTQRNFYEPQIITTDNTFVCGNCDVVIGIVNNTVYDPLQPELDSGGGGSDIIKLLNEQVNKEMQSSNLYMSMSSWCYTHSLDGAGLFLFDHAAEEYEHAKKLIIFLNENNVPVQLTSISAPEHKFEGLTQIFQKAYEHEQHISESINNIVDHAIKSKDHATFNFLQWYVAEQHEEEVLFKDILDKIELIGNENHGLYLADQYVKGIAKSRKS

SEQ ID NO: 13936 - protein, 1315 aa, Artificial Sequence
  SARS-CoV-2/Sweden/01/2020__EPI_ISL_411951 spike protein (1-1147)(N914C_S1123C) Ferritin construct
MFVFLVLLPLVSSQCVNLTTRTQLPPAYTNSFTRGVYYPDKVFRSSVLHSTQDLFLPFFSNVTWFHAIHVSGTNGTKRFDNPVLPFNDGVYFASTEKSNIIRGWIFGTTLDSKTQSLLIVNNATNVVIKVCEFQFCNDPFLGVYYHKNNKSWMESEFRVYSSANNCTFEYVSQPFLMDLEGKQGNFKNLREFVFKNIDGYFKIYSKHTPINLVRDLPQGFSALEPLVDLPIGINITRFQTLLALHRSYLTPGDSSSGWTAGAAAYYVGYLQPRTFLLKYNENGTITDAVDCALDPLSETKCTLKSFTVEKGIYQTSNFRVQPTESIVRFPNITNLCPFGEVFNATRFASVYAWNRKRISNCVADYSVLYNSASFSTFKCYGVSPTKLNDLCFTNVYADSFVIRGDEVRQIAPGQTGKIADYNYKLPDDFTGCVIAWNSNNLDSKVGGNYNYLYRLFRKSNLKPFERDISTEIYQAGSTPCNGVEGFNCYFPLQSYGFQPTNGVGYQPYRVVVLSFELLHAPATVCGPKKSTNLVKNKCVNFNFNGLTGTGVLTESNKKFLPFQQFGRDIADTTDAVRDPQTLEILDITPCSFGGVSVITPGTNTSNQVAVLYQDVNCTEVPVAIHADQLTPTWRVYSTGSNVFQTRAGCLIGAEHVNNSYECDIPIGAGICASYQTQTNSPRRARSVASQSIIAYTMSLGAENSVAYSNNSIAIPTNFTISVTTEILPVSMTKTSVDCTMYICGDSTECSNLLLQYGSFCTQLNRALTGIAVEQDKNTQEVFAQVKQIYKTPPIKDCGGFNFSQILPDPSKPSKRSFIEDLLFNKVTLADAGFIKQYGDCLGDIAARDLICAQKFNGLTVLPPLLTDEMIAQYTSALLAGTITSGWTFGAGAALQIPFAMQMAYRFNGIGVTQCVLYENQKLIANQFNSAIGKIQDSLSSTASALGKLQDVVNQNAQALNTLVKQLSSNFGAISSVLNDILSRLDKVEAEVQIDRLITGRLQSLQTYVTQQLIRAAEIRASANLAATKMSECVLGQSKRVDFCGKGYHLMSFPQSAPHGVVFLHVTYVPAQEKNFTTAPAICHDGKAHFPREGVFVSNGTHWFVTQRNFYEPQIITTDNTFVCGNCDVVIGIVNNTVYDPLQPELDSGGGGSDIIKLLNEQVNKEMQSSNLYMSMSSWCYTHSLDGAGLFLFDHAAEEYEHAKKLIIFLNENNVPVQLTSISAPEHKFEGLTQIFQKAYEHEQHISESINNIVDHAIKSKDHATFNFLQWYVAEQHEEEVLFKDILDKIELIGNENHGLYLADQYVKGIAKSRKS

SEQ ID NO: 13937 - protein, 1315 aa, Artificial Sequence
  SARS-CoV-2/Tianmen/HBCDC-HB-07/2020__EPI_ISL_412983 spike protein (1-1147)(N914C_S1123C) Ferritin construct
MFVFLVLLPLVSSQCVNLTTRTQLPPAYTNSFTRGVYYPDKVFRSSVLHSTQDLFLPFFSNVTWFHAIHVSGTNGTKRFDNPVLPFNDGVYFASTEKSNIIRGWIFGTTLDSKTQSLLIVNNATNVVIKVCEFQFCNDPFLGVYYHKNNKSWMESEFRVYSSANNCTFEYVSQPFLMDLEGKQGNFKNLREFVFKNIDGYFKIYSKHTPINLVRDLPQGFSALEPLVDLPIGINITRFQTLLALHRSYLTPGDSSSGWTAGAAAYYVGYLQPRTFLLKYNENGTITDAVDCALDPLSETKCTLKSFTVEKGIYQTSNFRVQPTESIVRFPNITNLCPFGEVFNATRFASVYAWNRKRISNCVADYSVLYNSASFSTFKCYGVSPTKLNDLCFTNVYADSFVIRGDEVRQIAPGQTGKIADYNYKLPDDFTGCVIAWNSNNLDSKVGGNYNYLYRLFRKSNLKPFERDISTEIYQAGSTPCNGVEGFNCYFPLQSYGFQPTNGVGYQPYRVVVLSFELLHAPATVCGPKKSTNLVKNKCVNFNFNGLTGTGVLTESNKKFLPFQQFGRDIADTTDAVRDPQTLEILDITPCSFGGVSVITPGTNTSNQVAVLYQDLNCTEVPVAIHADQLTPTWRVYSTGSNVFQTRAGCLIGAEHVNNSYECDIPIGAGICASYQTQTNSPRRARSVASQSIIAYTMSLGAENSVAYSNNSIAIPTNFTISVTTEILPVSMTKTSVDCTMYICGDSTECSNLLLQYGSFCTQLNRALTGIAVEQDKNTQEVFAQVKQIYKTPPIKDFGGFNFSQILPDPSKPSKRSFIEDLLFNKVTLADAGFIKQYGDCLGDIAARDLICAQKFNGLTVLPPLLTDEMIAQYTSALLAGTITSGWTFGAGAALQIPFAMQMAYRFNGIGVTQCVLYENQKLIANQFNSAIGKIQDSLSSTASALGKLQDVVNQNAQALNTLVKQLSSNFGAISSVLNDILSRLDKVEAEVQIDRLITGRLQSLQTYVTQQLIRAAEIRASANLAATKMSECVLGQSKRVDFCGKGYHLMSFPQSAPHGVVFLHVTYVPAQEKNFTTAPAICHDGKAHFPREGVFVSNGTHWFVTQRNFYEPQIITTDNTFVCGNCDVVIGIVNNTVYDPLQPELDSGGGGSDIIKLLNEQVNKEMQSSNLYMSMSSWCYTHSLDGAGLFLFDHAAEEYEHAKKLIIFLNENNVPVQLTSISAPEHKFEGLTQIFQKAYEHEQHISESINNIVDHAIKSKDHATFNFLQWYVAEQHEEEVLFKDILDKIELIGNENHGLYLADQYVKGIAKSRKS

SEQ ID NO: 13938 - protein, 1315 aa, Artificial Sequence
  SARS-CoV-2/Hong Kong/case42_VM20002493/2020__EPI_ISL_414527 spike protein (1-1147)(N914C_S1123C) Ferritin construct
MFVFLVLLPLVSSQCVNLTTRTQLPPAYTNSFTRGVYYPDKVFRSSVLHSTQDLFLPFFSNVTWFHAIHVSGTNGTKRFDNPVLPFNDGVYFASTEKSNIIRGWIFGTTLDSKTQSLLIVNNATNVVIKVCEFQFCNDPFLGVYYHKNNKSWMESEFRVYSSANNCTFEYVSQPFLMDLEGKQGNFKNLREFVFKNIDGYFKIYSKHTPINLVRDLPQGFSALEPLVDLPIGINITRFQTLLALHRSYLTPGDSSSGWTAGAAAYYVGYLQPRTFLLKYNENGTITDAVDCALDPLSETKCTLKSFTVEKGIYQTSNFRVQPTESIVRFPNITNLCPFGEVFNATRFASVYAWNRKRISNCVADYSVLYNSASFSTFKCYGVSPTKLNDLCFTNVYADSFVIRGDEVRQIAPGQTGKIADYNYKLPDDFTGCVIAWNSNNLDSKVGGNYNYLYRLFRKSNLKPFERDISTEIYQAGSTPCNGVEGFNCYFPLQSYGFQPTNGVGYQPYRVVVLSFELLHAPATVCGPKKSTNLVKNKCVNFNFNGLTGTGVLTESNKKFLPFQQFGRDIADTTDAVRDPQTLEILDITPCSFGGVSVITPGTNTSNQVAVLYQDVNCTEVPVAIHADQLTPTWRVYSTGSNVFQTRAGCLIGAEHVNNSYECDIPIGAGICASYQTQTNSPRRARSVASQSIIAYTMSLGAENSVAYSNNSIAIPTNFAISVTTEILPVSMTKTSVDCTMYICGDSTECSNLLLQYGSFCTQLNRALTGIAVEQDKNTQEVFAQVKQIYKTPPIKDFGGFNFSQILPDPSKPSKRSFIEDLLFNKVTLADAGFIKQYGDCLGDIAARDLICAQKFNGLTVLPPLLTDEMIAQYTSALLAGTITSGWTFGAGAALQIPFAMQMAYRFNGIGVTQCVLYENQKLIANQFNSAIGKIQDSLSSTASALGKLQDVVNQNAQALNTLVKQLSSNFGAISSVLNDILSRLDKVEAEVQIDRLITGRLQSLQTYVTQQLIRAAEIRASANLAATKMSECVLGQSKRVDFCGKGYHLMSFPQSAPHGVVFLHVTYVPAQEKNFTTAPAICHDGKAHFPREGVFVSNGTHWFVTQRNFYEPQIITTDNTFVCGNCDVVIGIVNNTVYDPLQPELDSGGGGSDIIKLLNEQVNKEMQSSNLYMSMSSWCYTHSLDGAGLFLFDHAAEEYEHAKKLIIFLNENNVPVQLTSISAPEHKFEGLTQIFQKAYEHEQHISESINNIVDHAIKSKDHATFNFLQWYVAEQHEEEVLFKDILDKIELIGNENHGLYLADQYVKGIAKSRKS

SEQ ID NO: 13939 - protein, 1315 aa, Artificial Sequence
  SARS-CoV-2/USA/CruiseA-23/2020__EPI_ISL_414482 spike protein (1-1147)(N914C_S1123C) Ferritin construct
MFVFLVLLPLVSSQCVNLTTRTQLPPAYTNSFTRGVYYPDKVFRSSVLHSTQDLFLPFFSNVTWFHAIHVSGTNGTKRFDNPVLPFNDGVYFASTEKSNIIRGWIFGTTLDSKTQSLLIVNNATNVVIKVCEFQFCNDPFLGVYYHKNNKSWMESEFRVYSSANNCTFEYVSQPFLMDLEVKQGNFKNLREFVFKNIDGYFKIYSKHTPINLVRDLPQGFSALEPLVDLPIGINITRFQTLLALHRSYLTPGDSSSGWTAGAAAYYVGYLQPRTFLLKYNENGTITDAVDCALDPLSETKCTLKSFTVEKGIYQTSNFRVQPTESIVRFPNITNLCPFGEVFNATRFASVYAWNRKRISNCVADYSVLYNSASFSTFKCYGVSPTKLNDLCFTNVYADSFVIRGDEVRQIAPGQTGKIADYNYKLPDDFTGCVIAWNSNNLDSKVGGNYNYLYRLFRKSNLKPFERDISTEIYQAGSTPCNGVEGFNCYFPLQSYGFQPTNGVGYQPYRVVVLSFELLHAPATVCGPKKSTNLVKNKCVNFNFNGLTGTGVLTESNKKFLPFQQFGRDIADTTDAVRDPQTLEILDITPCSFGGVSVITPGTNTSNQVAVLYQDVNCTEVPVAIHADQLTPTWRVYSTGSNVFQTRAGCLIGAEHVNNSYECDIPIGAGICASYQTQTNSPRRARSVASQSIIAYTMSLGAENSVAYSNNSIAIPTNFTISVTTEILPVSMTKTSVDCTMYICGDSTECSNLLLQYGSFCTQLNRALTGIAVEQDKNTQEVFAQVKQIYKTPPIKDFGGFNFSQILPDPSKPSKRSFIEDLLFNKVTLADAGFIKQYGDCLGDIAARDLICAQKFNGLTVLPPLLTDEMIAQYTSALLAGTITSGWTFGAGAALQIPFAMQMAYRFNGIGVTQCVLYENQKLIANQFNSAIGKIQDSLSSTASALGKLQDVVNQNAQALNTLVKQLSSNFGAISSVLNDILSRLDKVEAEVQIDRLITGRLQSLQTYVTQQLIRAAEIRASANLAATKMSECVLGQSKRVDFCGKGYHLMSFPQSAPHGVVFLHVTYVPAQEKNFTTAPAICHDGKAHFPREGVFVSNGTHWFVTQRNFYEPQIITTDNTFVCGNCDVVIGIVNNTVYDPLQPELDSGGGGSDIIKLLNEQVNKEMQSSNLYMSMSSWCYTHSLDGAGLFLFDHAAEEYEHAKKLIIFLNENNVPVQLTSISAPEHKFEGLTQIFQKAYEHEQHISESINNIVDHAIKSKDHATFNFLQWYVAEQHEEEVLFKDILDKIELIGNENHGLYLADQYVKGIAKSRKS

SEQ ID NO: 13940 - protein, 1315 aa, Artificial Sequence
  SARS-CoV-2/Hong Kong/case85_VM20002868/2020__EPI_ISL_414519 spike protein (1-1147)(N914C_S1123C) Ferritin construct
MFVFLVLVPLVSSQCVNLTTRTQLPPAYTNSFTRGVYYPDKVFRSSVLHSTQDLFLPFFSNVTWFHAIHVSGTNGTKRFDNPVLPFNDGVYFASTEKSNIIRGWIFGTTLDSKTQSLLIVNNATNVVIKVCEFQFCNDPFLGVYYHKNNKSWMESEFRVYSSANNCTFEYVSQPFLMDLEGKQGNFKNLREFVFKNIDGYFKIYSKHTPINLVRDLPQGFSALEPLVDLPIGINITRFQTLLALHRSYLTPGDSSSGWTAGAAAYYVGYLQPRTFLLKYNENGTITDAVDCALDPLSETKCTLKSFTVEKGIYQTSNFRVQPTESIVRFPNITNLCPFGEVFNATRFASVYAWNRKRISNCVADYSVLYNSASFSTFKCYGVSPTKLNDLCFTNVYADSFVIRGDEVRQIAPGQTGKIADYNYKLPDDFTGCVIAWNSNNLDSKVGGNYNYLYRLFRKSNLKPFERDISTEIYQAGSTPCNGVEGFNCYFPLQSYGFQPTNGVGYQPYRVVVLSFELLHAPATVCGPKKSTNLVKNKCVNFNFNGLTGTGVLTESNKKFLPFQQFGRDIADTTDAVRDPQTLEILDITPCSFGGVSVITPGTNTSNQVAVLYQDVNCTEVPVAIHADQLTPTWRVYSTGSNVFQTRAGCLIGAEHVNNSYECDIPIGAGICASYQTQTNSPRRARSVASQSIIAYTMSLGAENSVAYSNNSIAIPTNFTISVTTEILPVSMTKTSVDCTMYICGDSTECSNLLLQYGSFCTQLNRALTGIAVEQDKNTQEVFAQVKQIYKTPPIKDFGGFNFSQILPDPSKPSKRSFIEDLLFNKVTLADAGFIKQYGDCLGDIAARDLICAQKFNGLTVLPPLLTDEMIAQYTSALLAGTITSGWTFGAGAALQIPFAMQMAYRFNGIGVTQCVLYENQKLIANQFNSAIGKIQDSLSSTASALGKLQDVVNQNAQALNTLVKQLSSNFGAISSVLNDILSRLDKVEAEVQIDRLITGRLQSLQTYVTQQLIRAAEIRASANLAATKMSECVLGQSKRVDFCGKGYHLMSFPQSAPHGVVFLHVTYVPAQEKNFTTAPAICHDGKAHFPREGVFVSNGTHWFVTQRNFYEPQIITTDNTFVCGNCDVVIGIVNNTVYDPLQPELDSGGGGSDIIKLLNEQVNKEMQSSNLYMSMSSWCYTHSLDGAGLFLFDHAAEEYEHAKKLIIFLNENNVPVQLTSISAPEHKFEGLTQIFQKAYEHEQHISESINNIVDHAIKSKDHATFNFLQWYVAEQHEEEVLFKDILDKIELIGNENHGLYLADQYVKGIAKSRKS

SEQ ID NO: 13941 - protein, 1315 aa, Artificial Sequence; identical to SEQ ID NO: 13931
  SARS-CoV-2/England/200990660/2020__EPI_ISL_414523 spike protein (1-1147)(N914C_S1123C) Ferritin construct

SEQ ID NO: 13942 - protein, 1315 aa, Artificial Sequence
  SARS-CoV-2/Australia/NSW09/2020__EPI_ISL_413595 spike protein (1-1147)(N914C_S1123C) Ferritin construct
MFVFLVLLPLVSSQCVNLTTRTQLPPAYTNSFTRGVYYPDKVFRSSVLHSTQDLFLPFFSNVTWFHAIHVSGTNGTKRFDNPVLPFNDGVYFASTEKSNIIRGWIFGTTLDSKTQSLLIVNNATNVVIKVCEFQFCNDPFLGVYYHKNNKSWMESEFRVYSSANNCTFEYVSQPFLMDLEGKQGNFKNLREFVFKNIDGYFKIYSKHTPINLVRDLPQGFSALEPLVDLPIGINITRFQTLLALHRSYLTPGDSSSGWTAGAAAYYVGYLQPRTFLLKYNENGTITDAVDCALDPLSETKCTLKSFTVEKGIYQTSNFRVQPTESIVRFPNITNLCPFGEVFNATRFASVYAWNRKRISNCVADYSVLYNSASFSTFKCYGVSPTKLNDLCFTNVYADSFVIRGDEVRQIAPGQTGKIADYNYKLPDDFTGCVIAWNSNNLDSKVGGNYNYLYRLFRKSNLKPFERDISTEIYQAGSTPCNGVEGFNCYFPLQSYGFQPTNGVGYQPYRVVVLSFELLHAPATVCGPKKSTNLVKNKCVNFNFNGLTGTGVLTESNKKFLPFQQFGRDIADTTDAVRDPQTLEILDITPCSFGGVSVITPGTNTSNQVAVLYQDVNCTEVPVAIHADQLTPTWRVYSTGSNVFQTRAGCLIGAEHVNNSYECDIPIGAGICASYQTQTNSPRRARSVASQSIIAYTMSLGAENSVAYSNNSIAIPTNFTISVTTEILPVSMTKTSVDCTMYICGDSTECSNLLLQYGSFCTQLNRALTGIAVEQDKNTQEVFAQVKQIYKTPPIKDFGGFNFSQILPDPSKPSKRSFIEDLLFNKVTLADAGFIKQYGDCLGDIAARDLICAQKFNGLTVLPPLLTDEMIAQYTSALLAGTITSGWTFGAGAALQIPFAMQMAYRFNGIGVTQCVLYENQKLIANQFNSAIGKIQDSLSFTASALGKLQDVVNQNAQALNTLVKQLSSNFGAISSVLNDILSRLDKVEAEVQIDRLITGRLQSLQTYVTQQLIRAAEIRASANLAATKMSECVLGQSKRVDFCGKGYHLMSFPQSAPHGVVFLHVTYVPAQEKNFTTAPAICHDGKAHFPREGVFVSNGTHWFVTQRNFYEPQIITTDNTFVCGNCDVVIGIVNNTVYDPLQPELDSGGGGSDIIKLLNEQVNKEMQSSNLYMSMSSWCYTHSLDGAGLFLFDHAAEEYEHAKKLIIFLNENNVPVQLTSISAPEHKFEGLTQIFQKAYEHEQHISESINNIVDHAIKSKDHATFNFLQWYVAEQHEEEVLFKDILDKIELIGNENHGLYLADQYVKGIAKSRKS

SEQ ID NO: 13943 - protein, 1315 aa, Artificial Sequence; identical to SEQ ID NO: 13923
  SARS-CoV-2/Australia/NSW10/2020__EPI_ISL_413596 spike protein (1-1147)(N914C_S1123C) Ferritin construct

SEQ ID NO: 13944 - protein, 1315 aa, Artificial Sequence
  SARS-CoV-2/Switzerland/1000477797/2020__EPI_ISL_413023 spike protein (1-1147)(N914C_S1123C) Ferritin construct
MFVFLVLLPLVSSQCVNLTTRTQLPPAYTNSFTRGVYYPDKVFRSSVLHSTQDLFLPFFSNVTWFHAIHVSGTNGTKRFDNPVLPFNDGVYFASTEKSNIIRGWIFGTTLDSKTQSLLIVNNATNVVIKVCEFQFCNDPFLGVYYHKNNKSWMESEFRVYSSANNCTFEYVSQPFLMDLEGKQGNFKNLREFVFKNIDGYFNIYSKHTPINLVRDLPQGFSALEPLVDLPIGINITRFQTLLALHRSYLTPGDSSSGWTAGAAAYYVGYLQPRTFLLKYNENGTITDAVDCALDPLSETKCTLKSFTVEKGIYQTSNFRVQPTESIVRFPNITNLCPFGEVFNATRFASVYAWNRKRISNCVADYSVLYNSASFSTFKCYGVSPTKLNDLCFTNVYADSFVIRGDEVRQIAPGQTGKIADYNYKLPDDFTGCVIAWNSNNLDSKVGGNYNYLYRLFRKSNLKPFERDISTEIYQAGSTPCNGVEGFNCYFPLQSYGFQPTNGVGYQPYRVVVLSFELLHAPATVCGPKKSTNLVKNKCVNFNFNGLTGTGVLTESNKKFLPFQQFGRDIADTTDAVRDPQTLEILDITPCSFGGVSVITPGTNTSNQVAVLYQGVNCTEVPVAIHADQLTPTWRVYSTGSNVFQTRAGCLIGAEHVNNSYECDIPIGAGICASYQTQTNSPRRARSVASQSIIAYTMSLGAENSVAYSNNSIAIPTNFTISVTTEILPVSMTKTSVDCTMYICGDSTECSNLLLQYGSFCTQLNRALTGIAVEQDKNTQEVFAQVKQIYKTPPIKDFGGFNFSQILPDPSKPSKRSFIEDLLFNKVTLADAGFIKQYGDCLGDIAARDLICAQKFNGLTVLPPLLTDEMIAQYTSALLAGTITSGWTFGAGAALQIPFAMQMAYRFNGIGVTQCVLYENQKLIANQFNSAIGKIQDSLSSTASALGKLQDVVNQNAQALNTLVKQLSSNFGAISSVLNDILSRLDKVEAEVQIDRLITGRLQSLQTYVTQQLIRAAEIRASANLAATKMSECVLGQSKRVDFCGKGYHLMSFPQSAPHGVVFLHVTYVPAQEKNFTTAPAICHDGKAHFPREGVFVSNGTHWFVTQRNFYEPQIITTDNTFVCGNCDVVIGIVNNTVYDPLQPELDSGGGGSDIIKLLNEQVNKEMQSSNLYMSMSSWCYTHSLDGAGLFLFDHAAEEYEHAKKLIIFLNENNVPVQLTSISAPEHKFEGLTQIFQKAYEHEQHISESINNIVDHAIKSKDHATFNFLQWYVAEQHEEEVLFKDILDKIELIGNENHGLYLADQYVKGIAKSRKS

SEQ ID NO: 13945 - protein, 1315 aa, Artificial Sequence
  SARS-CoV-2/Belgium/BA-02291/2020__EPI_ISL_415159 spike protein (1-1147)(N914C_S1123C) Ferritin construct
MFVFLVLLPLVSSQCVNLTTRTQLPPAYTNSFTRGVYYPDKVFRSSVLHSTQDLFLPFFSNVTWFHAIHVSGTNGTKRFDNPVLPFNDGVYFASTEKSNIIRGWIFGTTLDSKTQSLLIVNNATNVVIKVCEFQFCNDPFLGVYYHKNNKSWMESEFRVYSSANNCTFEYVSQPFLMDLEGKQGNFKNLREFVFKNIDGYFKIYSKHTPINLVRDLPQGFSALEPLVDLPIGINITRFQTLLALHRSYLTPGDSSSGWTAGAAAYYVGYLQPRTFLLKYNENGTITDAVDCALDPLSETKCTLKSFTVEKGIYQTSNFRVQPTESIVRFPNITNLCPFGEVFNATRFASVYAWNRKRISNCVADYSVLYNSASFSTFKCYGVSPTKLNDLCFTNVYADSFVIRGDEVRQIAPGQTGKIADYNYKLPDDFTGCVIAWNSNNLDSKVGGNYNYLYRLFRRSNLKPFERDISTEIYQAGSTPCNGVEGFNCYFPLQSYGFQPTNGVGYQPYRVVVLSFELLPAPATVCGPKKSTNLVKNKCVNFNFNGLTGTGVLTESNKKFLPFQQFGRDIADTTDAVRDPQTLEILDITPCSFGGVSVITPGTNTSNQVAVLYQGVNCTEVPVAIHADQLTPTWRVYSTGSNVFQTRAGCLIGAEHVNNSYECDIPIGAGICASYQTQTNSPRRARSVASQSIIAYTMSLGAENSVAYSNNSIAIPTNFTISVTTEILPVSMTKTSVDCTMYICGDSTECSNLLLQYGSFCTQLNRALTGIAVEQDKNTQEVFAQVKQIYKTPPIKDFGGFNFSQILPDPSKPSKRSFIEDLLFNKVTLADAGFIKQYGDCLGDIAARDLICAQKFNGLTVLPPLLTDEMIAQYTSALLAGTITSGWTFGAGAALQIPFAMQMAYRFNGIGVTQCVLYENQKLIANQFNSAIGKIQDSLSSAAPALGKLQDVVNQNAQALNTLVKQLSSNFGAISSVLNDILSRLDKVEAEVQIDRLITGRLQSLQTYVTQQLIRAAEIRASANLAATKMSECVLGQSKRVDFCGKGYHLMSFPQSAPHGVVFLHVTYVPAQEKNFTTAPAICHDGKAHFPREGVFVSNGTHWFVTQRNFYEPQIITTDNTFVCGNCDVVIGIVNNTVYDPLQPELDSGGGGSDIIKLLNEQVNKEMQSSNLYMSMSSWCYTHSLDGAGLFLFDHAAEEYEHAKKLIIFLNENNVPVQLTSISAPEHKFEGLTQIFQKAYEHEQHISESINNIVDHAIKSKDHATFNFLQWYVAEQHEEEVLFKDILDKIELIGNENHGLYLADQYVKGIAKSRKS

SEQ ID NO: 13946 - protein, 1315 aa, Artificial Sequence
  SARS-CoV-2/USA/WA8-UW5/2020__EPI_ISL_413486 spike protein (1-1147)(N914C_S1123C) Ferritin construct
MFVFLVLLPLVSSQCVNLTTRTQLPPAYTNSFTRGVYYPDKVFRSSVLHSTQDLFLPFFSNVTWFHAIHVSGTNGTKRFDNPVLPFNDGVYFASTEKSNIIRGWIFGTTLDSKTQSLLIVNNATNVVIKVCEFQFCNDPFLGVYYHKNNKSWMESEFRVYSSANNCTFEYVSQPFLMDLEGKQGNFKNLREFVFKNIDGYFKIYSKHTPINLVRDLPQGFSALEPLVDLPIGINITRFQTLLALHRSYLTPGDSSSGWTAGAAAYYVGYLQPRTFLLKYNENGTITDAVDCALDPLSETKCTLKSFTVEKGIYQTSNFRVQPTESIVRFPNITNLCPFGEVFNATRFASVYAWNRKRISNCVADYSVLYNSASFSTFKCYGVSPTKLNDLCFTNVYADSFVIRGDEVRQIAPGQTGKIADYNYKLPDDFTGCVIAWNSNNLDSKVGGNYNYLYRLFRKSNLKPFERDISTEIYQAGSTPCNGVEGFNCYFPLQSYGFQPTNGVGYQPYRVVVLSFELLHAPATVCGPKKSTNLVKNKCVNFNFNGLTGTGVLTESNKKFLPFQQFGRDIADTTDAVRDPQTLEILDITPCSFGGVSVITPGTNTSNQVAVLYQDVNCTEVPVAIHADQLTPTWRVYSTGSNVFQTRAGCLIGAEYVNNSYECDIPIGAGICASYQTQTNSPRRARSVASQSIIAYTMSLGAENSVAYSNNSIAIPTNFTISVTTEILPVSMTKTSVDCTMYICGDSTECSNLLLQYGSFCTQLNRALTGIAVEQDKNTQEVFAQVKQIYKTPPIKDFGGFNFSQILPDPSKPSKRSFIEDLLFNKVTLADAGFIKQYGDCLGDIAARDLICAQKFNGLTVLPPLLTDEMIAQYTSALLAGTITSGWTFGAGAALQIPFAMQMAYRFNGIGVTQCVLYENQKLIANQFNSAIGKIQDSLSSTASALGKLQDVVNQNAQALNTLVKQLSSNFGAISSVLNDILSRLDKVEAEVQIDRLITGRLQSLQTYVTQQLIRAAEIRASANLAATKMSECVLGQSKRVDFCGKGYHLMSFPQSAPHGVVFLHVTYVPAQEKNFTTAPAICHDGKAHFPREGVFVSNGTHWFVTQRNFYEPQIITTDNTFVCGNCDVVIGIVNNTVYDPLQPELDSGGGGSDIIKLLNEQVNKEMQSSNLYMSMSSWCYTHSLDGAGLFLFDHAAEEYEHAKKLIIFLNENNVPVQLTSISAPEHKFEGLTQIFQKAYEHEQHISESINNIVDHAIKSKDHATFNFLQWYVAEQHEEEVLFKDILDKIELIGNENHGLYLADQYVKGIAKSRKS

SEQ ID NO: 13947 - protein, 1315 aa, Artificial Sequence
  SARS-CoV-2/England/20102000506/2020__EPI_ISL_415147 spike protein (1-1147)(N914C_S1123C) Ferritin construct
MFVFLVLLPLVSSQCVNLTTRTQLPPAYTNSFTRGVYYPDKVFRSSVLHSTQDLFLPFFSNVTWFHAIHVSGTNGTKRFDNPVLPFNDGVYFASTEKSNIIRGWIFGTTLDSKTQSLLIVNNATNVVIKVCEFQFCNDPFLGVYYHKNNKSWMESEFRVYSSANNCTFEYVSQPFLMDLEGKQGNFKNLREFVFKNIDGYFKIYSKHTPINLVRDLPQGFSALEPLVDLPIGINITRFQTLLALHRSYLTPGDSSSGWTAGAAAYYVGYLQPRTFLLKYNENGTITDAVDCALDPLSETKCTLKSFTVEKGIYQTSNFRVQPTESIVRFPNITNLCPFGEVFNATRFASVYAWNRKRISNCVADYSVLYNSASFSTFKCYGVSPTKLNDLCFTNVYADSFVIRGDEVRQIAPGQTGKIADYNYKLPDDFTGCVIAWNSNNLDSKVGGNYNYLYRLFRKSNLKPFERDISTEIYQAGSTPCNGVEGFNCYFPLQSYGFQPTNGVGYQPYRVVVLSFELLHAPATVCGPKKSTNLVKNKCVNFNFNGLTGTGVLTESNKKFLPFQQFGRDIADTTDAVRDPQTLEILDITPCSFGGVSVITPGTNTSNQVAVLYQGVNCTEVPVAIHADQLTPTWRVYSTGSNVFQTRAGCLIGAEHVNNSYECDIPIGAGICASYQTQTNSPRRARSVASQSIIAYTMSLGAENSVAYSNNSIAIPTNFTISVTTEILPVSMTKTSVDCTMYICGDSTECSNLLLQYGSFCTQLNRALTGIAVEQDKNTQEVFAQVKQIYKTPPIKDFGGFNFSQILPDPSKPSKRSFIEDLLFNKVTLADAGFIKQYGYCLGDIAARDLICAQKFNGLTVLPPLLTDEMIAQYTSALLAGTITSGWTFGAGAALQIPFAMQMAYRFNGIGVTQCVLYENQKLIANQFNSAIGKIQDSLSSTASALGKLQDVVNQNAQALNTLVKQLSSNFGAISSVLNDILSRLDKVEAEVQIDRLITGRLQSLQTYVTQQLIRAAEIRASANLAATKMSECVLGQSKRVDFCGKGYHLMSFPQSAPHGVVFLHVTYVPAQEKNFTTAPAICHDGKAHFPREGVFVSNGTHWFVTQRNFYEPQIITTDNTFVCGNCDVVIGIVNNTVYDPLQPELDSGGGGSDIIKLLNEQVNKEMQSSNLYMSMSSWCYTHSLDGAGLFLFDHAAEEYEHAKKLIIFLNENNVPVQLTSISAPEHKFEGLTQIFQKAYEHEQHISESINNIVDHAIKSKDHATFNFLQWYVAEQHEEEVLFKDILDKIELIGNENHGLYLADQYVKGIAKSRKS

SEQ ID NO: 13948 - protein, 1315 aa, Artificial Sequence
  SARS-CoV-2/Belgium/VAG-03013/2020__EPI_ISL_415155 spike protein (1-1147)(N914C_S1123C) Ferritin construct
MFVFLVLLPLVSSQCVNLTTRTQLPPAYTNSFTRGVYYPDKVFRSSVLHSTQDLFLPFFSNVTWFHAIHVSGTNGTKRFDNPVLPFNDGVYFASTEKSNIIRGWIFGTTLDSKTQSLLIVNNATNVVIKVCEFQFCNDPFLGVYYHKNNKSWMESEFRVYSSANNCTFEYVSQPFLMDLEGKQGNFKNLREFVFKNIDGYFKIYSKHTPINLVRDLPQGFSALEPLVDLPIGINITRFQTLLALHRSYLTPGDSSSGWTAGAAAYYVGYLQPRTFLLKYNENGTITDAVDCALDPLSETKCTLKSFTVEKGIYQTSNFRVQPTESIVRFPNITNLCPFGEVFNATRFASVYAWNRKRISNCVADYSVLYNSASFSTFKCYGVSPTKLNDLCFTNVYADSFVIRGDEVRQIAPGQTGKIADYNYKLPDDFTGCVIAWNSNNLDSKVGGNYNYLYRLFRKSNLKPFERDISTEIYQAGSTPCNGVEGFNCYFPLQSYGFQPTNGVGYQPYRVVVLSFELLHAPATVCGPKKSTNLVKNKCVNFNFNGLTGTGVLTESNKKFLPFQQFGRDIADTTDAVRDPQTLEILDITPCSFGGVSVITPGTNTSNQVAVLYQGVNCTEVPVAIHADQLTPTWRVYSTGSNVFQTRAGCLIGAEHVNNSYECDIPIGAGICASYQTQTNSPRRARSVASQSIIAYTMSLGAENSVAYSNNSIAIPTNFTISVTTEILPVSMTKTSVDCTMYICGDSTECSNLLLQYGSFCTQLNRALTGIAVEQDKNTQEVFAQVKQIYKTPPIKDFGGFNFSQILPDPSKPSKRSFIEDLLFNKVTLADAGFIKQYGDCLGDIAARDLICAQKFNGLTVLPPLLTDEMIAQYTSALLAGTITSGWTFGAGAALQIPFAMQMAYRFNGIGVTQCVLYENQKLIANQFNSAIGKIQDSLSSTATALGKLQDVVNQNAQALNTLVKQLSSNFGAISSVLNDILSRLDKVEAEVQIDRLITGRLQSLQTYVTQQLIRAAEIRASANLAATKMSECVLGQSKRVDFCGKGYHLMSFPQSAPHGVVFLHVTYVPAQEKNFTTAPAICHDGKAHFPREGVFVSNGTHWFVTQRNFYEPQIITTDNTFVCGNCDVVIGIVNNTVYDPLQPELDSGGGGSDIIKLLNEQVNKEMQSSNLYMSMSSWCYTHSLDGAGLFLFDHAAEEYEHAKKLIIFLNENNVPVQLTSISAPEHKFEGLTQIFQKAYEHEQHISESINNIVDHAIKSKDHATFNFLQWYVAEQHEEEVLFKDILDKIELIGNENHGLYLADQYVKGIAKSRKS

SEQ ID NO: 13949 - protein, 1315 aa, Artificial Sequence
  SARS-CoV-2/Belgium/BC-03016/2020__EPI_ISL_415157 spike protein (1-1147)(N914C_S1123C) Ferritin construct
MFVFLVLLPLVSSQCVNLTTRTQLPPAYTNSFTRGVYYPDKVFRSSVLHSTQDLFLPFFSNVTWFHAIHVSGTNGTKRFDNPVLPFNDGVYFASTEKSNIIRGWIFGTTLDSKTQSLLIVNNATNVVIKVCEFQFCNDPFLGVYYHKNNKSWMESEFRVYSSANNCTFEYVSQPFLMDLEGKQGNFKNLREFVFKNIDGYFKIYSKHTPINLVRDLPQGFSALEPLVDLPIGINITRFQTLLALHRSYLTPGDSSSGWTAGAAAYYVGYLQPRTFLLKYNENGTITDAVDCALDPLSETKCTLKSFTVEKGIYQTSNFRVQPTESIVRFPNITNLCPFGEVFNATRFASVYAWNRKRISNCVADYSVLYNSASFSTFKCYGVSPTKLNDLCFTNVYADSFVIRGDEVRQIAPGQTGKIADYNYKLPDDFTGCVIAWNSNNLDSKVGGNYNYLYRLFRKSNLKPFERDISTEIYQAGSTPCNGVEGFNCYFPLQSYGFQPTNGVGYQPYRVVVLSFELLHAPATVCGPKKSTNLVKNKCVNFNFNGLTGTGVLTESNKKFLPFQQFGRDIADTTDAVRDPQTLEILDITPCSFGGVSVITPGTNTSNQVAVLYQGVNCTEVPVAIHADQLTPTWRVYSTGSNVFQTRAGCLIGAEHVNNSYECDIPIGAGICASYQTQTNSPRRARSVASQSIIAYTMSLGAENSVAYSNNSIAIPTNFTISVTTEILPVSMTKTSVDCTMYICGDSTECSNLLLQYGSFCTQLNRALTGIAVEQDKNTQEVFAQVKQIYKTPPIKDFGGFNFSQILPDPSKPSKRSFIEDLLFNKVTLADAGFIKQYGDCLGDIAARDLICAQKFNGLTVLPPLLTDEMIAQYTSALLAGTITSGWTFGAGAALQIPFAMQMAYRFNGIGVTQCVLYENQKLIANQFNSAIGKIQDSLSSTAPALGKLQDVVNQNAQALNTLVKQLSSNFGAISSVLNDILSRLDKVEAEVQIDRLITGRLQSLQTYVTQQLIRAAEIRASANLAATKMSECVLGQSKRVDFCGKGYHLMSFPQSAPHGVVFLHVTYVPAQEKNFTTAPAICHDGKAHFPREGVFVSNGTHWFVTQRNFYEPQIITTDNTFVCGNCDVVIGIVNNTVYDPLQPELDSGGGGSDIIKLLNEQVNKEMQSSNLYMSMSSWCYTHSLDGAGLFLFDHAAEEYEHAKKLIIFLNENNVPVQLTSISAPEHKFEGLTQIFQKAYEHEQHISESINNIVDHAIKSKDHATFNFLQWYVAEQHEEEVLFKDILDKIELIGNENHGLYLADQYVKGIAKSRKS

SEQ ID NO: 13950 - protein, 1315 aa, Artificial Sequence
  SARS-CoV-2/Germany/BavPat3/2020__EPI_ISL_414521 spike protein (1-1147)(N914C_S1123C) Ferritin construct
MFVFLVLLPLVSSQCVNLTTRTQLPPAYTNSFTRGVYYPDKVFRSSVLHSTQDLFLPFFSNVTWFHAIHVSGTNGTKRFDNPVLPFNDGVYFASTEKSNIIRGWIFGTTLDSKTQSLLIVNNATNVVIKVCEFQFCNDPFLGVYYHKNNKSWMESEFRVYSSANNCTFEYVSQPFLMDLEGKQGNFKNLREFVFKNIDGYFKIYSKHTPINLVRDLPQGFSALEPLVDLPIGINITRFQTLLALHRSYLTPGDSSSGWTAGAAAYYVGYLQPRTFLLKYNENGTITDAVDCALDPLSETKCTLKSFTVEKGIYQTSNFRVQPTESIVRFPNITNLCPFGEVFNATRFASVYAWNRKRISNCVADYSVLYNSASFSTFKCYGVSPTKLNDLCFTNVYADSFVIRGDEVRQIAPGQTGKIADYNYKLPDDFTGCVIAWNSNNLDSKVGGNYNYLYRLFRKSNLKPFERDISTEIYQAGSTPCNGVEGFNCYFPLQSYGFQPTNGVGYQPYRVVVLSFELLHAPATVCGPKKSTNLVKNKCVNFNFNGLTGTGVLTESNKKFLPFQQFGRDIADTTDAVRDPQTLEILDITPCSFGGVSVITPGTNTSNQVAVLYQDVNCTEVPVAIHADQLTPTWRVYSTGSNVFQTRAGCLIGAEHVNNSYECDIPIGAGICASYQTQTNSPRRARSVASQSIIAYTMSLGAENSVAYSNNSIAIPTNFTISVTTEILPVSMTKTSVDCTMYICGDSTECSNLLLQYGSFCTQLNRALTGIAVEQDKNTQQVFAQVKQIYKTPPIKDFGGFNFSQILPDPSKPSKRSFIEDLLFNKVTLADAGFIKQYGDCLGDIAARDLICAQKFNGLTVLPPLLTDEMIAQYTSALLAGTITSGWTFGAGAALQIPFAMQMAYRFNGIGVTQCVLYENQKLIANQFNSAIGKIQDSLSSTASALGKLQDVVNQNAQALNTLVKQLSSNFGAISSVLNDILSRLDKVEAEVQIDRLITGRLQSLQTYVTQQLIRAAEIRASANLAATKMSECVLGQSKRVDFCGKGYHLMSFPQSAPHGVVFLHVTYVPAQEKNFTTAPAICHDGKAHFPREGVFVSNGTHWFVTQRNFYEPQIITTDNTFVCGNCDVVIGIVNNTVYDPLQPELDSGGGGSDIIKLLNEQVNKEMQSSNLYMSMSSWCYTHSLDGAGLFLFDHAAEEYEHAKKLIIFLNENNVPVQLTSISAPEHKFEGLTQIFQKAYEHEQHISESINNIVDHAIKSKDHATFNFLQWYVAEQHEEEVLFKDILDKIELIGNENHGLYLADQYVKGIAKSRKS

SEQ ID NO: 13951 - protein, 1315 aa, Artificial Sequence
  SARS-CoV-2/France/HF1805/2020__EPI_ISL_414628 spike protein (1-1147)(N914C_S1123C) Ferritin construct
MFVFLVLLPLVSSQCVNLTTRTQLPPAYTNSFTRGVYYPDKVFRSSVLHSTQDLFLPFFSNVTWFHAIHVSGTNGTKRFDNPVLPFNDGVYFASTEKSNIIRGWIFGTTLDSKTQSLLIVNNATNVVIKVCEFQFCNDPFLGVYYHKNNKSWMESEFRVYSSANNCTFEYVSQPFLMDLEGKQGNFKNLREFVFKNIDGYFKIYSKHTPINLVRDLPQGFSALEPLVDLPIGINITRFQTLLALHRSYLTPGDSSSGWTAGAAAYYVGYLQPRTFLLKYNENGTITDAVDCALDPLSETKCTLKSFTVEKGIYQTSNFRVQPTESIVRFPNITNLCPFGEVFNATRFASVYAWNRKRISNCVADYSVLYNSASFSTFKCYGVSPTKLNDLCFTNVYADSFVIRGDEVRQIAPGQTGKIADYNYKLPDDFTGCVIAWNSNNLDSKVGGNYNYLYRLFRKSNLKPFERDISTEIYQAGSTPCNGVEGFNCYFPLQSYGFQPTNGVGYQPYRVVVLSFELLHAPATVCGPKKSTNLVKNKCVNFNFNGLTGTGVLTESNKKFLPFQQFGRDIADTTDAVRDPQTLEILDITPCSFGGVSVITPGTNTSNQVAVLYQGVNCTEVPVAIHADQLTPTWRVYSTGSNVFQTRAGCLIGAEHVNNSYECDIPIGAGICASYQTQTNSPRRARSVASQSIIAYTMSLGAENSVAYSNNSIAIPTNFTISVTTEILPVSMTKTSVDCTMYICGDSTECSNLLLQYGSFCTQLNRALTGIAVEQDKNTQEVFAQVKQIYKTPPIKDFGGFNFSQILPDPSKPSKRSFIEDLLFNKVTLADAGFIKQYGDCLGDIAARDLICAQKFNGLTVLPPLLTDEMIAQYTSALLAGTITSGWTFGAGAALQIPFAMQMAYRFNGIGVTQCVLYENQKLIANQFNSAIGKIQDSLSSTASALGKLQDVVNQNAQALNTLVKQLSSNFGAISSVLNDILSRLDKVEAEVQIDRLITGRLQSLQTYVTQQLIRAAEIRASANLAATKMSECVLGQSKRVDFCGKGYHLMSFPQSAPHGVVFLHVTYVPAQEKNFTTAPAICHDGKAHFPREGVFVSNGTHWFVTQRNFYEPQIITTDNTFVCGNCDVVIGVVNNTVYDPLQPELDSGGGGSDIIKLLNEQVNKEMQSSNLYMSMSSWCYTHSLDGAGLFLFDHAAEEYEHAKKLIIFLNENNVPVQLTSISAPEHKFEGLTQIFQKAYEHEQHISESINNIVDHAIKSKDHATFNFLQWYVAEQHEEEVLFKDILDKIELIGNENHGLYLADQYVKGIAKSRKS

SEQ ID NO: 13952 - protein, 1315 aa, Artificial Sequence
  SARS-CoV-2/Netherlands/ZuidHolland_9/2020__EPI_ISL_414445 spike protein (1-1147)(N914C_S1123C) Ferritin construct
MFVFLVLLPLVSSQCVNLTTRTQLPPAYTNSFTRGVYYPDKVFRSSVLHSTQDLFLPFFSNVTWFHAIHVSGTNGTKRFDNPVLPFNDGVYFASTEKSNIIRGWIFGTTLDSKTQSLLIVNNATNVVIKVCEFQFCNDPFLGVYYHKNNKSWMESEFRVYSSANNCTFEYVSQPFLMDLEGKQGNFKNLREFVFKNIDGYFKIYSKHTPINLVRDLPQGFSALEPLVDLPIGINITRFQTLLALHRSYLTPGDSSSGWTAGAAAYYVGYLQPRTFLLKYNENGTITDAVDCALDPLSETKCTLKSFTVEKGIYQTSNFRVQPTESIVRFPNITNLCPFGEVFNATRFASVYAWNRKRISNCVADYSVLYNSASFSTFKCYGVSPTKLNDLCFTNVYADSFVIRGDEVRQIAPGQTGKIADYNYKLPDDFTGCVIAWNSNNLDSKVGGNYNYLYRLFRKSNLKPFERDISTEIYQAGSTPCNGVEGFNCYFPLQSYGFQPTNGVGYQPYRVVVLSFELLHAPATVCGPKKSTNLVKNKCVNFNFNGLTGTGVLTESNKKFLPFQQFGRDIADTTDAVRDPQTLEILDITPCSFGGVSVITPGTNTSNQVAVLYQGVNCTEVPVAIHADQLTPTWRVYSTGSNVFQTRAGCLIGAEHVNNSYECDIPIGAGICASYQTQTNSPRRARSVASQSIIAYTMSLGAENSVAYSNNSIAIPTNFTISVTTEILPVSMTKTSVDCTMYICGDSTECSNLLLQYGSFCTQLNRALTGIAVEQDKNTQEVFAQVKQIYKTPPIKDFGGFNFSQILPDPSKPSKRSFIEDLLFNKVTLADAGFIKQYGDCLGDIAARDLICVQKFNGLTVLPPLLTDEMIAQYTSALLAGTITSGWTFGAGAALQIPFAMQMAYRFNGIGVTQCVLYENQKLIANQFNSAIGKIQDSLSSTASALGKLQDVVNQNAQALNTLVKQLSSNFGAISSVLNDILSRLDKVEAEVQIDRLITGRLQSLQTYVTQQLIRAAEIRASANLAATKMSECVLGQSKRVDFCGKGYHLMSFPQSAPHGVVFLHVTYVPAQEKNFTTAPAICHDGKAHFPREGVFVSNGTHWFVTQRNFYEPQIITTDNTFVCGNCDVVIGIVNNTVYDPLQPELDSGGGGSDIIKLLNEQVNKEMQSSNLYMSMSSWCYTHSLDGAGLFLFDHAAEEYEHAKKLIIFLNENNVPVQLTSISAPEHKFEGLTQIFQKAYEHEQHISESINNIVDHAIKSKDHATFNFLQWYVAEQHEEEVLFKDILDKIELIGNENHGLYLADQYVKGIAKSRKS

SEQ ID NO: 13953 - protein, 1315 aa, Artificial Sequence
  SARS-CoV-2/Finland/FIN03032020A/2020__EPI_ISL_413602 spike protein (1-1147)(N914C_S1123C) Ferritin construct
MFVFLVLLPLVSSQCVNLTTRTQLPPAYTNSFTRGVYYPDKVFRSSVLHSTQDLFLPFFSNVTWFHAIHVSGTNGTKRFDNPVLPFNDGVYFASTEKSNIIRGWIFGTTLDSKTQSLLIVNNATNVVIKVCEFQFCNDPFLGVYYHKNNKSWMESEFRVYSSANNCTFEYVSQPFLMDLEGKQGNFKNLREFVFKNIDGYFKIYSKHTPINLVRDLPQGFSALEPLVDLPIGINITRFQTLLALHRSYLTPGDSSSGWTAGAAAYYVGYLQPRTFLLKYNENGTITDAVDCALDPLSETKCTLKSFTVEKGIYQTSNFRVQPTESIVRFPNITNLCPFGEVFNATRFASVYAWNRKRISNCVADYSVLYNSASFSTFKCYGVSPTKLNDLCFTNVYADSFVIRGDEVRQIAPGQTGKIADYNYKLPDDFTGCVISWNSNNLDSKVGGNYNYLYRLFRKSNLKPFERDISTEIYQAGSTPCNGVEGFNCYFPLQSYGFQPTNGVGYQPYRVVVLSFELLHAPATVCGPKKSTNLVKNKCVNFNFNGLTGTGVLTESNKKFLPFQQFGRDIADTTDAVRDPQTLEILDITPCSFGGVSVITPGTNTSNQVAVLYQGVNCTEVPVAIHADQLTPTWRVYSTGSNVFQTRAGCLIGAEHVNNSYECDIPIGAGICASYQTQTNSPRRARSVASQSIIAYTMSLGAENSVAYSNNSIAIPTNFTISVTTEILPVSMTKTSVDCTMYICGDSTECSNLLLQYGSFCTQLNRALTGIAVEQDKNTQEVFAQVKQIYKTPPIKDFGGFNFSQILPDPSKPSKRSFIEDLLFNKVTLADAGFIKQYGDCLGDIAARDLICAQKFNGLTVLPPLLTDEMIAQYTSALLAGTITSGWTFGAGAALQIPFAMQMAYRFNGIGVTQCVLYENQKLIANQFNSAIGKIQDSLSSTASALGKLQDVVNQNAQALNTLVKQLSSNFGAISSVLNDILSRLDKVEAEVQIDRLITGRLQSLQTYVTQQLIRAAEIRASANLAATKMSECVLGQSKRVDFCGKGYHLMSFPQSAPHGVVFLHVTYVPAQEKNFTTAPAICHDGKAHFPREGVFVSNGTHWFVTQRNFYEPQIITTDNTFVCGNCDVVIGIVNNTVYDPLQPELDSGGGGSDIIKLLNEQVNKEMQSSNLYMSMSSWCYTHSLDGAGLFLFDHAAEEYEHAKKLIIFLNENNVPVQLTSISAPEHKFEGLTQIFQKAYEHEQHISESINNIVDHAIKSKDHATFNFLQWYVAEQHEEEVLFKDILDKIELIGNENHGLYLADQYVKGIAKSRKS

SEQ ID NO: 13954 - protein, 1315 aa, Artificial Sequence
  SARS-CoV-2/France/GE1977/2020__EPI_ISL_414632 spike protein (1-1147)(N914C_S1123C) Ferritin construct
MFVFLVLLPLVSSQCVNLTTRTQLPPAYTNSFTRGVYYPDKVFRSSVLHSTQDLFLPFFSNVTWFHAIHVSGTNGTKRFDNPVLPFNDGVYFASTEKSNIIRGWIFGTTLDSKTQSLLIVNNATNVVIKVCEFQFCNDPFLGVYYHKNNKSWMESEFRVYSSANNCTFEYVSQPFLMDLEGKQGNFKNLREFVFKNIDGYFKIYSKHTPINLVRDLPQGFSALEPLVDLPIGINITRFQTLLALHRSYLTPGDSSSGWTAGAAAYYVGYLQPRTFLLKYNENGTITDAVDCALDPLSETKCTLKSFTVEKGIYQTSNFRVQPTESIVRFPNITNLCPFGEVFNATRFASVYAWNRKRISNCVADYSVLYNSASFSTFKCYGVSPTKLNDLCFTNVYADSFVIRGDEVRQIAPGQTGKIADYNYKLPDDFTGCVIAWNSNNLDSKVGGNYNYLYRLFRKSNLKPFERDISTEIYQAGSTPCNGVEGFNCYFPLQSYGFQPTNGVGYQPYRVVVLSFELLHAPATVCGPKKSTNLVKNKCVNFNFNGLTGTGVLTESNKKFLPFQQFGRDIADTTDAVRDPQTLEILDITPCSFGGVSVITPGTNTSNQVAVLYQGVNCTEVPVAIHADQLTPTWRVYSTGSNVFQTRAGCLIGAEHVNNSYECDIPIGAGICASYQTQTNSPRRARSVASQSIIAYTMSLGAENSVAYSNNSIAIPTNFTISVTTEILPVSMTKTSVDCTMYICGDSTECSNLLLQYGSFCTQLNRALTGIAVEQDKNTQEVFAQVKQIYKTPPIKDFGGFNFSQILPDPSKPSKRSFIEDLLFNKVTLADAGFIKQYGDCLGDIAARDLICAQKFNGLTVLPPLLTDEMIAQYTSALLAGTITSGWTFGAGAALQIPFAMQMAYRFNGIGVTQCVLYENQKLIANQFNSAIGKIQDSLFSTASALGKLQDVVNQNAQALNTLVKQLSSNFGAISSVLNDILSRLDKVEAEVQIDRLITGRLQSLQTYVTQQLIRAAEIRASANLAATKMSECVLGQSKRVDFCGKGYHLMSFPQSAPHGVVFLHVTYVPAQEKNFTTAPAICHDGKAHFPREGVFVSNGTHWFVTQRNFYEPQIITTDNTFVCGNCDVVIGIVNNTVYDPLQPELDSGGGGSDIIKLLNEQVNKEMQSSNLYMSMSSWCYTHSLDGAGLFLFDHAAEEYEHAKKLIIFLNENNVPVQLTSISAPEHKFEGLTQIFQKAYEHEQHISESINNIVDHAIKSKDHATFNFLQWYVAEQHEEEVLFKDILDKIELIGNENHGLYLADQYVKGIAKSRKS

SEQ ID NO: 13955 - protein, 1315 aa, Artificial Sequence
  SARS-CoV-2/Finland/FIN-313/2020__EPI_ISL_414641 spike protein (1-1147)(N914C_S1123C) Ferritin construct
MFVFLVLLPLVSSQCVNLTTRTQLPPAYTNSFTRGVYYPDKVFRSSVLHSTQDLFLPFFSNVTWFHAIHVSGTNGTKRFDNPVLPFNDGVYFASTEKSNIIRGWIFGTTLDSKTQSLLIVNNATNVVIKVCEFQFCNDPFLGVYYHKNNKSWMESEFRVYSSANNCTFEYVSQPFLMDLEGKQGNFKNLREFVFKNIDGYFKIYSKHTPINLVRDLPQGFSALEPLVDLPIGINITRFKTLLALHRSYLTPGDSSSGWTAGAAAYYVGYLQPRTFLLKYNENGTITDAVDCALDPLSETKCTLKSFTVEKGIYQTSNFRVQPTESIVRFPNITNLCPFGEVFNATRFASVYAWNRKRISNCVADYSVLYNSASFSTFKCYGVSPTKLNDLCFTNVYADSFVIRGDEVRQIAPGQTGKIADYNYKLPDDFTGCVIAWNSNNLDSKVGGNYNYLYRLFRKSNLKPFERDISTEIYQAGSTPCNGVEGFNCYFPLQSYGFQPTNGVGYQPYRVVVLSFELLHAPATVCGPKKSTNLVKNKCVNFNFNGLTGTGVLTESNKKFLPFQQFGRDIADTTDAVRDPQTLEILDITPCSFGGVSVITPGTNTSNQVAVLYQGVNCTEVPVAIHADQLTPTWRVYSTGSNVFQTRAGCLIGAEHVNNSYECDIPIGAGICASYQTQTNSPRRARSVASQSIIAYTMSLGAENSVAYSNNSIAIPTNFTISVTTEILPVSMTKTSVDCTMYICGDSTECSNLLLQYGSFCTQLNRALTGIAVEQDKNTQEVFAQVKQIYKTPPIKDFGGFNFSQILPDPSKPSKRSFIEDLLFNKVTLADAGFIKQYGDCLGDIAARDLICAQKFNGLTVLPPLLTDEMIAQYTSALLAGTITSGWTFGAGAALQIPFAMQMAYRFNGIGVTQCVLYENQKLIANQFNSAIGKIQDSLSSTASALGKLQDVVNQNAQALNTLVKQLSSNFGAISSVLNDILSRLDKVEAEVQIDRLITGRLQSLQTYVTQQLIRAAEIRASANLAATKMSECVLGQSKRVDFCGKGYHLMSFPQSAPHGVVFLHVTYVPAQEKNFTTAPAICHDGKAHFPREGVFVSNGTHWFVTQRNFYEPQIITTDNTFVCGNCDVVIGIVNNTVYDPLQPELDSGGGGSDIIKLLNEQVNKEMQSSNLYMSMSSWCYTHSLDGAGLFLFDHAAEEYEHAKKLIIFLNENNVPVQLTSISAPEHKFEGLTQIFQKAYEHEQHISESINNIVDHAIKSKDHATFNFLQWYVAEQHEEEVLFKDILDKIELIGNENHGLYLADQYVKGIAKSRKS

SEQ ID NO: 13956 - protein, 1315 aa, Artificial Sequence
  SARS-CoV-2/Netherlands/ZuidHolland_2/2020__EPI_ISL_414556 spike protein (1-1147)(N914C_S1123C) Ferritin construct
MFVFLVLLPLVSSQCVNLTTRTQLPPAYTNSFTRGVYYPDKVFRSSVLHSTQDLFLPFFSNVTWFHAIHVSGTNGTKRFDNPVLPFNDGVYFASTEKSNIIRGWIFGTTLDSKTQSLLIVNNATNVVIKVCEFQFCNDPFLGVYYHKNNKSWMESEFRVYSSANNCTFEYVSQPFLMDLEGKQGNFKNLREFVFKNIDGYFKIYSKHTPINLVRDLPQGFSALEPLVDLPIGINITRFQTLLALHRSYLTPGDSSSGWTAGAAAYYVGYLQPRTFLLKYNENGTITDAVDCALDPLSETKCTLKSFTVEKGIYQTSNFRVQPTESIVRFPNITNLCPFGEVFNATRFASVYAWNRKRISNCVADYSVLYNSASFSTFKCYGVSPTKLNDLCFTNVYADSFVIRGDEVRQIAPGQTGKIADYNYKLPDDFTGCVIAWNSNNLDSKVGGNYNYLYRLFRKSNLKPFERDISTEIYQAGSTPCNGVEGFNCYFPLQSYGFQPTNGVGYQPYRVVVLSFELLHAPATVCGPKKSTNLVKNKCVNFNFNGLTGTGVLTESNKKFLPFQQFGRDIADTTDAVRDPQTLEILDITPCSFGGVSVITPGTNTSNQVAVLYQGVNCTEVPVAIHADQLTPTWRVYSTGSNVFQTRAGCLIGAEHVNNSYECDIPIGAGICASYQTQTNSPRRARSVASQSIIAYTMSLGAENSVAYSNNSIAIPTNFTISVTTEILPVSMTKTSVDCTMYICGDSTECSNLLLQYGSFCTQLNRALTGIALEQDKNTQEVFAQVKQIYKTPPIKDFGGFNFSQILPDPSKPSKRSFIEDLLFNKVTLADAGFIKQYGDCLGDIAARDLICAQKFNGLTVLPPLLTDEMIAQYTSALLAGTITSGWTFGAGAALQIPFAMQMAYRFNGIGVTQCVLYENQKLIANQFNSAIGKIQDSLSSTASALGKLQDVVNQNAQALNTLVKQLSSNFGAISSVLNDILSRLDKVEAEVQIDRLITGRLQSLQTYVTQQLIRAAEIRASANLAATKMSECVLGQSKRVDFCGKGYHLMSFPQSAPHGVVFLHVTYVPAQEKNFTTAPAICHDGKAHFPREGVFVSNGTHWFVTQRNFYEPQIITTDNTFVCGNCDVVIGIVNNTVYDPLQPELDSGGGGSDIIKLLNEQVNKEMQSSNLYMSMSSWCYTHSLDGAGLFLFDHAAEEYEHAKKLIIFLNENNVPVQLTSISAPEHKFEGLTQIFQKAYEHEQHISESINNIVDHAIKSKDHATFNFLQWYVAEQHEEEVLFKDILDKIELIGNENHGLYLADQYVKGIAKSRKS

SEQ ID NO: 13957 - protein, 1315 aa, Artificial Sequence
  SARS-CoV-2/USA/WA-UW31/2020__EPI_ISL_414618 spike protein (1-1147)(N914C_S1123C) Ferritin construct
MFVFLVLLPLVSSQCVNLTTRTQLPPAYTNSFTRGVYYPDKVFRSSVLHSTQDLFLPFFSNVTWFHAIHVSGTNGTKRFDNPVLPFNDGVYFASTEKSNIIRGWIFGTTLDSKTQSLLIVNNATNVVIKVCEFQFCNDPFLGVYYHKNNKSWMESEFRVYSSANNCTFEYVSQPFLMDLEGKQGNFKNLREFVFKNIDGYFKIYSKHTPINLVRDLPQGFSALEPLVDLPIGINITRFQTLLALHRSYLTPGDSSSGWTAGAAAYYVGYLQPRTFLLKYNENGTITDAVDCALDPLSETKCTLKSFTVEKGIYQTSNFRVQPTESIVRFPNITNLCPFGEVFNATRFASVYAWNRKRISNCVADYSVLYNSASFSTFKCYGVSPTKLNDLCFTNVYADSFVIRGDEVRQIAPGQTGKIADYNYKLPDDFTGCVIAWNSNNLDSKVGGNYNYLYRLFRKSNLKPFERDISTEIYQAGSTPCNGAEGFNCYFPLQSYGFQPTNGVGYQPYRVVVLSFELLHAPATVCGPKKSTNLVKNKCVNFNFNGLTGTGVLTESNKKFLPFQQFGRDIADTTDAVRDPQTLEILDITPCSFGGVSVITPGTNTSNQVAVLYQDVNCTEVPVAIHADQLTPTWRVYSTGSNVFQTRAGCLIGAEHVNNSYECDIPIGAGICASYQTQTNSPRRARSVASQSIIAYTMSLGAENSVAYSNNSIAIPTNFTISVTTEILPVSMTKTSVDCTMYICGDSTECSNLLLQYGSFCTQLNRALTGIAVEQDKNTQEVFAQVKQIYKTPPIKDFGGFNFSQILPDPSKPSKRSFIEDLLFNKVTLADAGFIKQYGDCLGDIAARDLICAQKFNGLTVLPPLLTDEMIAQYTSALLAGTITSGWTFGAGAALQIPFAMQMAYRFNGIGVTQCVLYENQKLIANQFNSAIGKIQDSLSSTASALGKLQDVVNQNAQALNTLVKQLSSNFGAISSVLNDILSRLDKVEAEVQIDRLITGRLQSLQTYVTQQLIRAAEIRASANLAATKMSECVLGQSKRVDFCGKGYHLMSFPQSAPHGVVFLHVTYVPAQEKNFTTAPAICHDGKAHFPREGVFVSNGTHWFVTQRNFYEPQIITTDNTFVCGNCDVVIGIVNNTVYDPLQPELDSGGGGSDIIKLLNEQVNKEMQSSNLYMSMSSWCYTHSLDGAGLFLFDHAAEEYEHAKKLIIFLNENNVPVQLTSISAPEHKFEGLTQIFQKAYEHEQHISESINNIVDHAIKSKDHATFNFLQWYVAEQHEEEVLFKDILDKIELIGNENHGLYLADQYVKGIAKSRKS

SEQ ID NO: 13958 - protein, 1315 aa, Artificial Sequence
  SARS-CoV-2/South Korea/SNU01/2020__EPI_ISL_411929 spike protein (1-1147)(N914C_S1123C) Ferritin construct
MFVFLVLLPLVSSQCVNLTTRTQLPPAYTNSFTRGVYYPDKVFRSSVLHSTQDLFLPFFSNVTWFHAIHVSGTNGTKRFDNPVLPFNDGVYFASTEKSNIIRGWIFGTTLDSKTQSLLIVNNATNVVIKVCEFQFCNDPFLGVYYHKNNKSWMESEFRVYSSANNCTFEYVSQPFLMDLEGKQGNFKNLREFVFKNIDGYFKIYSKHTPINLVRDLPQGFWALEPLVDLPIGINITRFQTLLALHRSYLTPGDSSSGWTAGAAAYYVGYLQPRTFLLKYNENGTITDAVDCALDPLSETKCTLKSFTVEKGIYQTSNFRVQPTESIVRFPNITNLCPFGEVFNATRFASVYAWNRKRISNCVADYSVLYNSASFSTFKCYGVSPTKLNDLCFTNVYADSFVIRGDEVRQIAPGQTGKIADYNYKLPDDFTGCVIAWNSNNLDSKVGGNYNYLYRLFRKSNLKPFERDISTEIYQAGSTPCNGVEGFNCYFPLQSYGFQPTNGVGYQPYRVVVLSFELLHAPATVCGPKKSTNLVKNKCVNFNFNGLTGTGVLTESNKKFLPFQQFGRDIADTTDAVRDPQTLEILDITPCSFGGVSVITPGTNTSNQVAVLYQDVNCTEVPVAIHADQLTPTWRVYSTGSNVFQTRAGCLIGAEHVNNSYECDIPIGAGICASYQTQTNSPRRARSVASQSIIAYTMSLGAENSVAYSNNSIAIPTNFTISVTTEILPVSMTKTSVDCTMYICGDSTECSNLLLQYGSFCTQLNRALTGIAVEQDKNTQEVFAQVKQIYKTPPIKDFGGFNFSQILPDPSKPSKRSFIEDLLFNKVTLADAGFIKQYGDCLGDIAARDLICAQKFNGLTVLPPLLTDEMIAQYTSALLAGTITSGWTFGAGAALQIPFAMQMAYRFNGIGVTQCVLYENQKLIANQFNSAIGKIQDSLSSTASALGKLQDVVNQNAQALNTLVKQLSSNFGAISSVLNDILSRLDKVEAEVQIDRLITGRLQSLQTYVTQQLIRAAEIRASANLAATKMSECVLGQSKRVDFCGKGYHLMSFPQSAPHGVVFLHVTYVPAQEKNFTTAPAICHDGKAHFPREGVFVSNGTHWFVTQRNFYEPQIITTDNTFVCGNCDVVIGIVNNTVYDPLQPELDSGGGGSDIIKLLNEQVNKEMQSSNLYMSMSSWCYTHSLDGAGLFLFDHAAEEYEHAKKLIIFLNENNVPVQLTSISAPEHKFEGLTQIFQKAYEHEQHISESINNIVDHAIKSKDHATFNFLQWYVAEQHEEEVLFKDILDKIELIGNENHGLYLADQYVKGIAKSRKS

SEQ ID NO: 13959 - protein, 1315 aa, Artificial Sequence
  SARS-CoV-2/China/WF0004/2020__EPI_ISL_413694 spike protein (1-1147)(N914C_S1123C) Ferritin construct
MFVFLVLLPLVSSQCVNLTTRTQLPPAYTNSFTRGVYYPDKVFRSSVLHSTQDLFLPFFSNVTWFHAIHVSGTNGTKRFDNPVLPFNDGVYFASTEKSNIIRGWIFGTTLDSKTQSLLIVNNATNVVIKVCEFQFCNDPFLGVYYHKNNKSWTESEFRVYSSANNCTFEYVSQPFLMDLEGKQGNFKNLREFVFKNIDGYFKIYSKHTPINLVRDLPQGFSALEPLVDLPIGINITRFQTLLALHRSYLTPGDSSSGWTAGAAAYYVGYLQPRTFLLKYNENGTITDAVDCALDPLSETKCTLKSFTVEKGIYQTSNFRVQPTESIVRFPNITNLCPFGEVFNATRFASVYAWNRKRISNCVADYSVLYNSASFSTFKCYGVSPTKLNDLCFTNVYADSFVIRGDEVRQIAPGQTGKIADYNYKLPDDFTGCVIAWNSNNLDSKVGGNYNYLYRLFRKSNLKPFERDISTEIYQAGSTPCNGVEGFNCYFPLQSYGFQPTNGVGYQPYRVVVLSFELLHAPATVCGPKKSTNLVKNKCVNFNFNGLTGTGVLTESNKKFLPFQQFGRDIADTTDAVRDPQTLEILDITPCSFGGVSVITPGTNTSNQVAVLYQDVNCTEVPVAIHADQLTPTWRVYSTGSNVFQTRAGCLIGAEHVNNSYECDIPIGAGICASYQTQTNSPRRARSVASQSIIAYTMSLGAENSVAYSNNSIAIPTNFTISVTTEILPVSMTKTSVDCTMYICGDSTECSNLLLQYGSFCTQLNRALTGIAVEQDKNTQEVFAQVKQIYKTPPIKDFGGFNFSQILPDPSKPSKRSFIEDLLFNKVTLADAGFIKQYGDCLGDIAARDLICAQKFNGLTVLPPLLTDEMIAQYTSALLAGTITSGWTFGAGAALQIPFAMQMAYRFNGIGVTQCVLYENQKLIANQFNSAIGKIQDSLSSTASALGKLQDVVNQNAQALNTLVKQLSSNFGAISSVLNDILSRLDKVEAEVQIDRLITGRLQSLQTYVTQQLIRAAEIRASANLAATKMSECVLGQSKRFDFCGKGYHLMSFPQSAPHGVVFLHVTYVPAQEKNFTTAPAICHDGKAHFPREGVFVSNGTHWFVTQRNFYEPQIITTDNTFVCGNCDVVIGIVNNTVYDPLQPELDSGGGGSDIIKLLNEQVNKEMQSSNLYMSMSSWCYTHSLDGAGLFLFDHAAEEYEHAKKLIIFLNENNVPVQLTSISAPEHKFEGLTQIFQKAYEHEQHISESINNIVDHAIKSKDHATFNFLQWYVAEQHEEEVLFKDILDKIELIGNENHGLYLADQYVKGIAKSRKS

SEQ ID NO: 13960 - protein, 1315 aa, Artificial Sequence
  SARS-CoV-2/China/WF0028/2020__EPI_ISL_413791 spike protein (1-1147)(N914C_S1123C) Ferritin construct
MFVFLVLLPLVSSQCVNLTTRTQLPPAYTNSFTRGVYYPDKVFRSSVLHSTQDLFLPFFSNVTWFHAIHVSGTNGTKRFDNPVLPFNDGVYFASTEKSNIIRGWIFGTTLDSKTQSLLIVNNATNVVIKVCEFQFCNDPFLGVYYHKNNKSWMESEFRVYSSANNCTFEYVSQPFLMDLEGKQGNFKNLREFVFKNIDGYFKIYSKHTPINLVRDLPQGFSALEPLVDLPIGINITRFQTLLALHRSYLTPGDSSSGWTAGAAAYYVGYLQPRTFLLKYNENGTITDAVDCALDPLSETKCTLKSFTVEKGIYQTSNFRVQPTESIVRFPNITNLCPFGEVFNATRFASVYAWNRKRISNCVADYSVLYNSASFSTFKCYGVSPTKLNDLCFTNVYADSFVIRGDEVRQIAPGQTGKIADYNYKLPDDFTGCVIAWNSNNLDSKVGGNYNYLYRLFRKSNLKPFERDISTEIYQAGSTPCNGVEGFNCYFPLQSYGFQPTNGVGYQPYRVVVLSFELLHAPATVCGPKKSTNLVKNKCVNFNFNGLTGTGVLTESNKKFLPFQQFGRDIADTTDAVRDPQTLEILDITPCSFGGVSVITPGTNTSNQVAVLYQDVNCTEVPVAIHADQLTPTWRVYSTGSNVFQTRAGCLIGAEHVNNSYECDIPIGAGICASYQTQTNSPRRARSVASQSIIAYTMSLGAENSVAYSNNSIAIPTNFTISVTTEILPVSMTKTSVDCTMYICGDSTECSNLLLQYGSFCTQLNRALTGIAVEQDKNTQEVFAQVKQIYKTPPIKDFGGFNFSQILPDPSKPSKRSFIEDLLFNKVTLADAGFIKQYGDCLGDIAARDLICAQKFNGLTVLPPLLTDEMIAQYTSALLAGTITSGWTFGAGAALQIPFAMQMAYRFNGIGVTQCVLYENQKLIANQFNSAIGKIQDSLSSTASALGKLQDVVNQNAQALNTLVKQLSSNFGAISSVLNDILSRLDKVEAEVQIDRLITGRLQSLQTYVTQQLIRAAEIRASANLAATKMSECVLGQSKRVDFCGKGYHLMSFPQSAPHGVVFLHVTYVPAQEKNFTTAPAICHDGKAHFPREGVFVSNGTHWFVTQRNFYEPQIITTDNTFVCGNCDVVIGIVNNTVYDPLQPELESGGGGSDIIKLLNEQVNKEMQSSNLYMSMSSWCYTHSLDGAGLFLFDHAAEEYEHAKKLIIFLNENNVPVQLTSISAPEHKFEGLTQIFQKAYEHEQHISESINNIVDHAIKSKDHATFNFLQWYVAEQHEEEVLFKDILDKIELIGNENHGLYLADQYVKGIAKSRKS

SEQ ID NO: 13961 - protein, 1315 aa, Artificial Sequence
  SARS-CoV-2/2019-nCoV/USA-CruiseA-18/2020__MT159716.1 spike protein (1-1147)(N914C_S1123C) Ferritin construct
MFVFLVLLPLVSSQCVNLTTRTQLPPAYTNSFTRGVYYPDKVFRSSVLHSTQDLFLPFFSNVTWFHAIHVSGTNGTKRFDNPVLPFNDGVYFASTEKSNIIRGWIFGTTLDSKTQSLLIVNNATNVVIKVCEFQFCNDPFLGVYYHKNNKSWMESELRVYSSANNCTFEYVSQPFLMDLEGKQGNFKNLREFVFKNIDGYFKIYSKHTPINLVRDLPQGFSALEPLVDLPIGINITRFQTLLALHRSYLTPGDSSSGWTAGAAAYYVGYLQPRTFLLKYNENGTITDAVDCALDPLSETKCTLKSFTVEKGIYQTSNFRVQPTESIVRFPNITNLCPFGEVFNATRFASVYAWNRKRISNCVADYSVLYNSASFSTFKCYGVSPTKLNDLCFTNVYADSFVIRGDEVRQIAPGQTGKIADYNYKLPDDFTGCVIAWNSNNLDSKVGGNYNYLYRLFRKSNLKPFERDISTEIYQAGSTPCNGVEGFNCYFPLQSYGFQPTNGVGYQPYRVVVLSFELLHAPATVCGPKKSTNLVKNKCVNFNFNGLTGTGVLTESNKKFLPFQQFGRDIADTTDAVRDPQTLEILDITPCSFGGVSVITPGTNTSNQVAVLYQDVNCTEVPVAIHADQLTPTWRVYSTGSNVFQTRAGCLIGAEHVNNSYECDIPIGAGICASYQTQTNSPRRARSVASQSIIAYTMSLGAENSVAYSNNSIAIPTNFTISVTTEILPVSMTKTSVDCTMYICGDSTECSNLLLQYGSFCTQLNRALTGIAVEQDKNTQEVFAQVKQIYKTPPIKDFGGFNFSQILPDPSKPSKRSFIEDLLFNKVTLADAGFIKQYGDCLGDIAARDLICAQKFNGLTVLPPLLTDEMIAQYTSALLAGTITSGWTFGAGAALQIPFAMQMAYRFNGIGVTQCVLYENQKLIANQFNSAIGKIQDSLSSTASALGKLQDVVNQNAQALNTLVKQLSSNFGAISSVLNDILSRLDKVEAEVQIDRLITGRLQSLQTYVTQQLIRAAEIRASANLAATKMSECVLGQSKRVDFCGKGYHLMSFPQSAPHGVVFLHVTYVPAQEKNFTTAPAICHDGKAHFPREGVFVSNGTHWFVTQRNFYEPQIITTDNTFVCGNCDVVIGIVNNTVYDPLQPELDSGGGGSDIIKLLNEQVNKEMQSSNLYMSMSSWCYTHSLDGAGLFLFDHAAEEYEHAKKLIIFLNENNVPVQLTSISAPEHKFEGLTQIFQKAYEHEQHISESINNIVDHAIKSKDHATFNFLQWYVAEQHEEEVLFKDILDKIELIGNENHGLYLADQYVKGIAKSRKS

SEQ ID NO: 13962 - protein, 1315 aa, Artificial Sequence
  SARS-CoV-2/SARS-CoV-2/Yunnan-01/human/2020/CHN__MT049951.1 spike protein (1-1147)(N914C_S1123C) Ferritin construct
MFVFLVLLPLVSSQCVNLTTRTQLPPANTNSFTRGVYYPDKVFRSSVLHSTQDLFLPFFSNVTWFHAIHVSGTNGTKRFDNPVLPFNDGVYFASTEKSNIIRGWIFGTTLDSKTQSLLIVNNATNVVIKVCEFQFCNDPFLGVYYHKNNKSWMESEFRVYSSANNCTFEYVSQPFLMDLEGKQGNFKNLREFVFKNIDGYFKIYSKHTPINLVRDLPQGFSALEPLVDLPIGINITRFQTLLALHRSYLTPGDSSSGWTAGAAAYYVGYLQPRTFLLKYNENGTITDAVDCALDPLSETKCTLKSFTVEKGIYQTSNFRVQPTESIVRFPNITNLCPFGEVFNATRFASVYAWNRKRISNCVADYSVLYNSASFSTFKCYGVSPTKLNDLCFTNVYADSFVIRGDEVRQIAPGQTGKIADYNYKLPDDFTGCVIAWNSNNLDSKVGGNYNYLYRLFRKSNLKPFERDISTEIYQAGSTPCNGVEGFNCYFPLQSYGFQPTNGVGYQPYRVVVLSFELLHAPATVCGPKKSTNLVKNKCVNFNFNGLTGTGVLTESNKKFLPFQQFGRDIADTTDAVRDPQTLEILDITPCSFGGVSVITPGTNTSNQVAVLYQDVNCTEVPVAIHADQLTPTWRVYSTGSNVFQTRAGCLIGAEHVNNSYECDIPIGAGICASYQTQTNSPRRARSVASQSIIAYTMSLGAENSVAYSNNSIAIPTNFTISVTTEILPVSMTKTSVDCTMYICGDSTECSNLLLQYGSFCTQLNRALTGIAVEQDKNTQEVFAQVKQIYKTPPIKDFGGFNFSQILPDPSKPSKRSFIEDLLFNKVTLADAGFIKQYGDCLGDIAARDLICAQKFNGLTVLPPLLTDEMIAQYTSALLAGTITSGWTFGAGAALQIPFAMQMAYRFNGIGVTQCVLYENQKLIANQFNSAIGKIQDSLSSTASALGKLQDVVNQNAQALNTLVKQLSSNFGAISSVLNDILSRLDKVEAEVQIDRLITGRLQSLQTYVTQQLIRAAEIRASANLAATKMSECVLGQSKRVDFCGKGYHLMSFPQSAPHGVVFLHVTYVPAQEKNFTTAPAICHDGKAHFPREGVFVSNGTHWFVTQRNFYEPQIITTDNTFVCGNCDVVIGIVNNTVYDPLQPELDSGGGGSDIIKLLNEQVNKEMQSSNLYMSMSSWCYTHSLDGAGLFLFDHAAEEYEHAKKLIIFLNENNVPVQLTSISAPEHKFEGLTQIFQKAYEHEQHISESINNIVDHAIKSKDHATFNFLQWYVAEQHEEEVLFKDILDKIELIGNENHGLYLADQYVKGIAKSRKS

SEQ ID NO: 13963 - protein, 1315 aa, Artificial Sequence
  SARS-CoV-2/USA/WA-UW292/2020__EPI_ISL_418077 spike protein (1-1147)(N914C_S1123C) Ferritin construct
MFVFLVLLPLVSSQCVNLTTRTQLPPAYTNSFTRGVYYPDKVFRSSVLHSTQDLFLPFFSNVTWFHAIHVSGTNGTKRFDNPVLPFNDGVYFASTEKSNIIRGWIFGTTLDSKTQSLLIVNNATNVVIKVCEFQFCNDPFLGVYYHKNNKSWMESEFRVYSSANNCTFEYVSQPFLMDLEGKQGNFKNLREFVFKNIDGYFKIYSKHTPINLVRDLPQGFSALEPLVDLPIGINITRFQTLLALHRSYLTPGDSSSGWTAGAAAYYVGYLQPRTFLLKYNENGTITDAVDCALDPLSETKCTLKSFTVEKGIYQTSNFRVQPTESIVRFPNITNLCPFGEVFNATRFASVYAWNRKRISNCVADYSVLYNSASFSTFKCYGVSPTKLNDLCFTNVYADSFVIRGDEVRQIAPGQTGKIADYNYKLPDDFTGCVIAWNSNNLDSKVGGNYNYLYRLFRKSNLKPFERDISTEIYQASSTPCNGVEGFNCYFPLQSYGFQPTNGVGYQPYRVVVLSFELLHAPATVCGPKKSTNLVKNKCVNFNFNGLTGTGVLTESNKKFLPFQQFGRDIADTTDAVRDPQTLEILDITPCSFGGVSVITPGTNTSNQVAVLYQDVNCTEVPVAIHADQLTPTWRVYSTGSNVFQTRAGCLIGAEHVNNSYECDIPIGAGICASYQTQTNSPRRARSVASQSIIAYTMSLGAENSVAYSNNSIAIPTNFTISVTTEILPVSMTKTSVDCTMYICGDSTECSNLLLQYGSFCTQLNRALTGIAVEQDKNTQEVFAQVKQIYKTPPIKDFGGFNFSQILPDPSKPSKRSFIEDLLFNKVTLADAGFIKQYGDCLGDIAARDLICAQKFNGLTVLPPLLTDEMIAQYTSALLAGTITSGWTFGAGAALQIPFAMQMAYRFNGIGVTQCVLYENQKLIANQFNSAIGKIQDSLSSTASALGKLQDVVNQNAQALNTLVKQLSSNFGAISSVLNDILSRLDKVEAEVQIDRLITGRLQSLQTYVTQQLIRAAEIRASANLAATKMSECVLGQSKRVDFCGKGYHLMSFPQSAPHGVVFLHVTYVPAQEKNFTTAPAICHDGKAHFPREGVFVSNGTHWFVTQRNFYEPQIITTDNTFVCGNCDVVIGIVNNTVYDPLQPELDSGGGGSDIIKLLNEQVNKEMQSSNLYMSMSSWCYTHSLDGAGLFLFDHAAEEYEHAKKLIIFLNENNVPVQLTSISAPEHKFEGLTQIFQKAYEHEQHISESINNIVDHAIKSKDHATFNFLQWYVAEQHEEEVLFKDILDKIELIGNENHGLYLADQYVKGIAKSRKS

SEQ ID NO: 13964 - protein, 1315 aa, Artificial Sequence
  SARS-CoV-2/Iceland/192/2020__EPI_ISL_417819 spike protein (1-1147)(N914C_S1123C) Ferritin construct
MFVFFVLLPLVSSQCVNLTTRTQLPPAYTNSFTRGVYYPDKVFRSSVLHSTQDLFLPFFSNVTWFHAIHVSGTNGTKRFDNPVLPFNDGVYFASTEKSNIIRGWIFGTTLDSKTQSLLIVNNATNVVIKVCEFQFCNDPFLGVYYHKNNKSWMESEFRVYSSANNCTFEYVSQPFLMDLEGKQGNFKNLREFVFKNIDGYFKIYSKHTPINLVRDLPQGFSALEPLVDLPIGINITRFQTLLALHRSYLTPGDSSSGWTAGAAAYYVGYLQPRTFLLKYNENGTITDAVDCALDPLSETKCTLKSFTVEKGIYQTSNFRVQPTESIVRFPNITNLCPFGEVFNATRFASVYAWNRKRISNCVADYSVLYNSASFSTFKCYGVSPTKLNDLCFTNVYADSFVIRGDEVRQIAPGQTGKIADYNYKLPDDFTGCVIAWNSNNLDSKVGGNYNYLYRLFRKSNLKPFERDISTEIYQAGSTPCNGVEGFNCYFPLQSYGFQPTNGVGYQPYRVVVLSFELLHAPATVCGPKKSTNLVKNKCVNFNFNGLTGTGVLTESNKKFLPFQQFGRDIADTTDAVRDPQTLEILDITPCSFGGVSVITPGTNTSNQVAVLYQGVNCTEVPVAIHADQLTPTWRVYSTGSNVFQTRAGCLIGAEHVNNSYECDIPIGAGICASYQTQTNSPRRARSVASQSIIAYTMSLGAENSVAYSNNSIAIPTNFTISVTTEILPVSMTKTSVDCTMYICGDSTECSNLLLQYGSFCTQLNRALTGIAVEQDKNTQEVFAQVKQIYKTPPIKDFGGFNFSQILPDPSKPSKRSFIEDLLFNKVTLADAGFIKQYGDCLGDIAARDLICAQKFNGLTVLPPLLTDEMIAQYTSALLAGTITSGWTFGAGAALQIPFAMQMAYRFNGIGVTQCVLYENQKLIANQFNSAIGKIQDSLSSTASALGKLQDVVNQNAQALNTLVKQLSSNFGAISSVLNDILSRLDKVEAEVQIDRLITGRLQSLQTYVTQQLIRAAEIRASANLAATKMSECVLGQSKRVDFCGKGYHLMSFPQSAPHGVVFLHVTYVPAQEKNFTTAPAICHDGKAHFPREGVFVSNGTHWFVTQRNFYEPQIITTDNTFVCGNCDVVIGIVNNTVYDPLQPELDSGGGGSDIIKLLNEQVNKEMQSSNLYMSMSSWCYTHSLDGAGLFLFDHAAEEYEHAKKLIIFLNENNVPVQLTSISAPEHKFEGLTQIFQKAYEHEQHISESINNIVDHAIKSKDHATFNFLQWYVAEQHEEEVLFKDILDKIELIGNENHGLYLADQYVKGIAKSRKS

SEQ ID NO: 13965 - protein, 1315 aa, Artificial Sequence
  SARS-CoV-2/Belgium/ULG-6939/2020__EPI_ISL_417020 spike protein (1-1147)(N914C_S1123C) Ferritin construct
MFVFLVLLPLVSSQCVNLTTRTQLPPAYTNSFTRGVYYPDKVFRSSVLHSTQDLFLPFFSNVTWFHAIHVSGTNGTKRFDNPVLPFNDGVYFASTEKSNIIRGWIFGTTLDSKTQSLLIVNNATNVVIKVCEFQFCNDPFLGVYYHKNNKSWMESEFRVYSSANNCTFEYVSQPFLMDLEGKQGNFKNLREFVFKNIDGYFKIYSKHTPINLVRDLPQGFSALEPLVDLPIGINITRFQTLLALHRSYLTPGDSSSGWTAGAAAYYVGYLQPRTFLLKYNENGTITDAVDCALDPLSETKCTLKSFTVEKGIYQTSNFRVQPTESIVRFPNITNLCPFGEVFNATRFASVYAWNRKRISNCVADYSVLYNSASFSTFKCYGVSPTKLNDLCFTNVYADSFVIRGDEVRQIAPGQTGKIADYNYKLPDDFTGCVIAWNSNNLDSKVGGNYNYLYRLFRKSNLKPFERDISTEIYQAGSTPCNGVEGFNCYFPLQSYGFQPTNGVGYQPYRVVVLSFELLHAPATVCGPKKSTNLVKNKCVNFNFNGLTGTGVLTESNKKFLPFQQFGRDIADTTDAVRDPQTLEILDITPCSFGGVSVITPGTNTSNQVAVLYQGVNCTEVPVAIHADQLTPTWRVYSTGSNVFQTRAGCLIGAEHVNNSYECDIPIGAGICASYQTQTNSPRRARSVASQSIIAYTMSLGAENSVVYSNNSIAIPTNFTISVTTEILPVSMTKTSVDCTMYICGDSTECSNLLLQYGSFCTQLNRALTGIAVEQDKNTQEVFAQVKQIYKTPPIKDFGGFNFSQILPDPSKPSKRSFIEDLLFNKVTLADAGFIKQYGDCLGDIAARDLICAQKFNGLTVLPPLLTDEMIAQYTSALLAGTITSGWTFGAGAALQIPFAMQMAYRFNGIGVTQCVLYENQKLIANQFNSAIGKIQDSLSSTASALGKLQDVVNQNAQALNTLVKQLSSNFGAISSVLNDILSRLDKVEAEVQIDRLITGRLQSLQTYVTQQLIRAAEIRASANLAATKMSECVLGQSKRVDFCGKGYHLMSFPQSAPHGVVFLHVTYVPAQEKNFTTAPAICHDGKAHFPREGVFVSNGTHWFVTQRNFYEPQIITTDNTFVCGNCDVVIGIVNNTVYDPLQPELDSGGGGSDIIKLLNEQVNKEMQSSNLYMSMSSWCYTHSLDGAGLFLFDHAAEEYEHAKKLIIFLNENNVPVQLTSISAPEHKFEGLTQIFQKAYEHEQHISESINNIVDHAIKSKDHATFNFLQWYVAEQHEEEVLFKDILDKIELIGNENHGLYLADQYVKGIAKSRKS

SEQ ID NO: 13966 - protein, 1315 aa, Artificial Sequence
  SARS-CoV-2/France/HF2496/2020__EPI_ISL_418231 spike protein (1-1147)(N914C_S1123C) Ferritin construct
MFVFLVLLPLVSSQCVNLTTRTQLPPAYTNSFTRGVYYPDKVFRSSVLHSTQDLFLPFFSNVTWFHAIHVSGTNGTKRFDNPVLPFNDGVYFASTEKSNIIRGWIFGTTLDSKTQSLLIVNNATNVVIKVCEFQFCNDPFLGVYYHKNNKSWMESEFRVYSSANNCTFEYVSQPFLMDLEGKQGNFKNLREFVFKNIDGYFKIYSKHTPINLVRDLPQGFSALEPLVDLPIGINITRFQTLLALHRSYLTPGDSSSGWTAGAAAYYVGYLQPRTFLLKYNENGTITDAVDCALDPLSETKCTLKSFTVEKGIYQTSNFRVQPTESIVRFPNITNLCPFGEVFNATRFASVYAWNRKRISNCVADYSVLYNSASFSTFKCYGVSPTKLNDLCFTNVYADSFVIRGDEVRQIAPGQTGKIADYNYKLPDDFTGCVIAWNSNNLDSKVGGNYNYLYRLFRKSNLKPFERDISTEIYQAGSTPCNGVEGFNCYFPLQSYGFQPTNGVGYQPYRVVVLSFELLHAPATVCGPKKSTNLVKNKCVNFNFNGLTGTGVLTESNKKFLPFQQFGRDIADTTDAVRDPQTLEILDITPCSFGGVSVITPGTNTSNQVAVLYQGVNCTEVPVAIHADQLTPTWRVYSTGSNVFQTRAGCLIGAEHVNNSYECDIPIGAGICASYQTQTNSPRRARSVASQSIIAYTMSLGAENSVAYSNNSIAIPTNFTISVTTEILPVSMTKTSVDCTMYICGDSTECSNLLLQYGSFCTQLNRALTGIAVEQDKNTQEVFAQVKQIYKTPPIKDFGGFNFSQILPDPSKPSKRSFIEDLLFNKVTLADAGFIKQYGDCLGDIVARDLICAQKFNGLTVLPPLLTDEMIAQYTSALLAGTITSGWTFGAGAALQIPFAMQMAYRFNGIGVTQCVLYENQKLIANQFNSAIGKIQDSLSSTASALGKLQDVVNQNAQALNTLVKQLSSNFGAISSVLNDILSRLDKVEAEVQIDRLITGRLQSLQTYVTQQLIRAAEIRASANLAATKMSECVLGQSKRVDFCGKGYHLMSFPQSAPHGVVFLHVTYVPAQEKNFTTAPAICHDGKAHFPREGVFVSNGTHWFVTQRNFYEPQIITTDNTFVCGNCDVVIGIVNNTVYDPLQPELDSGGGGSDIIKLLNEQVNKEMQSSNLYMSMSSWCYTHSLDGAGLFLFDHAAEEYEHAKKLIIFLNENNVPVQLTSISAPEHKFEGLTQIFQKAYEHEQHISESINNIVDHAIKSKDHATFNFLQWYVAEQHEEEVLFKDILDKIELIGNENHGLYLADQYVKGIAKSRKS

SEQ ID NO: 13967 - protein, 1315 aa, Artificial Sequence
  SARS-CoV-2/USA/WA-UW291/2020__EPI_ISL_418076 spike protein (1-1147)(N914C_S1123C) Ferritin construct
MFVFLVLLPLVSSQCVNLTTRTQLPPAYTNSFTRGVYYPDKVFRSSVLHSTQDLFLPFFSNVTWFHAIHVSGTNGTKRFDNPVLPFNDGVYFASTEKSNIIRGWIFGTTLDSKTQSLLIVNNATNVVIKVCEFQFCNDPFLGVYYHKNNKSWMESEFRVYSSANNCTFEYVSQPFLMDLEGKQGNFKNLREFVFKNIDGYFKIYSKHTPINLVRDLPQGFSALEPLVDLPIGINITRFQTLLALHRSYLTPGDSSSGWTAGAAAYYVGYLQPRTFLLKYNENGTITDAVDCALDPLSETKCTLKSFTVEKGIYQTSNFRVQPTESIVRFPNITNLCPFGEVFNATRFASVYAWNRKRISNCVADYSVLYNSASFSTFKCYGVSPTKLNDLCFTNVYADSFVIRGDEVRQIAPGQTGKIADYNYKLPDDFTGCVIAWNSNNLDSKVGGNYNYLYRLFRKSNLKPFERDISTEIYQAGSTPCNGVEGFNCYFPLQSYGFQPTNGVGYQPYRVVVLSFELLHAPATVCGPKKSTNLVKNKCVNFNFNGLTGTGVLTESNKKFLPFQQFGRDIADTTDAVRDPQTLEILDITPCSFGGVSVITPGTNTSNQVAVLYQGVNCTEVPVAIHADQLTPTWRVYSTGSNVFQTRAGCLIGAEHVNNSYECDIPIGAGICASYQTQTNSPRRARSVASQSIIAYTMSLGAENSVAYSNNSIAIPTNFTISVTTEILPVSMTKTSVDCTMYICGDSTECSNLLLQYGSFCTQLNRALTGIAVEQDKNTQEVFAQVKQIYKTPPIKDFGGFNFSQILPDPSKPSKRSFIEDLLFNKVTLADAGFIKQYGDCLGDIAARDLICAQKFNGLTVLPPLLTDEMIAQYTSALLAGTITSGWTFGAGAALQIPFAMQMAYRFNGIGVTQCVLYENQKLIANQFNSAIGKIQYSLSSTASALGKLQDVVNQNAQALNTLVKQLSSNFGAISSVLNDILSRLDKVEAEVQIDRLITGRLQSLQTYVTQQLIRAAEIRASANLAATKMSECVLGQSKRVDFCGKGYHLMSFPQSAPHGVVFLHVTYVPAQEKNFTTAPAICHDGKAHFPREGVFVSNGTHWFVTQRNFYEPQIITTDNTFVCGNCDVVIGIVNNTVYDPLQPELDSGGGGSDIIKLLNEQVNKEMQSSNLYMSMSSWCYTHSLDGAGLFLFDHAAEEYEHAKKLIIFLNENNVPVQLTSISAPEHKFEGLTQIFQKAYEHEQHISESINNIVDHAIKSKDHATFNFLQWYVAEQHEEEVLFKDILDKIELIGNENHGLYLADQYVKGIAKSRKS

SEQ ID NO: 13968 - protein, 1315 aa, Artificial Sequence; identical to SEQ ID NO: 13931
  SARS-CoV-2/Portugal/PT0034/2020__EPI_ISL_418019 spike protein (1-1147)(N914C_S1123C) Ferritin construct

SEQ ID NO: 13969 - protein, 1315 aa, Artificial Sequence; identical to SEQ ID NO: 13923
  SARS-CoV-2/Iceland/202/2020__EPI_ISL_417750 spike protein (1-1147)(N914C_S1123C) Ferritin construct

SEQ ID NO: 13970 - protein, 1315 aa, Artificial Sequence
  SARS-CoV-2/USA/WA-UW261/2020__EPI_ISL_418046 spike protein (1-1147)(N914C_S1123C) Ferritin construct
MFVFLVLLPLVSSQCVNLTTRTQLPPAYTNSFTRGVYYPDKVFRSSVLHSTQDLFLPFFSNVTWFHAIHVSGTNGTKRFDNPVLPFNDGVYFASTEKSNIIRGWIFGTTLDSKTQSLLIVNNATNVVIKVCEFQFCNDPFLGVYYHKNNKSWMESEFRVYSSANNCTFEYVSQPFLMDLEGKQGNFKNLREFVFKNIDGYFKIYSKHTPINLVRDLPQGFSALEPLVDLPIGINITRFQTLLALHRSYLTPGDSSSGWTAGAAAYYVGYLQPRTFLLKYNENGTITDAVDCALDPLSETKCTLKSFTVEKGIYQTSNFRVQPTESIVRFPNITNLCPFGEVFNATRFTSVYAWNRKRISNCVADYSVLYNSASFSTFKCYGVSPTKLNDLCFTNVYADSFVIRGDEVRQIAPGQTGKIADYNYKLPDDFTGCVIAWNSNNLDSKVGGNYNYLYRLFRKSNLKPFERDISTEIYQAGSTPCNGVEGFNCYFPLQSYGFQPTNGVGYQPYRVVVLSFELLHAPATVCGPKKSTNLVKNKCVNFNFNGLTGTGVLTESNKKFLPFQQFGRDIADTTDAVRDPQTLEILDITPCSFGGVSVITPGTNTSNQVAVLYQDVNCTEVPVAIHADQLTPTWRVYSTGSNVFQTRAGCLIGAEHVNNSYECDIPIGAGICASYQTQTNSPRRARSVASQSIIAYTMSLGAENSVAYSNNSIAIPTNFTISVTTEILPVSMTKTSVDCTMYICGDSTECSNLLLQYGSFCTQLNRALTGIAVEQDKNTQEVFAQVKQIYKTPPIKDFGGFNFSQILPDPSKPSKRSFIEDLLFNKVTLADAGFIKQYGDCLGDIAARDLICAQKFNGLTVLPPLLTDEMIAQYTSALLAGTITSGWTFGAGAALQIPFAMQMAYRFNGIGVTQCVLYENQKLIANQFNSAIGKIQDSLSSTASALGKLQDVVNQNAQALNTLVKQLSSNFGAISSVLNDILSRLDKVEAEVQIDRLITGRLQSLQTYVTQQLIRAAEIRASANLAATKMSECVLGQSKRVDFCGKGYHLMSFPQSAPHGVVFLHVTYVPAQEKNFTTAPAICHDGKAHFPREGVFVSNGTHWFVTQRNFYEPQIITTDNTFVCGNCDVVIGIVNNTVYDPLQPELDSGGGGSDIIKLLNEQVNKEMQSSNLYMSMSSWCYTHSLDGAGLFLFDHAAEEYEHAKKLIIFLNENNVPVQLTSISAPEHKFEGLTQIFQKAYEHEQHISESINNIVDHAIKSKDHATFNFLQWYVAEQHEEEVLFKDILDKIELIGNENHGLYLADQYVKGIAKSRKS

SEQ ID NO: 13971 - protein, 1315 aa, Artificial Sequence
  SARS-CoV-2/Portugal/PT0035/2020__EPI_ISL_418020 spike protein (1-1147)(N914C_S1123C) Ferritin construct
MFVFLVLLPLVSSQCVNLTTRTQLPPAYTNSFTRGVYYPDKVFRSSVLHSTQDLFLPFFSNVTWFHAIHVSGTNGTKRFDNPVLPFNDGVYFASTEKSNIIRGWIFGTTLDSKTQSLLIVNNATNVVIKVCEFQFCNDPFLGVYYHKNNKSWMESEFRVYSSANNCTFEYVSQPFLMDLEGKQGNFKNLREFVFKNIDGYFKIYSKHTPINLVRDLPQGFSALEPLVDLPIGINITRFQTLLALHRSYLTPGDSSSGWTAGAAAYYVGYLQPRTFLLKYNENGTITDAVDCALDPLSETKCTLKSFTVEKGIYQTSNFRVQPTESIVRFPNITNLCPFGEVFNATRFASVYAWNRKRISNCVADYSVLYNSASFSTFKCYGVSPTKLNDLCFTNVYADSFVIRGDEVRQIAPGQTGKIADYNYKLPDDFTGCVIAWNSNNLDSKVGGNYNYLYRLFRKSNLKPFERDISTEIYQAGSTPCNGVEGFNCYFPLQSYGFQPTNGVGYQPYRVVVLSFELLHAPATVCGPKKSTNLVKNKCVNFNFNGLTGTGVLTESNKKFLPFQQFGRDIADTTDAVRDPQTLEILDITPCSFGGVSVITPGTNTSNQVAVLYQDVNCTEVPVAIHADQLTPTWRVYSTGSNVFQTRAGCLIGAEHVNNSYECDIPIGAGICASYQTQTNSPRRARSVASQSIIAYTMSLGAENSVAYSNNSIAIPTNFTISVTTEILPVSMTKTSVDCTMYICGDSTECSNLLLQYGSFCTQLNRALTGIAVEQDKNTQEVFAQVKQIYKTPPIKDFGGFNFSQILPDPSKPSKRSFIEDLLFNKVTLADAGFIKQYGDCLGDISARDLICAQKFNGLTVLPPLLTDEMIAQYTSALLAGTITSGWTFGAGAALQIPFAMQMAYRFNGIGVTQCVLYENQKLIANQFNSAIGKIQDSLSSTASALGKLQDVVNQNAQALNTLVKQLSSNFGAISSVLNDILSRLDKVEAEVQIDRLITGRLQSLQTYVTQQLIRAAEIRASANLAATKMSECVLGQSKRVDFCGKGYHLMSFPQSAPHGVVFLHVTYVPAQEKNFTTAPAICHDGKAHFPREGVFVSNGTHWFVTQRNFYEPQIITTDNTFVCGNCDVVIGIVNNTVYDPLQPELDSGGGGSDIIKLLNEQVNKEMQSSNLYMSMSSWCYTHSLDGAGLFLFDHAAEEYEHAKKLIIFLNENNVPVQLTSISAPEHKFEGLTQIFQKAYEHEQHISESINNIVDHAIKSKDHATFNFLQWYVAEQHEEEVLFKDILDKIELIGNENHGLYLADQYVKGIAKSRKS

SEQ ID NO: 13972 - protein, 1315 aa, Artificial Sequence
  SARS-CoV-2/USA/NY-NYUMC7/2020__EPI_ISL_418192 spike protein (1-1147)(N914C_S1123C) Ferritin construct
MFVFLVLLPLVSSQCVNLTTRTQLPPAYTNSFTRGVYYPDKVFRSSVLHSTQDLFLPFFSNVTWFHAIHVSGTNGTKRFDNPVLPFNDGVYFASTEKSNIIRGWIFGTTLDSKTQSLLIVNNATNVVIKVCEFQFCNDPFLGVYHHKNNKSWMESEFRVYSSANNCTFEYVSQPFLMDLEGKQGNFKNLREFVFKNIDGYFKIYSKHTPINLVRDLPQGFSALEPLVDLPIGINITRFQTLLALHRSYLTPGDSSSGWTAGAAAYYVGYLQPRTFLLKYNENGTITDAVDCALDPLSETKCTLKSFTVEKGIYQTSNFRVQPTESIVRFPNITNLCPFGEVFNATRFASVYAWNRKRISNCVADYSVLYNSASFSTFKCYGVSPTKLNDLCFTNVYADSFVIRGDEVRQIAPGQTGKIADYNYKLPDDFTGCVIAWNSNNLDSKVGGNYNYLYRLFRKSNLKPFERDISTEIYQAGSTPCNGVEGFNCYFPLQSYGFQPTNGVGYQPYRVVVLSFELLHAPATVCGPKKSTNLVKNKCVNFNFNGLTGTGVLTESNKKFLPFQQFGRDIADTTDAVRDPQTLEILDITPCSFGGVSVITPGTNTSNQVAVLYQGVNCTEVPVAIHADQLTPTWRVYSTGSNVFQTRAGCLIGAEHVNNSYECDIPIGAGICASYQTQTNSPRRARSVASQSIIAYTMSLGAENSVAYSNNSIAIPTNFTISVTTEILPVSMTKTSVDCTMYICGDSTECSNLLLQYGSFCTQLNRALTGIAVEQDKNTQEVFAQVKQIYKTPPIKDFGGFNFSQILPDPSKPSKRSFIEDLLFNKVTLADAGFIKQYGDCLGDIAARDLICAQKFNGLTVLPPLLTDEMIAQYTSALLAGTITSGWTFGAGAALQIPFAMQMAYRFNGIGVTQCVLYENQKLIANQFNSAIGKIQDSLSSTASALGKLQDVVNQNAQALNTLVKQLSSNFGAISSVLNDILSRLDKVEAEVQIDRLITGRLQSLQTYVTQQLIRAAEIRASANLAATKMSECVLGQSKRVDFCGKGYHLMSFPQSAPHGVVFLHVTYVPAQEKNFTTAPAICHDGKAHFPREGVFVSNGTHWFVTQRNFYEPQIITTDNTFVCGNCDVVIGIVNNTVYDPLQPELDSGGGGSDIIKLLNEQVNKEMQSSNLYMSMSSWCYTHSLDGAGLFLFDHAAEEYEHAKKLIIFLNENNVPVQLTSISAPEHKFEGLTQIFQKAYEHEQHISESINNIVDHAIKSKDHATFNFLQWYVAEQHEEEVLFKDILDKIELIGNENHGLYLADQYVKGIAKSRKS

SEQ ID NO: 13973 - protein, 1315 aa, Artificial Sequence
  SARS-CoV-2/Iceland/189/2020__EPI_ISL_417709 spike protein (1-1147)(N914C_S1123C) Ferritin construct
MFVFLVLLPLVSSQCVNLTTRTQLPPAYTNSFTRGVYYPDKVFRSSVLHSTQDLFLPFFSNVTWFHAIHVSGTNGTKRFDNPVLPFNDGVYFASTEKSNIIRGWIFGTTLDSKTQSLLIVNNATNVVIKVCEFQFCNDPFLGVYYHKNNKSWMESEFRVYSSANNCTFEYVSQPFLMDLEGKQGNFKNLREFVFKNIDGYFKIYSKHTPINLVRDLPQGFSALEPLVDLPIGINITRFQTLLALHRSYLTPGDSSSGWTAGAAAYYVGYLQPRTFLLKYNENGTITDAVDCALDPLSETKCTLKSFTVEKGIYQTSNFRVQPTESIVRFPNITNLCPFGEVFNATRFASVYAWNRKRISNCVADYSVLYNSASFSTFKCYGVSPTKLNDLCFTNVYADSFVIRGDEVRQIAPGQTGKIADYNYKLPDDFTGCVIAWNSNNLDSKVGGNYNYLYRLFRKSNLKPFERDISTEIYQAGSTPCNGVEGFNCYFPLQSYGFQPTNGVGYQPYRVVVLSFELLHAPATVCGPKKSTNLVKNKCVNFNFNGLTGTGVLTESNKKFLPFQQFGRDIADTTDAVRDPQTLEILDITPCSFGGVSVITPGTNTSNQVAVLYQGVNCTEVPVAIHADQLTPTWRVYSTGSNVFQTRAGCLIGAEHVNNSYECDIPIGAGICASYQTQTNSPRRARSVASQSIIAYTMSLGAENSVAYSNNSIAIPTNFTISVTTEILPVSMTKTSVDCTMYICGDSTECSNLLLQYGSFCTQLNRALTGIAVEQDKNTQEVFAQVKQIYKTPPIKDFGGFNFSQILPDPSKPSKRSFIEDLLFNKVTLADAGFTKQYGDCLGDIAARDLICAQKFNGLTVLPPLLTDEMIAQYTSALLAGTITSGWTFGAGAALQIPFAMQMAYRFNGIGVTQCVLYENQKLIANQFNSAIGKIQDSLSSTASALGKLQDVVNQNAQALNTLVKQLSSNFGAISSVLNDILSRLDKVEAEVQIDRLITGRLQSLQTYVTQQLIRAAEIRASANLAATKMSECVLGQSKRVDFCGKGYHLMSFPQSAPHGVVFLHVTYVPAQEKNFTTAPAICHDGKAHFPREGVFVSNGTHWFVTQRNFYEPQIITTDNTFVCGNCDVVIGIVNNTVYDPLQPELDSGGGGSDIIKLLNEQVNKEMQSSNLYMSMSSWCYTHSLDGAGLFLFDHAAEEYEHAKKLIIFLNENNVPVQLTSISAPEHKFEGLTQIFQKAYEHEQHISESINNIVDHAIKSKDHATFNFLQWYVAEQHEEEVLFKDILDKIELIGNENHGLYLADQYVKGIAKSRKS

SEQ ID NO: 13974 - protein, 1315 aa, Artificial Sequence
  SARS-CoV-2/Australia/NSW56/2020__EPI_ISL_417408 spike protein (1-1147)(N914C_S1123C) Ferritin construct
MFVFLVLLPLVSSQCVNLTTRTQLPPAYTNSFTRGVYYPDKVFRSSVLHSTQDLFLPFFSNVTWFHAIHVSGTNGTKRFDNPVLPFNDGVYFASTEKSNIIRGWIFGTTLDSKTQSLLIVNNATNVVIKVCEFQFCNDPFLGVYYHKNNKSWMESEFRVYSSANNCTFEYVSQPFLMDLEGKQGNFKNLREFVFKNIDGYFKIYSKHTPINLVRDLPQGFSALEPLVDLPIGINITRFQTLLALHRSYLTPGDSSSGWTAGAAAYYVGYLQPRTFLLKYNENGTITDAVDCALDPLSETKCTLKSFTVEKGIYQTSNFRVQPTESIVRFPNITNLCPFGEVFNATRFASVYAWNRKRISNCVADYSVLYNSASFSTFKCYGVSPTKLNDLCFTNVYADSFVIRGDEVRQIAPGQTGKIADYNYKLPDDFTGCVIAWNSNNLDSKVGGNYNYLYRLFRKSNLKPFERDISTEIYQAGSTPCNGVEGFNCYFPLQSYGFQPTNGVGYQPYRVVVLSFELLHAPATVCGPKKSTNLVKNKCVNFNFNGLTGTGVLTESNKKFLPFQQFGRDIADTTDAVRDPQTLEILDITPCSFGGVSVITPGTNTSNQVAVLYQDVNCTEVPVAIHADQLTPTWRVYSTGSNVFQTRAGCLIGAEHVNNSYECDIPIGAGICASYQTQTNSPRRARSVASQSIIAYTMSLGAENSVAYSNNSIAIPTNFTISVTTEILPVSMTKTSVDCTMYICGDSTECSNLLLQYGSFCTQLNRALTGIAVEQDKNTQEVFAQVKQIYKTPPIKDFGGFNFSQILPDSSKPSKRSFIEDLLFNKVTLADAGFIKQYGDCLGDIAARDLICAQKFNGLTVLPPLLTDEMIAQYTSALLAGTITSGWTFGAGAALQIPFAMQMAYRFNGIGVTQCVLYENQKLIANQFNSAIGKIQDSLSSTASALGKLQDVVNQNAQALNTLVKQLSSNFGAISSVLNDILSRLDKVEAEVQIDRLITGRLQSLQTYVTQQLIRAAEIRASANLAATKMSECVLGQSKRVDFCGKGYHLMSFPQSAPHGVVFLHVTYVPAQEKNFTTAPAICHDGKAHFPREGVFVSNGTHWFVTQRNFYEPQIITTDNTFVCGNCDVVIGIVNNTVYDPLQPELDSGGGGSDIIKLLNEQVNKEMQSSNLYMSMSSWCYTHSLDGAGLFLFDHAAEEYEHAKKLIIFLNENNVPVQLTSISAPEHKFEGLTQIFQKAYEHEQHISESINNIVDHAIKSKDHATFNFLQWYVAEQHEEEVLFKDILDKIELIGNENHGLYLADQYVKGIAKSRKS

SEQ ID NO: 13975 - protein, 1315 aa, Artificial Sequence
  SARS-CoV-2/Iceland/280/2020__EPI_ISL_417608 spike protein (1-1147)(N914C_S1123C) Ferritin construct
MFVFLVLLPLVSSQCVNLTTRTQLPPAYTNSFTRGVYYPDKVFRSSVLHSTQDLFLPFFSNVTWFHAIHVSGTNGTKRFDNPVLPFNDGVYFASTEKSNIIRGWIFGTTLDSKTQSLLIVNNATNVVIKVCEFQFCNDPFLGVYYHKNNKSWMESEFRVYSSANNCTFEYVSQPFLMDLEGKQGNFKNLREFVFKNIDGYFKIYSKHTPINLVRDLPQGFSALEPLVDLPIGINITRFQTLLALHRSYLTPGDSSSGWTAGAAAYYVGYLQPRTFLLKYNENGTITDAVDCALDPLSETKCTLKSFTVEKGIYQTSNFRVQPTESIVRFPNITNLCPFGEVFNATRFASVYAWNRKRISNCVADYSVLYNSASFSTFKCYGVSPTKLNDLCFTNVYADSFVIRGDEVRQIAPGQTGKIADYNYKLPDDFTGCVIAWNSNNLDSKVGGNYNYLYRLFRKSNLKPFERDISTEIYQAGSTPCNGVEGFNCYFPLQSYGFQPTNGVGYQPYRVVVLSFELLHAPATVCGPKKSTNLVKNKCVNFNFNGLTGTGVLTESNKKFLPFQQFGRDIADTTDAVRDPQTLEILDITPCSFGGVSVITPGTNTSNQVAVLYQGVNCTEVPVAIHADQLTPTWRVYSTGSNVFQTRAGCLIGAEHVNNSYECDIPIGAGICASYHTQTNSPRRARSVASQSIIAYTMSLGAENSVAYSNNSIAIPTNFTISVTTEILPVSMTKTSVDCTMYICGDSTECSNLLLQYGSFCTQLNRALTGIAVEQDKNTQEVFAQVKQIYKTPPIKDFGGFNFSQILPDPSKPSKRSFIEDLLFNKVTLADAGFIKQYGDCLGDIAARDLICAQKFNGLTVLPPLLTDEMIAQYTSALLAGTITSGWTFGAGAALQIPFAMQMAYRFNGIGVTQCVLYENQKLIANQFNSAIGKIQDSLSSTASALGKLQDVVNQNAQALNTLVKQLSSNFGAISSVLNDILSRLDKVEAEVQIDRLITGRLQSLQTYVTQQLIRAAEIRASANLAATKMSECVLGQSKRVDFCGKGYHLMSFPQSAPHGVVFLHVTYVPAQEKNFTTAPAICHDGKAHFPREGVFVSNGTHWFVTQRNFYEPQIITTDNTFVCGNCDVVIGIVNNTVYDPLQPELDSGGGGSDIIKLLNEQVNKEMQSSNLYMSMSSWCYTHSLDGAGLFLFDHAAEEYEHAKKLIIFLNENNVPVQLTSISAPEHKFEGLTQIFQKAYEHEQHISESINNIVDHAIKSKDHATFNFLQWYVAEQHEEEVLFKDILDKIELIGNENHGLYLADQYVKGIAKSRKS

SEQ ID NO: 13976 - protein, 1315 aa, Artificial Sequence; identical to SEQ ID NO: 13931
  SARS-CoV-2/Iceland/247/2020__EPI_ISL_417575 spike protein (1-1147)(N914C_S1123C) Ferritin construct

SEQ ID NO: 13977 - protein, 1315 aa, Artificial Sequence
  SARS-CoV-2/Iceland/238/2020__EPI_ISL_417566 spike protein (1-1147)(N914C_S1123C) Ferritin construct
MFVFLVLLPLVSSQCVNLTTRTQLPPAYTNSFTRGVYYPDKVFRSSVLHSTQDLFLPFFSNVTWFHAIHVSGTNGTKRFDNPVLPFNDGVYFASTEKSNIIRGWIFGTTLDSKTQSLLIVNNATNVVIKVCEFQFCNDPFLGVYYHKNNKSWMESEFRVYSSANNCTFEYVSQPFLMDLEGKQGNFKNLREFVFKNIDGYFKIYSKHTPINLVRDLPQGFSALEPLVDLPIGINITRFQTLLALHRSYLTPGDSSSGWTAGAAAYYVGYLQPRTFLLKYNENGTITDAVDCALDPLSETKCTLKSFTVEKGIYQTSNFRVQPTESIVRFPNITNLCPFGEVFNATRFASVYAWNRKRISNCVADYSVLYNSASFSTFKCYGVSPTKLNDLCFTNVYADSFVIRGDEVRQIAPGQTGKIADYNYKLPDDFTGCVIAWNSNNLDSKVGGNYNYLYRLFRKSNLKPFERDISTEIYQAGSTPCNGVEGFNCYFPLQSYGFQPTNGVGYQPYRVVVLSFELLHAPATVCGPKKSTNLVKNKCVNFNFNGLTGTGVLTESNKKFLPFQQFGRDIADTTDAVRDPQTLEILDITPCSFGGVSVITPGTNTSNQVAVLYQGVNCTEVPVAIHADQLTPTWRVYSTGSNVFQTRAGCLIGAEHVNNSYECDIPIGAGICASYQTQTNSPRRARSVASQSIIAYTMSLGAENSVAYSNNSIAIPTNFTISVTTEILPVSMTKTSVDCTMYICGDSTECSNLLLQYGSFCTQLNRALTGIAVEQDKNTQEVFAQVKQIYKTPPIKDFGGFNFSQILPDPSKPSKRSFIEDLLFNKVTLADVGFIKQYGDCLGDIAARDLICAQKFNGLTVLPPLLTDEMIAQYTSALLAGTITSGWTFGAGAALQIPFAMQMAYRFNGIGVTQCVLYENQKLIANQFNSAIGKIQDSLSSTASALGKLQDVVNQNAQALNTLVKQLSSNFGAISSVLNDILSRLDKVEAEVQIDRLITGRLQSLQTYVTQQLIRAAEIRASANLAATKMSECVLGQSKRVDFCGKGYHLMSFPQSAPHGVVFLHVTYVPAQEKNFTTAPAICHDGKAHFPREGVFVSNGTHWFVTQRNFYEPQIITTDNTFVCGNCDVVIGIVNNTVYDPLQPELDSGGGGSDIIKLLNEQVNKEMQSSNLYMSMSSWCYTHSLDGAGLFLFDHAAEEYEHAKKLIIFLNENNVPVQLTSISAPEHKFEGLTQIFQKAYEHEQHISESINNIVDHAIKSKDHATFNFLQWYVAEQHEEEVLFKDILDKIELIGNENHGLYLADQYVKGIAKSRKS

SEQ ID NO: 13978 - protein, 1315 aa, Artificial Sequence
  SARS-CoV-2/Greece/16/2020__EPI_ISL_418265 spike protein (1-1147)(N914C_S1123C) Ferritin construct
MFVFLVLLPLVSSQCVNLTTRTQLPPAYTNSFTRGVYYPDKVFRSSVLHSTQDLFLPFFSNVTWFHAIHVSGTNGTKRFDNPVLPFNDGVYFASTEKSNIIRGWIFGTTLDSKTQSLLIVNNATNVVIKVCEFQFCNDPFLGVYYHKNNKSWMESEFRVYSSANNCTFEYVSQPFLMDLEGKQGNFKNLREFVFKNVDGYFKIYSKHTPINLVRDLPQGFSALEPLVDLPIGINITRFQTLLALHRSYLTPGDSSSGWTAGAAAYYVGYLQPRTFLLKYNENGTITDAVDCALDPLSETKCTLKSFTVEKGIYQTSNFRVQPTESIVRFPNITNLCPFGEVFNATRFASVYAWNRKRISNCVADYSVLYNSASFSTFKCYGVSPTKLNDLCFTNVYADSFVIRGDEVRQIAPGQTGKIADYNYKLPDDFTGCVIAWNSNNLDSKVGGNYNYLYRLFRKSNLKPFERDISTEIYQAGSTPCNGVEGFNCYFPLQSYGFQPTNGVGYQPYRVVVLSFELLHAPATVCGPKKSTNLVKNKCVNFNFNGLTGTGVLTESNKKFLPFQQFGRDIADTTDAVRDPQTLEILDITPCSFGGVSVITPGTNTSNQVAVLYQDVNCTEVPVAIHADQLTPTWRVYSTGSNVFQTRAGCLIGAEHVNNSYECDIPIGAGICASYQTQTNSPRRARSVASQSIIAYTMSLGAENSVAYSNNSIAIPTNFTISVTTEILPVSMTKTSVDCTMYICGDSTECSNLLLQYGSFCTQLNRALTGIAVEQDKNTQEVFAQVKQIYKTPPIKDFGGFNFSQILPDPSKPSKRSFIEDLLFNKVTLADAGFIKQYGDCLGDIAARDLICAQKFNGLTVLPPLLTDEMIAQYTSALLAGTITSGWTFGAGAALQIPFAMQMAYRFNGIGVTQCVLYENQKLIANQFNSAIGKIQDSLSSTASALGKLQDVVNQNAQALNTLVKQLSSNFGAISSVLNDILSRLDKVEAEVQIDRLITGRLQSLQTYVTQQLIRAAEIRASANLAATKMSECVLGQSKRVDFCGKGYHLMSFPQSAPHGVVFLHVTYVPAQEKNFTTAPAICHDGKAHFPREGVFVSNGTHWFVTQRNFYEPQIITTDNTFVCGNCDVVIGIVNNTVYDPLQPELDSGGGGSDIIKLLNEQVNKEMQSSNLYMSMSSWCYTHSLDGAGLFLFDHAAEEYEHAKKLIIFLNENNVPVQLTSISAPEHKFEGLTQIFQKAYEHEQHISESINNIVDHAIKSKDHATFNFLQWYVAEQHEEEVLFKDILDKIELIGNENHGLYLADQYVKGIAKSRKS

SEQ ID NO: 13979 - protein, 1315 aa, Artificial Sequence
  SARS-CoV-2/Iceland/319/2020__EPI_ISL_417648 spike protein (1-1147)(N914C_S1123C) Ferritin construct
MFVFLVLLPLVSSQCVNLTTRTQLPPAYTNSFTRGVYYPDKVFRSSVLHSTQDLFLPFFSNVTWFHAIHVSGTNGTKRFDNPVLPFNDGVYFASTEKSNIIRGWIFGTTLDSKTQSLLIVNNATNVVIKVCEFQFCNDPFLGVYYHKNNKSWMESEFRVYSSANNCTFEYVSQPFLIDLEGKQGNFKNLREFVFKNIDGYFKIYSKHTPINLVRDLPQGFSALEPLVDLPIGINITRFQTLLALHRSYLTPGDSSSGWTAGAAAYYVGYLQPRTFLLKYNENGTITDAVDCALDPLSETKCTLKSFTVEKGIYQTSNFRVQPTESIVRFPNITNLCPFGEVFNATRFASVYAWNRKRISNCVADYSVLYNSASFSTFKCYGVSPTKLNDLCFTNVYADSFVIRGDEVRQIAPGQTGKIADYNYKLPDDFTGCVIAWNSNNLDSKVGGNYNYLYRLFRKSNLKPFERDISTEIYQAGSTPCNGVEGFNCYFPLQSYGFQPTNGVGYQPYRVVVLSFELLHAPATVCGPKKSTNLVKNKCVNFNFNGLTGTGVLTESNKKFLPFQQFGRDIADTTDAVRDPQTLEILDITPCSFGGVSVITPGTNTSNQVAVLYQGVNCTEVPVAIHADQLTPTWRVYSTGSNVFQTRAGCLIGAEHVNNSYECDIPIGAGICASYQTQTNSPRRARSVASQSIIAYTMSLGAENSVAYSNNSIAIPTNFTISVTTEILPVSMTKTSVDCTMYICGDSTECSNLLLQYGSFCTQLNRALTGIAVEQDKNTQEVFAQVKQIYKTPPIKDFGGFNFSQILPDPSKPSKRSFIEDLLFNKVTLADAGFIKQYGDCLGDIAARDLICAQKFNGLTVLPPLLTDEMIAQYTSALLAGTITSGWTFGAGAALQIPFAMQMAYRFNGIGVTQCVLYENQKLIANQFNSAIGKIQDSLSSTASALGKLQDVVNQNAQALNTLVKQLSSNFGAISSVLNDILSRLDKVEAEVQIDRLITGRLQSLQTYVTQQLIRAAEIRASANLAATKMSECVLGQSKRVDFCGKGYHLMSFPQSAPHGVVFLHVTYVPAQEKNFTTAPAICHDGKAHFPREGVFVSNGTHWFVTQRNFYEPQIITTDNTFVCGNCDVVIGIVNNTVYDPLQPELDSGGGGSDIIKLLNEQVNKEMQSSNLYMSMSSWCYTHSLDGAGLFLFDHAAEEYEHAKKLIIFLNENNVPVQLTSISAPEHKFEGLTQIFQKAYEHEQHISESINNIVDHAIKSKDHATFNFLQWYVAEQHEEEVLFKDILDKIELIGNENHGLYLADQYVKGIAKSRKS

SEQ ID NO: 13980 - protein, 1315 aa, Artificial Sequence
  SARS-CoV-2/Congo/94/2020__EPI_ISL_417947 spike protein (1-1147)(N914C_S1123C) Ferritin construct
MFVFLVLLPLVSSQCVNLTTRTQLPPAYTNSFTRGVYYPDKVFRSSVLHSTQDLFLPFFSNVTWFHAIHVSGTNGTKRFDNPVLPFNDGVYFASTEKSNIIRGWIFGTTLDSKTQSLLIVNNATNVVIKVCEFQFCNDPFLGVYYHKNNKSWMESEFRVYSSANNCTFEYVSQPFLMDLEGKQGNFKNLREFVFKNIDGYFKIYSKHTPINLVRDLPQGFSALEPLVDLPIGINITRFQTLLALHRSYLTPGDSSSGWTAGAAAYYVGYLQPRTFLLKYNENGTITDAVDCALDPLSETKCTLKSFTVEKGIYQTSNFRVQPTESIVRFPNITNLCPFGEVFNATRFASVYAWNRKRISNCVADYSVLYNSASFSTFKCYGVSPTKLNDLCFTNVYADSFVIRGDEVRQIAPGQTGKIADYNYKLPDDFTGCVIAWNSNNLDSKVGGNYNYLYRLFRKSNLKPFERDISTEIYQAGSTPCNGVEGFNCYFPLQSYGFQPTNGVGYQPYRVVVLSFELLHAPATVCGPKKSTNLVKNKCVNFNFNGLTGTGVLTESNKKFLPFQQFGRDIADTTDAVRDPQTLEILDITPCSFGGVSVITPGTNTSNQVAVLYQGVNCTEVPVAIHADQLTPTWRVYSTGSNVFQTRAGCLIGAEHVNNSYECDIPIGAGICASYQTQTNSPRRARSVASQSIIAYTMSLGAENSVAYSNNSIAIPTNFTISVTTEILPVSMTKTSVDCTMYICGDSTECSNLLLQYGSFCTQLNRALTGIAVEQDKNTQEVFAQVKQIYKTPPIKDFGGFNFSQILPDPSKPSKRSFIEDILFNKVTLADAGFIKQYGDCLGDIAARDLICAQKFNGLTVLPPLLTDEMIAQYTSALLAGTITSGWTFGAGAALQIPFAMQMAYRFNGIGVTQCVLYENQKLIANQFNSAIGKIQDSLSSTASALGKLQDVVNQNAQALNTLVKQLSSNFGAISSVLNDILSRLDKVEAEVQIDRLITGRLQSLQTYVTQQLIRAAEIRASANLAATKMSECVLGQSKRVDFCGKGYHLMSFPQSAPHGVVFLHVTYVPAQEKNFTTAPAICHDGKAHFPREGVFVSNGTHWFVTQRNFYEPQIITTDNTFVCGNCDVVIGIVNNTVYDPLQPELDSGGGGSDIIKLLNEQVNKEMQSSNLYMSMSSWCYTHSLDGAGLFLFDHAAEEYEHAKKLIIFLNENNVPVQLTSISAPEHKFEGLTQIFQKAYEHEQHISESINNIVDHAIKSKDHATFNFLQWYVAEQHEEEVLFKDILDKIELIGNENHGLYLADQYVKGIAKSRKS

SEQ ID NO: 13981 - protein, 1315 aa, Artificial Sequence
  SARS-CoV-2/Congo/158/2020__EPI_ISL_417950 spike protein (1-1147)(N914C_S1123C) Ferritin construct
MFVFLVLLPLVSSQCVNLTTRTQLPPAYTNSFTRGVYYPDKVFRSSVLHSTQDLFLPFFSNVTWFHAIHVSGTNGTKRFDNPVLPFNDGVYFASTEKSNIIRGWIFGTTLDSKTQSLLIVNNATNVVIKVCEFQFCNDPFLGVYYHKNNKSWMESEFRVYSSANNCTFEYVSQPFLMDLEGKQGNFKNLREFVFKNIDGYFKIYSKHTPINLVRDLPQGFSALEPLVDLPIGINITRFQTLLALHRSYLTPGDSSSGWTAGAAAYYVGYLQPRTFLLKYNENGTITDAVDCALDPLSETKCTLKSFTVEKGIYQTSNFRVQPTESIVRFPNITNLCPFGEVFNATRFASVYAWNRKRISNCVADYSVLYNSASFSTFKCYGVSPTKLNDLCFTNVYADSFVIRGDEVRQIAPGQTGKIADYNYKLPDDFTGCVIAWNSNNLDSKVGGNYNYLYRLFRKSNLKPFERDISTEIYQAGSTPCNGVEGFNCYFPLQSYGFQPTNGVGYQPYRVVVLSFELLHAPATVCGPKKSTNLVKNKCVNFNFNGLTGTGVLTESNKKFLPFQQFGRDIADTTDAVRDPQTLEILDITPCSFGGVSVITPGTNTSNQVAVLYQDVNCTEVPVAIHADQLTPTWRVYSTGSNVFQTRAGCLIGAEHVNNSYECDIPIGAGICASYQTQTNSPRRARSVASQSIIAYTMSLGAENSVAYSNNSIAIPTNFTISVTTEILPVSMTKTSVDCTMYICGDSTECSNLLLQYGSFCTQLNRALTGIAVEQDKNTQEVFAQVKQIYKTPPIKDFGGFNFSQILPDPSKPSKRSFIEDLLFNKVTLADAGFIKQYGDCLGDIAARDLICAQKFNGLTVLPPLLTDEMIAQYTSALLAGTITSGWTFGAGAALQIPFAMQMAYRFNGIGVTQCVLYENQKLIANQFNSAIGKIQDSLSSTASALGKLQDVVNQNAQALNTLVKQLSSNFGAISSVLNDILSRLDKVEAEVQIDRLITGRLQSLQTYVTQQLIRAAEIRASANLAATKMSECVLGQSKRVDFCGKGYHLMSFPQSAPHGVVFLHVTYVPAQEKNFTTAPAICHDGKAHFPREGVFVSNGTHWFVTQRNFYEPQIITTDNTFLCGNCDVVIGIVNNTVYDPLQPELDSGGGGSDIIKLLNEQVNKEMQSSNLYMSMSSWCYTHSLDGAGLFLFDHAAEEYEHAKKLIIFLNENNVPVQLTSISAPEHKFEGLTQIFQKAYEHEQHISESINNIVDHAIKSKDHATFNFLQWYVAEQHEEEVLFKDILDKIELIGNENHGLYLADQYVKGIAKSRKS

SEQ ID NO: 13982 - protein, 1315 aa, Artificial Sequence
  SARS-CoV-2/USA/UT-00034/2020__EPI_ISL_417977 spike protein (1-1147)(N914C_S1123C) Ferritin construct
MFVFLVLLPLVSSQCVNLTTRTQLPPAYTNSFTRGVYYPDKVFRSSVLHSTQDLFLPFFSNVTWFHAIHVSGTNGTKRFDNPVLPFNDGVYFASTEKSNIIRGWIFGTTLDSKTQSLLIVNNATNVVIKVCEFQFCNDPFLGVYYYKNNKSWMESEFRVYSSANNCTFEYVSQPFLMDLEGKQGNFKNLREFVFKNIDGYFKIYSKHTPINLVRDLPQGFSALEPLVDLPIGINITRFQTLLALHRSYLTPGDSSSGWTAGAAAYYVGYLQPRTFLLKYNENGTITDAVDCALDPLSETKCTLKSFTVEKGIYQTSNFRVQPTESIVRFPNITNLCPFGEVFNATRFASVYAWNRKRISNCVADYSVLYNSASFSTFKCYGVSPTKLNDLCFTNVYADSFVIRGDEVRQIAPGQTGKIADYNYKLPDDFTGCVIAWNSNNLDSKVGGNYNYLYRLFRKSNLKPFERDISTEIYQAGSTPCNGVEGFNCYFPLQSYGFQPTNGVGYQPYRVVVLSFELLHAPATVCGPKKSTNLVKNKCVNFNFNGLTGTGVLTESNKKFLPFQQFGRDIADTTDAVRDPQTLEILDITPCSFGGVSVITPGTNTSNQVAVLYQGVNCTEVPVAIHADQLTPTWRVYSTGSNVFQTRAGCLIGAEHVNNSYECDIPIGAGICASYQTQTNSPRRARSVASQSIIAYTMSLGAENSVAYSNNSIAIPTNFTISVTTEILPVSMTKTSVDCTMYICGDSTECSNLLLQYGSFCTQLNRALTGIAVEQDKNTQEVFAQVKQIYKTPPIKDFGGFNFSQILPDPSKPSKRSFIEDLLFNKVTLADAGFIKQYGDCLGDIAARDLICAQKFNGLTVLPPLLTDEMIAQYTSALLAGTITSGWTFGAGAALQIPFAMQMAYRFNGIGVTQCVLYENQKLIANQFNSAIGKIQDSLSSTASALGKLQDVVNQNAQALNTLVKQLSSNFGAISSVLNDILSRLDKVEAEVQIDRLITGRLQSLQTYVTQQLIRAAEIRASANLAATKMSECVLGQSKRVDFCGKGYHLMSFPQSAPHGVVFLHVTYVPAQEKNFTTAPAICHDGKAHFPREGVFVSNGTHWFVTQRNFYEPQIITTDNTFVCGNCDVVIGIVNNTVYDPLQPELDSGGGGSDIIKLLNEQVNKEMQSSNLYMSMSSWCYTHSLDGAGLFLFDHAAEEYEHAKKLIIFLNENNVPVQLTSISAPEHKFEGLTQIFQKAYEHEQHISESINNIVDHAIKSKDHATFNFLQWYVAEQHEEEVLFKDILDKIELIGNENHGLYLADQYVKGIAKSRKS

SEQ ID NO: 13983 - protein, 1315 aa, Artificial Sequence
  SARS-CoV-2/USA/UT-00033/2020__EPI_ISL_417976 spike protein (1-1147)(N914C_S1123C) Ferritin construct
MFVFLVLLPLVSSQCVNLTTRTQLPPAYTNSFTRGVYYPDKVFRSSVLHSTQDLFLPFFSNVTWFHAIHVSGTNGTKRFDNPVLPFNDGVYFASTEKSNIIRGWIFGTTLDSKTQSLLIVNNATNVVIKVCEFQFCNDPFLGVYYHKNNKSWMESEFRVYSSANNCTFEYVSQPFLMDLEGKQGNFKNLREFVFKNIDGYFKIYSKHTPINLVRDLPQGFSALEPLVDLPIGINITRFQTLLALHRSYLTPGDSSSGLTAGAAAYYVGYLQPRTFLLKYNENGTITDAVDCALDPLSETKCTLKSFTVEKGIYQTSNFRVQPTESIVRFPNITNLCPFGEVFNATRFASVYAWNRKRISNCVADYSVLYNSASFSTFKCYGVSPTKLNDLCFTNVYADSFVIRGDEVRQIAPGQTGKIADYNYKLPDDFTGCVIAWNSNNLDSKVGGNYNYLYRLFRKSNLKPFERDISTEIYQAGSTPCNGVEGFNCYFPLQSYGFQPTNGVGYQPYRVVVLSFELLHAPATVCGPKKSTNLVKNKCVNFNFNGLTGTGVLTESNKKFLPFQQFGRDIADTTDAVRDPQTLEILDITPCSFGGVSVITPGTNTSNQVAVLYQGVNCTEVPVAIHADQLTPTWRVYSTGSNVFQTRAGCLIGAEHVNNSYECDIPIGAGICASYQTQTNSPRRARSVASQSIIAYTMSLGAENSVAYSNNSIAIPTNFTISVTTEILPVSMTKTSVDCTMYICGDSTECSNLLLQYGSFCTQLNRALTGIAVEQDKNTQEVFAQVKQIYKTPPIKDFGGFNFSQILPDPSKPSKRSFIEDLLFNKVTLADAGFIKQYGDCLGDIAARDLICAQKFNGLTVLPPLLTDEMIAQYTSALLAGTITSGWTFGAGAALQIPFAMQMAYRFNGIGVTQCVLYENQKLIANQFNSAIGKIQDSLSSTASALGKLQDVVNQNAQALNTLVKQLSSNFGAISSVLNDILSRLDKVEAEVQIDRLITGRLQSLQTYVTQQLIRAAEIRASANLAATKMSECVLGQSKRVDFCGKGYHLMSFPQSAPHGVVFLHVTYVPAQEKNFTTAPAICHDGKAHFPREGVFVSNGTHWFVTQRNFYEPQIITTDNTFVCGNCDVVIGIVNNTVYDPLQPELDSGGGGSDIIKLLNEQVNKEMQSSNLYMSMSSWCYTHSLDGAGLFLFDHAAEEYEHAKKLIIFLNENNVPVQLTSISAPEHKFEGLTQIFQKAYEHEQHISESINNIVDHAIKSKDHATFNFLQWYVAEQHEEEVLFKDILDKIELIGNENHGLYLADQYVKGIAKSRKS

SEQ ID NO: 13984 - protein, 1315 aa, Artificial Sequence
  SARS-CoV-2/USA/WI-13/2020__EPI_ISL_417516 spike protein (1-1147)(N914C_S1123C) Ferritin construct
MFVFLVLLPLVSSQCVNLTTRTQLPPAYTNSFTRGVYYPDKVFRSSVLHSTQDLFLPFFSNVTWFHAIHVSGTNGTKRFDNPVLPFNDGVYFASTEKSNIIRGWIFGTTLDSKTQSLLIVNNATNVVIKVCEFQFCNDPFLGVYYHKNNKSWMESEFRVYSSANNCTFEYVSQPFLMDLEGKQGNFKNLREFVFKNIDGYFKIYSKHTPINLVRDLPQGFSALEPLVDLPIGINITRFQTLLALHRSYLTPGDSSSGWTAGAAAYYVGYLQPRTFLLKYNENGTITDAVDCALDPLSETKCTLKSFTVEKGIYQTSNFRVLPTESIVRFPNITNLCPFGEVFNATRFASVYAWNRKRISNCVADYSVLYNSASFSTFKCYGVSPTKLNDLCFTNVYADSFVIRGDEVRQIAPGQTGKIADYNYKLPDDFTGCVIAWNSNNLDSKVGGNYNYLYRLFRKSNLKPFERDISTEIYQAGSTPCNGVEGFNCYFPLQSYGFQPTNGVGYQPYRVVVLSFELLHAPATVCGPKKSTNLVKNKCVNFNFNGLTGTGVLTESNKKFLPFQQFGRDIADTTDAVRDPQTLEILDITPCSFGGVSVITPGTNTSNQVAVLYQGVNCTEVPVAIHADQLTPTWRVYSTGSNVFQTRAGCLIGAEHVNNSYECDIPIGAGICASYQTQTNSPRRARSVASQSIIAYTMSLGAENSVAYSNNSIAIPTNFTISVTTEILPVSMTKTSVDCTMYICGDSTECSNLLLQYGSFCTQLNRALTGIAVEQDKNTQEVFAQVKQIYKTPPIKDFGGFNFSQILPDPSKPSKRSFIEDLLFNKVTLADAGFIKQYGDCLGDIAARDLICAQKFNGLTVLPPLLTDEMIAQYTSALLAGTITSGWTFGAGAALQIPFAMQMAYRFNGIGVTQCVLYENQKLIANQFNSAIGKIQDSLSSTASALGKLQDVVNQNAQALNTLVKQLSSNFGAISSVLNDILSRLDKVEAEVQIDRLITGRLQSLQTYVTQQLIRAAEIRASANLAATKMSECVLGQSKRVDFCGKGYHLMSFPQSAPHGVVFLHVTYVPAQEKNFTTAPAICHDGKAHFPREGVFVSNGTHWFVTQRNFYEPQIITTDNTFVCGNCDVVIGIVNNTVYDPLQPELDSGGGGSDIIKLLNEQVNKEMQSSNLYMSMSSWCYTHSLDGAGLFLFDHAAEEYEHAKKLIIFLNENNVPVQLTSISAPEHKFEGLTQIFQKAYEHEQHISESINNIVDHAIKSKDHATFNFLQWYVAEQHEEEVLFKDILDKIELIGNENHGLYLADQYVKGIAKSRKS

SEQ ID NO: 13985 - protein, 1314 aa, Artificial Sequence
  SARS-CoV-2/India/1-27/2020__EPI_ISL_413522 spike protein (1-1146)(N913C_S1122C) Ferritin construct
MFVFLVLLPLVSSQCVNLTTRTQLPPAYTNSFTRGVYYPDKVFRSSVLHSTQDLFLPFFSNVTWFHAIHVSGTNGTKRFDNPVLPFNDGVYFASTEKSNIIRGWIFGTTLDSKTQSLLIVNNATNVVIKVCEFQFCNDPFLGVYHKNNKSWMESEFRVYSSANNCTFEYVSQPFLMDLEGKQGNFKNLREFVFKNIDGYFKIYSKHTPINLVRDLPQGFSALEPLVDLPIGINITRFQTLLALHRSYLTPGDSSSGWTAGAAAYYVGYLQPRTFLLKYNENGTITDAVDCALDPLSETKCTLKSFTVEKGIYQTSNFRVQPTESIVRFPNITNLCPFGEVFNATRFASVYAWNRKRISNCVADYSVLYNSASFSTFKCYGVSPTKLNDLCFTNVYADSFVIRGDEVIQIAPGQTGKIADYNYKLPDDFTGCVIAWNSNNLDSKVGGNYNYLYRLFRKSNLKPFERDISTEIYQAGSTPCNGVEGFNCYFPLQSYGFQPTNGVGYQPYRVVVLSFELLHAPATVCGPKKSTNLVKNKCVNFNFNGLTGTGVLTESNKKFLPFQQFGRDIADTTDAVRDPQTLEILDITPCSFGGVSVITPGTNTSNQVAVLYQDVNCTEVPVAIHADQLTPTWRVYSTGSNVFQTRAGCLIGAEHVNNSYECDIPIGAGICASYQTQTNSPRRARSVASQSIIAYTMSLGAENSVAYSNNSIAIPTNFTISVTTEILPVSMTKTSVDCTMYICGDSTECSNLLLQYGSFCTQLNRALTGIAVEQDKNTQEVFAQVKQIYKTPPIKDFGGFNFSQILPDPSKPSKRSFIEDLLFNKVTLADAGFIKQYGDCLGDIAARDLICAQKFNGLTVLPPLLTDEMIAQYTSALLAGTITSGWTFGAGAALQIPFAMQMAYRFNGIGVTQCVLYENQKLIANQFNSAIGKIQDSLSSTASALGKLQDVVNQNAQALNTLVKQLSSNFGAISSVLNDILSRLDKVEAEVQIDRLITGRLQSLQTYVTQQLIRAAEIRASANLAATKMSECVLGQSKRVDFCGKGYHLMSFPQSAPHGVVFLHVTYVPAQEKNFTTAPAICHDGKAHFPREGVFVSNGTHWFVTQRNFYEPQIITTDNTFVCGNCDVVIGIVNNTVYDPLQPELDSGGGGSDIIKLLNEQVNKEMQSSNLYMSMSSWCYTHSLDGAGLFLFDHAAEEYEHAKKLIIFLNENNVPVQLTSISAPEHKFEGLTQIFQKAYEHEQHISESINNIVDHAIKSKDHATFNFLQWYVAEQHEEEVLFKDILDKIELIGNENHGLYLADQYVKGIAKSRKS

SEQ ID NO: 13986 - protein, 1309 aa, Artificial Sequence
  SARS-CoV-2/pangolin/Guangxi/P4L/2017__EPI_ISL_410538 spike protein (1-1141)(N908C_S1117C) Ferritin construct
MFVFLFVLPLVSSQCVNLTTRTGIPPGYTNSSTRGVYYPDKVFRSSILHLTQDLFLPFFSNVTWFNTINYQGGFKKFDNPVLPFNDGVYFASTEKSNIIRGWIFGTTLDARTQSLLIVNNATNVVIKVCEFQFCTDPFLGVYYHNNNKTWVENEFRVYSSANNCTFEYISQPFLMDLEGKQGNFKNLREFVFKNVDGYFKIYSKHTPIDLVRDLPRGFAALEPLVDLPIGINITRFQTLLALHRSYLTPGNLESGWTTGAAAYYVGYLQQRTFLLSYNQNGTITDAVDCSLDPLSETKCTLKSLTVEKGIYQTSNFRVQPTISIVRFPNITNLCPFGEVFNASKFASVYAWNRKRISNCVADYSVLYNSTSFSTFKCYGVSPTKLNDLCFTNVYADSFVVKGDEVRQIAPGQTGVIADYNYKLPDDFTGCVIAWNSVKQDALTGGNYGYLYRLFRKSKLKPFERDISTEIYQAGSTPCNGQVGLNCYYPLERYGFHPTTGVNYQPFRVVVLSFELLNGPATVCGPKLSTTLVKDKCVNFNFNGLTGTGVLTTSKKQFLPFQQFGRDISDTTDAVRDPQTLEILDITPCSFGGVSVITPGTNTSNQVAVLYQDVNCTEVPMAIHAEQLTPAWRVYSAGANVFQTRAGCLVGAEHVNNSYECDIPVGAGICASYHSMSSLRSVNQRSIIAYTMSLGAENSVAYSNNSIAIPTNFTISVTTEILPVSMTKTSVDCTMYICGDSIECSNLLLQYGSFCTQLNRALTGIAVEQDKNTQEVFAQVKQIYKTPPIKDFGGFNFSQILPDPSKPSKRSFIEDLLFNKVTLADAGFIKQYGDCLGDIAARDLICAQKFNGLTVLPPLLTDEMIAQYTSALLAGTITSGWTFGAGAALQIPFAMQMAYRFNGIGVTQCVLYENQKLIANQFNSAIGKIQDSLSSTASALGKLQDVVNQNAQALNTLVKQLSSNFGAISSVLNDILSRLDKVEAEVQIDRLITGRLQSLQTYVTQQLIRAAEIRASANLAATKMSECVLGQSKRVDFCGKGYHLMSFPQSAPHGVVFLHVTYVPAQEKNFTTAPAICHEGKAHFPREGVFVSNGTHWFITQRNFYEPQIITTDNTFVCGSCDVVIGIVNNTVYDPLQPELDSGGGGSDIIKLLNEQVNKEMQSSNLYMSMSSWCYTHSLDGAGLFLFDHAAEEYEHAKKLIIFLNENNVPVQLTSISAPEHKFEGLTQIFQKAYEHEQHISESINNIVDHAIKSKDHATFNFLQWYVAEQHEEEVLFKDILDKIELIGNENHGLYLADQYVKGIAKSRKS

SEQ ID NO: 13987 - protein, 1309 aa, Artificial Sequence
  SARS-CoV-2/pangolin/Guangxi/P5L/2017__EPI_ISL_410540 spike protein (1-1141)(N908C_S1117C) Ferritin construct
MFVFLFVLPLVSSQCVNLTTRTGIPPGYTNSSTRGVYYPDKVFRSSILHLTQDLFLPFFSNVTWFNTINYQGGFKKFDNPVLPFNDGVYFASTEKSNIIRGWIFGTTLDARTQSLLIVNNATNVVIKVCEFQFCTDPFLGVYYHNNNKTWVENEFRVYSSANNCTFEYISQPFLMDLEGKQGNFKNLREFVFKNVDGYFKIYSKHTPIDLVRDLPRGFAALEPLVDLPIGINITRFQTLLALHRSYLTPGKLESGWTTGAAAYYVGYLQQRTFLLSYNQNGTITDAVDCSLDPLSETKCTLKSLTVEKGIYQTSNFRVQPTISIVRFPNITNLCPFGEVFNASKFASVYAWNRKRISNCVADYSVLYNSTSFSTFKCYGVSPTKLNDLCFTNVYADSFVVKGDEVRQIAPGQTGVIADYNYKLPDDFTGCVIAWNSVKQDALTGGNYGYLYRLFRKSKLKPFERDISTEIYQAGSTPCNGQVGLNCYYPLERYGFHPTTGVNYQPFRVVVLSFELLNGPATVCGPKLSTTLVKDKCVNFNFNGLTGTGVLTTSKKQFLPFQQFGRDISDTTDAVRDPQTLEILDITPCSFGGVSVITPGTNTSNQVAVLYQDVNCTEVPMAIHAEQLTPAWRVYSAGANVFQTRAGCLVGAEHVNNSYECDIPVGAGICASYHSMSSFRSVNQRSIIAYTMSLGAENSVAYSNNSIAIPTNFTISVTTEILPVSMTKTSVDCTMYICGDSIECSNLLLQYGSFCTQLNRALTGIAVEQDKNTQEVFAQVKQIYKTPPIKDFGGFNFSQILPDPSKPSKRSFIEDLLFNKVTLADAGFIKQYGDCLGDIAARDLICAQKFNGLTVLPPLLTDEMIAQYTSALLAGTITSGWTFGAGAALQIPFAMQMAYRFNGIGVTQCVLYENQKLIANQFNSAIGKIQDSLSSTASALGKLQDVVNQNAQALNTLVKQLSSNFGAISSVLNDILSRLDKVEAEVQIDRLITGRLQSLQTYVTQQLIRAAEIRASANLAATKMSECVLGQSKRVDFCGKGYHLMSFPQSAPHGVVFLHVTYVPAQEKNFTTAPAICHEGKAHFPREGVFVSNGTHWFITQRNFYEPQIITTDNTFVCGSCDVVIGIVNNTVYDPLQPELDSGGGGSDIIKLLNEQVNKEMQSSNLYMSMSSWCYTHSLDGAGLFLFDHAAEEYEHAKKLIIFLNENNVPVQLTSISAPEHKFEGLTQIFQKAYEHEQHISESINNIVDHAIKSKDHATFNFLQWYVAEQHEEEVLFKDILDKIELIGNENHGLYLADQYVKGIAKSRKS

SEQ ID NO: 13988 - protein, 1309 aa, Artificial Sequence
  SARS-CoV-2/pangolin/Guangxi/P5E/2017__EPI_ISL_410541 spike protein (1-1141)(N908C_S1117C) Ferritin construct
MFVFLFVLPLVSSQCVNLTTRTGIPPGYTNSSTRGVYYPDKVFRSSILHLTQDLFLPFFSNVTWFNTITYQGGSKKFDNPVLPFNDGVYFASTEKSNIIRGWIFGTTLDARTQSLLIVNNATNVVIKVCEFQFCTDPFLGVYYHNNNKTWVENEFRVYSSANNCTFEYISQPFLMDLEGKQGNFKNLREFVFKNVDGYFKIYSKHTPIDLVRDLPRGFAALEPLVDLPIGINITRFQTLLALHRSYLTPGKLESGWTTGAAAYYVGYLQQRTFLLSYNQNGTITDAVDCSLDPLSETKCTLKSLTVEKGIYQTSNFRVQPTISIVRFPNITNLCPFGEVFNASKFASVYAWNRKRISNCVADYSVLYNSTSFSTFKCYGVSPTKLNDLCFTNVYADSFVVKGDEVRQIAPGQTGVIADYNYKLPDDFTGCVIAWNSVKQDALTGDNYGYLYRLFRKSKLKPFERDISTEIYQAGSTPCNGQVGLNCYYPLERYGFHPTTGVNYQPFRVVVLSFELLNGPATVCGPKLSTTLVKDKCVNFNFNGLTGTGVLTTSKKQFLPFQQFGRDISDTTDAVRDPQTLEILDITPCSFGGVSVITPGTNTSNQVAVLYQDVNCTEVPMAIHAEQLTPAWRVYSAGANVFQTRAGCLVGAEHVNNSYECDIPVGAGICASYHSMSSFRSVNQRSIIAYTMSLGAENSVAYSNNSIAIPTNFTISVTTEILPVSMTKTSVDCTMYICGDSIECSNLLLQYGSFCTQLNRALTGIAVEQDKNTQEVFAQVKQIYKTPPIKDFGGFNFSQILPDPSKPSKRSFIEDLLFNKVTLADAGFIKQYGDCLGDIAARDLICAQKFNGLTVLPPLLTDEMIAQYTSALLAGTITSGWTFGAGAALQIPFAMQMAYRFNGIGVTQCVLYENQKLIANQFNSAIGKIQDSLSSTASALGKLQDVVNQNAQALNTLVKQLSSNFGAISSVLNDILSRLDKVEAEVQIDRLITGRLQSLQTYVTQQLIRAAEIRASANLAATKMSECVLGQSKRVDFCGKGYHLMSFPQSAPHGVVFLHVTYVPAQEKNFTTAPAICHEGKAHFPREGVFVSNGTHWFITQRNFYEPQIITTDNTFVCGSCDVVIGIVNNTVYDPLQPELDSGGGGSDIIKLLNEQVNKEMQSSNLYMSMSSWCYTHSLDGAGLFLFDHAAEEYEHAKKLIIFLNENNVPVQLTSISAPEHKFEGLTQIFQKAYEHEQHISESINNIVDHAIKSKDHATFNFLQWYVAEQHEEEVLFKDILDKIELIGNENHGLYLADQYVKGIAKSRKS

SEQ ID NO: 13989 - protein, 1307 aa, Artificial Sequence
  SARS-CoV-2/pangolin/Guangxi/P1E/2017__EPI_ISL_410539 spike protein (1-1139)(N906C_S1115C) Ferritin construct
MFVFLFVLPLVSSQCVNLTTRTGIQPGYTNSSTRGVYYPDKVFRSSILHLTQDLFLPFFSNVTWFNTINYQGGFKKFDNPVLPFNDGVYFASTEKSNIIRGWIFGTTLDARTQSLLIVNNATNVVIKVCEFQFCTDPFLGVYYHNNNKTWVENEFRVYSSANNCTFEYISQPFLMDLEGKQGNFKNLREFVFKNVDGYFKIYSKHTPIDLVRDLPRGFAALEPLVDLPIGINITRFQTLLALHRSYLTPGKLESGWTTGAAAYYVGYLQQRTFLLSYNQNGTITDAVDCSLDPLSETKCTLKSLTVEKGIYQTSNFRVQPTISIVRFPNITNLCPFGEVFNASKFASVYAWNRKRISNCVADYSVLYNSTSFSTFKCYGVSPTKLNDLCFTNVYADSFVVKGDEVRQIAPGQTGVIADYNYKLPDDFTGCVIAWNSVKQDALTGGNYLYRLFRKSKLKPFERDISTEIYQAGSTPCNGQVGLNCYYPLERYGFHPTTGVNYQPFRVVVLSFELLNGPATVCGPKLSTTLVKDKCVNFNFNGLTGTGVLTTSKKQFLPFQQFGRDISDTTDAVRDPQTLEILDITPCSFGGVSVITPGTNTSNQVAVLYQDVNCTEVPMAIHAEQLTPAWRVYSAGANVFQTRAGCLVGAEHVNNSYECDIPVGAGICASYHSMSSLRSVNQRSIIAYTMSLGAENSVAYSNNSIAIPTNFTISVTTEILPVSMTKTSVDCTMYICGDSIECSNLLLQYGSFCTQLNRALTGIAVEQDKNTQEVFAQVKQIYKTPPIKDFGGFNFSQILPDPSKPSKRSFIEDLLFNKVTLADAGFIKQYGDCLGDIAARDLICAQKFNGLTVLPPLLTDEMIAQYTSALLAGTITSGWTFGAGAALQIPFAMQMAYRFNGIGVTQCVLYENQKLIANQFNSAIGKIQDSLSSTASALGKLQDVVNQNAQALNTLVKQLSSNFGAISSVLNDILSRLDKVEAEVQIDRLITGRLQSLQTYVTQQLIRAAEIRASANLAATKMSECVLGQSKRVDFCGKGYHLMSFPQSAPHGVVFLHVTYVPAQEKNFTTAPAICHEGKAHFPREGVFVSNGTHWFITQRNFYEPQIITTDNTFVCGSCDVVIGIVNNTVYDPLQPELDSGGGGSDIIKLLNEQVNKEMQSSNLYMSMSSWCYTHSLDGAGLFLFDHAAEEYEHAKKLIIFLNENNVPVQLTSISAPEHKFEGLTQIFQKAYEHEQHISESINNIVDHAIKSKDHATFNFLQWYVAEQHEEEVLFKDILDKIELIGNENHGLYLADQYVKGIAKSRKS

SEQ ID NO: 13990 - protein, 1177 aa, Artificial Sequence
  SARS-CoV-2/Wuhan/WIV05/2019__EPI_ISL_402128 spike protein (1-1147)(N914C_S1123C) Foldon construct
MFVFLVLLPLVSSQCVNLTTRTQLPPAYTNSFTRGVYYPDKVFRSSVLHSTQDLFLPFFSNVTWFHAIHVSGTNGTKRFDNPVLPFNDGVYFASTEKSNIIRGWIFGTTLDSKTQSLLIVNNATNVVIKVCEFQFCNDPFLGVYYHKNNKSWMESEFRVYSSANNCTFEYVSQPFLMDLEGKQGNFKNLREFVFKNIDGYFKIYSKHTPINLVRDLPQGFSALEPLVDLPIGINITRFQTLLALHRSYLTPGDSSSGWTAGAAAYYVGYLQPRTFLLKYNENGTITDAVDCALDPLSETKCTLKSFTVEKGIYQTSNFRVQPTESIVRFPNITNLCPFGEVFNATRFASVYAWNRKRISNCVADYSVLYNSASFSTFKCYGVSPTKLNDLCFTNVYADSFVIRGDEVRQIAPGQTGKIADYNYKLPDDFTGCVIAWNSNNLDSKVGGNYNYLYRLFRKSNLKPFERDISTEIYQAGSTPCNGVEGFNCYFPLQSYGFQPTNGVGYQPYRVVVLSFELLHAPATVCGPKKSTNLVKNKCVNFNFNGLTGTGVLTESNKKFLPFQQFGRDIADTTDAVRDPQTLEILDITPCSFGGVSVITPGTNTSNQVAVLYQDVNCTEVPVAIHADQLTPTWRVYSTGSNVFQTRAGCLIGAEHVNNSYECDIPIGAGICASYQTQTNSPRRARSVASQSIIAYTMSLGAENSVAYSNNSIAIPTNFTISVTTEILPVSMTKTSVDCTMYICGDSTECSNLLLQYGSFCTQLNRALTGIAVEQDKNTQEVFAQVKQIYKTPPIKDFGGFNFSQILPDPSKPSKRSFIEDLLFNKVTLADAGFIKQYGDCLGDIAARDLICAQKFNGLTVLPPLLTDEMIAQYTSALLAGTITSGWTFGAGAALQIPFAMQMAYRFNGIGVTQCVLYENQKLIANQFNSAIGKIQDSLSSTASALGKLQDVVNQNAQALNTLVKQLSSNFGAISSVLNDILSRLDKVEAEVQIDRLITGRLQSLQTYVTQQLIRAAEIRASANLAATKMSECVLGQSKRVDFCGKGYHLMSFPQSAPHGVVFLHVTYVPAQEKNFTTAPAICHDGKAHFPREGVFVSNGTHWFVTQRNFYEPQIITTDNTFVCGNCDVVIGIVNNTVYDPLQPELDSGGSGYIPEAPRDGQAYVRKDGEWVLLSTFL

SEQ ID NO: 13991 - protein, 1173 aa, Artificial Sequence
  SARS-CoV-2/bat/Yunnan/RaTG13/2013__EPI_ISL_402131 spike protein (1-1143)(N910C_S1119C) Foldon construct
MFVFLVLLPLVSSQCVNLTTRTQLPPAYTNSSTRGVYYPDKVFRSSVLHLTQDLFLPFFSNVTWFHAIHVSGTNGIKRFDNPVLPFNDGVYFASTEKSNIIRGWIFGTTLDSKTQSLLIVNNATNVVIKVCEFQFCNDPFLGVYYHKNNKSWMESEFRVYSSANNCTFEYVSQPFLMDLEGKQGNFKNLREFVFKNIDGYFKIYSKHTPINLVRDLPPGFSALEPLVDLPIGINITRFQTLLALHRSYLTPGDSSSGWTAGAAAYYVGYLQPRTFLLKYNENGTITDAVDCALDPLSETKCTLKSFTVEKGIYQTSNFRVQPTDSIVRFPNITNLCPFGEVFNATTFASVYAWNRKRISNCVADYSVLYNSTSFSTFKCYGVSPTKLNDLCFTNVYADSFVITGDEVRQIAPGQTGKIADYNYKLPDDFTGCVIAWNSKHIDAKEGGNFNYLYRLFRKANLKPFERDISTEIYQAGSKPCNGQTGLNCYYPLYRYGFYPTDGVGHQPYRVVVLSFELLNAPATVCGPKKSTNLVKNKCVNFNFNGLTGTGVLTESNKKFLPFQQFGRDIADTTDAVRDPQTLEILDITPCSFGGVSVITPGTNASNQVAVLYQDVNCTEVPVAIHADQLTPTWRVYSTGSNVFQTRAGCLIGAEHVNNSYECDIPIGAGICASYQTQTNSRSVASQSIIAYTMSLGAENSVAYSNNSIAIPTNFTISVTTEILPVSMTKTSVDCTMYICGDSTECSNLLLQYGSFCTQLNRALTGIAVEQDKNTQEVFAQVKQIYKTPPIKDFGGFNFSQILPDPSKPSKRSFIEDLLFNKVTLADAGFIKQYGDCLGDIAARDLICAQKFNGLTVLPPLLTDEMIAQYTSALLAGTITSGWTFGAGAALQIPFAMQMAYRFNGIGVTQCVLYENQKLIANQFNSAIGKIQDSLSSTASALGKLQDVVNQNAQALNTLVKQLSSNFGAISSVLNDILSRLDKVEAEVQIDRLITGRLQSLQTYVTQQLIRAAEIRASANLAATKMSECVLGQSKRVDFCGKGYHLMSFPQSAPHGVVFLHVTYVPAQEKNFTTAPAICHDGKAHFPREGVFVSNGTHWFVTQRNFYEPQIITTDNTFVCGSCDVVIGIVNNTVYDPLQPELDSGGSGYIPEAPRDGQAYVRKDGEWVLLSTFL

SEQ ID NO: 13992 - protein, 1177 aa, Artificial Sequence
  SARS-CoV-2/Wuhan/HBCDC-HB-01/2019__EPI_ISL_402132 spike protein (1-1147)(N914C_S1123C) Foldon construct
MFVFLVLLPLVSSQCVNLTTRTQLPPAYTNSITRGVYYPDKVFRSSVLHSTQDLFLPFFSNVTWFHAIHVSGTNGTKRFDNPVLPFNDGVYFASTEKSNIIRGWIFGTTLDSKTQSLLIVNNATNVVIKVCEFQFCNDPFLGVYYHKNNKSWMESEFRVYSSANNCTFEYVSQPFLMDLEGKQGNFKNLREFVFKNIDGYFKIYSKHTPINLVRDLPQGFSALEPLVDLPIGINITRFQTLLALHRSYLTPGDSSSGWTAGAAAYYVGYLQPRTFLLKYNENGTITDAVDCALDPLSETKCTLKSFTVEKGIYQTSNFRVQPTESIVRFPNITNLCPFGEVFNATRFASVYAWNRKRISNCVADYSVLYNSASFSTFKCYGVSPTKLNDLCFTNVYADSFVIRGDEVRQIAPGQTGKIADYNYKLPDDFTGCVIAWNSNNLDSKVGGNYNYLYRLFRKSNLKPFERDISTEIYQAGSTPCNGVEGFNCYFPLQSYGFQPTNGVGYQPYRVVVLSFELLHAPATVCGPKKSTNLVKNKCVNFNFNGLTGTGVLTESNKKFLPFQQFGRDIADTTDAVRDPQTLEILDITPCSFGGVSVITPGTNTSNQVAVLYQDVNCTEVPVAIHADQLTPTWRVYSTGSNVFQTRAGCLIGAEHVNNSYECDIPIGAGICASYQTQTNSPRRARSVASQSIIAYTMSLGAENSVAYSNNSIAIPTNFTISVTTEILPVSMTKTSVDCTMYICGDSTECSNLLLQYGSFCTQLNRALTGIAVEQDKNTQEVFAQVKQIYKTPPIKDFGGFNFSQILPDPSKPSKRSFIEDLLFNKVTLADAGFIKQYGDCLGDIAARDLICAQKFNGLTVLPPLLTDEMIAQYTSALLAGTITSGWTFGAGAALQIPFAMQMAYRFNGIGVTQCVLYENQKLIANQFNSAIGKIQDSLSSTASALGKLQDVVNQNAQALNTLVKQLSSNFGAISSVLNDILSRLDKVEAEVQIDRLITGRLQSLQTYVTQQLIRAAEIRASANLAATKMSECVLGQSKRVDFCGKGYHLMSFPQSAPHGVVFLHVTYVPAQEKNFTTAPAICHDGKAHFPREGVFVSNGTHWFVTQRNFYEPQIITTDNTFVCGNCDVVIGIVNNTVYDPLQPELDSGGSGYIPEAPRDGQAYVRKDGEWVLLSTFL

SEQ ID NO: 13993 - protein, 1177 aa, Artificial Sequence
  SARS-CoV-2/Guangdong/20SF028/2020__EPI_ISL_403936 spike protein (1-1147)(N914C_S1123C) Foldon construct
MFVFLVLLPLVSSQCVNLTTRTQLPPAYTNSFTRGVYYPDKVFRSSVLYSTQDLFLPFFSNVTWFHAIHVSGTNGTKRFDNPVLPFNDGVYFASTEKSNIIRGWIFGTTLDSKTQSLLIVNNATNVVIKVCEFQFCNDPFLGVYYHKNNKSWMESEFRVYSSANNCTFEYVSQPFLMDLEGKQGNFKNLREFVFKNIDGYFKIYSKHTPINLVRDLPQGFSALEPLVDLPIGINITRFQTLLALHRSYLTPGDSSSGWTAGAAAYYVGYLQPRTFLLKYNENGTITDAVDCALDPLSETKCTLKSFTVEKGIYQTSNFRVQPTESIVRFPNITNLCPFGEVFNATRFASVYAWNRKRISNCVADYSVLYNSASFSTFKCYGVSPTKLNDLCFTNVYADSFVIRGDEVRQIAPGQTGKIADYNYKLPDDFTGCVIAWNSNNLDSKVGGNYNYLYRLFRKSNLKPFERDISTEIYQAGSTPCNGVEGFNCYFPLQSYGFQPTNGVGYQPYRVVVLSFELLHAPATVCGPKKSTNLVKNKCVNFNFNGLTGTGVLTESNKKFLPFQQFGRDIADTTDAVRDPQTLEILDITPCSFGGVSVITPGTNTSNQVAVLYQDVNCTEVPVAIHADQLTPTWRVYSTGSNVFQTRAGCLIGAEHVNNSYECDIPIGAGICASYQTQTNSPRRARSVASQSIIAYTMSLGAENSVAYSNNSIAIPTNFTISVTTEILPVSMTKTSVDCTMYICGDSTECSNLLLQYGSFCTQLNRALTGIAVEQDKNTQEVFAQVKQIYKTPPIKDFGGFNFSQILPDPSKPSKRSFIEDLLFNKVTLADAGFIKQYGDCLGDIAARDLICAQKFNGLTVLPPLLTDEMIAQYTSALLAGTITSGWTFGAGAALQIPFAMQMAYRFNGIGVTQCVLYENQKLIANQFNSAIGKIQDSLSSTASALGKLQDVVNQNAQALNTLVKQLSSNFGAISSVLNDILSRLDKVEAEVQIDRLITGRLQSLQTYVTQQLIRAAEIRASANLAATKMSECVLGQSKRVDFCGKGYHLMSFPQSAPHGVVFLHVTYVPAQEKNFTTAPAICHDGKAHFPREGVFVSNGTHWFVTQRNFYEPQIITTDNTFVCGNCDVVIGIVNNTVYDPLQPELDSGGSGYIPEAPRDGQAYVRKDGEWVLLSTFL

SEQ ID NO: 13994 - protein, 1177 aa, Artificial Sequence
  SARS-CoV-2/Shenzhen/SZTH-001/2020__EPI_ISL_406592 spike protein (1-1147)(N914C_S1123C) Foldon construct
MFVFLVLLPLVSSQCVNLTTRTQLPPAYTNSFTRGVYYPDKVFRSSVLHSTQDLFLPFFSNVTWFHAIHVSGTNGTKRFDNPVLPFNDGVYFASTEKSNIIRGWIFGTTLDSKTQSLLIVNNATNVVIKVCEFQFCNDPFLGVYYHKNNKSWMESEFRVYSSANNCTFEYVSQPFLMDLEGKQGNFKNLREFVFKNIDGYFKIYSKHTPINLVRDLPQGFSALEPLVDLPIGINITRFQTLLALHRSYLTPGDSSSGWTAGAAAYYVGYLQPRTFLLKYNENGTITDAVDCALDPLSETKCTLKSFTVEKGIYQTSNFRVQPTESIVRFPNITNLCPFGEVFNATRFASVYAWNRKRISNCVADYSVLYNSASFSTFKCYGVSPTKLNDLCFTNVYADSFVIRGDEVRQIAPGQTGKIADYNYKLPDDFTGCVIAWNSNNLDSKVGGNYNYLYRLFRKSNLKPFERDISTEIYQAGSTPCNGVEGFNCYFPLQSYGFQPTNGVGYQPYRVVVLSFELLHAPATVCGPKKSTNLVKNKCVNFNFNGLTGTGVLTESNKKFLPFQQFGRDIADTTDAVRDPQTLEILDITPCSFGGVSVITPGTNTSNQVAVLYQDVNCTEVPVAIHADQLTPTWRVYSTGSNVFQTRAGCLIGAEHVNNSYECDIPIGAGICASYQTQTNSPRRARSVASQSIIAYTMSLGAENSVAYSNNSIAIPTNFTISVTTEILPVSMTKTSVDCTMYICGDSTECSNLLLQYGSFCTQLNRALTGIAVEQDKNTQEVFAQVKQIYKTPPIKDFGGFNFSQILPDPSKPSKRSFIEDLLFNKVTLADAGFIKQYGDCLGDIAARDLICAQKFNGLTVLPPLLTDEMIAQYTSALLAGTITSGWTFGAGAALQIPFAMQMAYRFNGIGVTQCVLYENQKLIANQFNSAIGKIQDSLSSTASALGKLQDVVNQNAQALNTLVKQLSSNFGAISSVLNDILSRLDKVEAEVQIDRLITGRLQSLQTYVTQQLIRAAEIRASANLAATKMSECVLGQSKRVDFCGKGYHLMSFPQSAPHGVVFLHVTYVPAQEKNFTTAPAICHDGKAHFPREGVFVSNGTHWFVTQRNFYEPQIITTDNTFVCGNCDVLIGIVNNTVYDPLQPELDSGGSGYIPEAPRDGQAYVRKDGEWVLLSTFL

SEQ ID NO: 13995 - protein, 1177 aa, Artificial Sequence
  SARS-CoV-2/Shenzhen/SZTH-004/2020__EPI_ISL_406595 spike protein (1-1147)(N914C_S1123C) Foldon construct
MFVFLVLLPLVSSQCVNLTTRTQLPPAYTNSFTRGVYYPDKVFRSSVLHSTQDLFLPFFSNVTWFHAIHVSGTNGTKRFDNPVLPFNDGVYFASTEKSNIIRGWIFGTTLDSKTQSLLIVNNATNVVIKVCEFQFCNDPFLGVYYHKNNKSWMESEFRVYSSANNCTFEYVSQPFLMDLEGKQGNFKNLREFVFKNIDGYFKIYSKHTPINLVRDLPQGFSALEPLVDLPIGINITRFQTLLALHRSYLTPGDSSSGWTAGAAAYYVGYLQPRTFLLKYNENGTITDAVDCALDPLSETKCTLKSFTVEKGIYQTSNFRVQPTESIVRFPNITNLCPFGEVFNATRFASVYAWDRKRISNCVAYYSVLYNSASFSTFKCYGVSPTKLNDLCFTNVYADSFVIRGDEVRQIAPGQTGKIADYNYKLPDDFTGCVIAWNSNNLDSKVGGNYNYLYRLFRKSNLKPFERDISTEIYQAGSTPCNGVEGFNCYFPLQSYGFQPTNGVGYQPYRVVVLSFELLHAPATVCGPKKSTNLVKNKCVNFNFNGLTGTGVLTESNKKFLPFQQFGRDIADTTDAVRDPQTLEILDITPCSFGGVSVITPGTNTSNQVAVLYQDVNCTEVPVAIHADQLTPTWRVYSTGSNVFQTRAGCLIGAEHVNNSYECDIPIGAGICASYQTQTNSPRRARSVASQSIIAYTMSLGAENSVAYSNNSIAIPTNFTISVTTEILPVSMTKTSVDCTMYICGDSTECSNLLLQYGSFCTQLNRALTGIAVEQDKNTQEVFAQVKQIYKTPPIKDFGGFNFSQILPDPSKPSKRSFIEDLLFNKVTLADAGFIKQYGDCLGDIAARDLICAQKFNGLTVLPPLLTDEMIAQYTSALLAGTITSGWTFGAGAALQIPFAMQMAYRFNGIGVTQCVLYENQKLIANQFNSAIGKIQDSLSSTASALGKLQDVVNQNAQALNTLVKQLSSNFGAISSVLNDILSRLDKVEAEVQIDRLITGRLQSLQTYVTQQLIRAAEIRASANLAATKMSECVLGQSKRVDFCGKGYHLMSFPQSAPHGVVFLHVTYVPAQEKNFTTAPAICHDGKAHFPREGVFVSNGTHWFVTQRNFYEPQIITTDNTFVCGNCDVVIGIVNNTVYDPLQPELDSGGSGYIPEAPRDGQAYVRKDGEWVLLSTFL

SEQ ID NO: 13996 - protein, 1177 aa, Artificial Sequence
  SARS-CoV-2/France/IDF0372/2020__EPI_ISL_406596 spike protein (1-1147)(N914C_S1123C) Foldon construct
MFVFLVLLPLVSSQCVNLTTRTQLPPAYTNSFTRGVYYPDKVFRSSVLHSTQDLFLPFFSNVTWFHAIHVSGTNGTKRFDNPVLPFNDGVYFASTEKSNIIRGWIFGTTLDSKTQSLLIVNNATNVVIKVCEFQFCNDPFLGVYYHKNNKSWMESEFRVYSSANNCTFEYVSQPFLMDLEGKQGNFKNLREFVFKNIDGYFKIYSKHTPINLVRDLPQGFSALEPLVDLPIGINITRFQTLLALHRSYLTPGDSSSGWTAGAAAYYVGYLQPRTFLLKYNENGTITDAVDCALDPLSETKCTLKSFTVEKGIYQTSNFRVQPTESIVRFPNITNLCPFGEVFNATRFASVYAWNRKRISNCVADYSFLYNSASFSTFKCYGVSPTKLNDLCFTNVYADSFVIRGDEVRQIAPGQTGKIADYNYKLPDDFTGCVIAWNSNNLDSKVGGNYNYLYRLFRKSNLKPFERDISTEIYQAGSTPCNGVEGFNCYFPLQSYGFQPTNGVGYQPYRVVVLSFELLHAPATVCGPKKSTNLVKNKCVNFNFNGLTGTGVLTESNKKFLPFQQFGRDIADTTDAVRDPQTLEILDITPCSFGGVSVITPGTNTSNQVAVLYQDVNCTEVPVAIHADQLTPTWRVYSTGSNVFQTRAGCLIGAEHVNNSYECDIPIGAGICASYQTQTNSPRRARSVASQSIIAYTMSLGAENSVAYSNNSIAIPTNFTISVTTEILPVSMTKTSVDCTMYICGDSTECSNLLLQYGSFCTQLNRALTGIAVEQDKNTQEVFAQVKQIYKTPPIKDFGGFNFSQILPDPSKPSKRSFIEDLLFNKVTLADAGFIKQYGDCLGDIAARDLICAQKFNGLTVLPPLLTDEMIAQYTSALLAGTITSGWTFGAGAALQIPFAMQMAYRFNGIGVTQCVLYENQKLIANQFNSAIGKIQDSLSSTASALGKLQDVVNQNAQALNTLVKQLSSNFGAISSVLNDILSRLDKVEAEVQIDRLITGRLQSLQTYVTQQLIRAAEIRASANLAATKMSECVLGQSKRVDFCGKGYHLMSFPQSAPHGVVFLHVTYVPAQEKNFTTAPAICHDGKAHFPREGVFVSNGTHWFVTQRNFYEPQIITTDNTFVCGNCDVVIGIVNNTVYDPLQPELDSGGSGYIPEAPRDGQAYVRKDGEWVLLSTFL

SEQ ID NO: 13997 - protein, 1177 aa, Artificial Sequence
  SARS-CoV-2/Australia/VIC01/2020__EPI_ISL_406844 spike protein (1-1147)(N914C_S1123C) Foldon construct
MFVFLVLLPLVSSQCVNLTTRTQLPPAYTNSFTRGVYYPDKVFRSSVLHSTQDLFLPFFSNVTWFHAIHVSGTNGTKRFDNPVLPFNDGVYFASTEKSNIIRGWIFGTTLDSKTQSLLIVNNATNVVIKVCEFQFCNDPFLGVYYHKNNKSWMESEFRVYSSANNCTFEYVSQPFLMDLEGKQGNFKNLREFVFKNIDGYFKIYSKHTPINLVRDLPQGFSALEPLVDLPIGINITRFQTLLALHRRYLTPGDSSSGWTAGAAAYYVGYLQPRTFLLKYNENGTITDAVDCALDPLSETKCTLKSFTVEKGIYQTSNFRVQPTESIVRFPNITNLCPFGEVFNATRFASVYAWNRKRISNCVADYSVLYNSASFSTFKCYGVSPTKLNDLCFTNVYADSFVIRGDEVRQIAPGQTGKIADYNYKLPDDFTGCVIAWNSNNLDSKVGGNYNYLYRLFRKSNLKPFERDISTEIYQAGSTPCNGVEGFNCYFPLQSYGFQPTNGVGYQPYRVVVLSFELLHAPATVCGPKKSTNLVKNKCVNFNFNGLTGTGVLTESNKKFLPFQQFGRDIADTTDAVRDPQTLEILDITPCSFGGVSVITPGTNTSNQVAVLYQDVNCTEVPVAIHADQLTPTWRVYSTGSNVFQTRAGCLIGAEHVNNSYECDIPIGAGICASYQTQTNSPRRARSVASQSIIAYTMSLGAENSVAYSNNSIAIPTNFTISVTTEILPVSMTKTSVDCTMYICGDSTECSNLLLQYGSFCTQLNRALTGIAVEQDKNTQEVFAQVKQIYKTPPIKDFGGFNFSQILPDPSKPSKRSFIEDLLFNKVTLADAGFIKQYGDCLGDIAARDLICAQKFNGLTVLPPLLTDEMIAQYTSALLAGTITSGWTFGAGAALQIPFAMQMAYRFNGIGVTQCVLYENQKLIANQFNSAIGKIQDSLSSTASALGKLQDVVNQNAQALNTLVKQLSSNFGAISSVLNDILSRLDKVEAEVQIDRLITGRLQSLQTYVTQQLIRAAEIRASANLAATKMSECVLGQSKRVDFCGKGYHLMSFPQSAPHGVVFLHVTYVPAQEKNFTTAPAICHDGKAHFPREGVFVSNGTHWFVTQRNFYEPQIITTDNTFVCGNCDVVIGIVNNTVYDPLQPELDSGGSGYIPEAPRDGQAYVRKDGEWVLLSTFL

SEQ ID NO: 13998 - protein, 1177 aa, Artificial Sequence
  SARS-CoV-2/Germany/BavPat1/2020__EPI_ISL_406862 spike protein (1-1147)(N914C_S1123C) Foldon construct
MFVFLVLLPLVSSQCVNLTTRTQLPPAYTNSFTRGVYYPDKVFRSSVLHSTQDLFLPFFSNVTWFHAIHVSGTNGTKRFDNPVLPFNDGVYFASTEKSNIIRGWIFGTTLDSKTQSLLIVNNATNVVIKVCEFQFCNDPFLGVYYHKNNKSWMESEFRVYSSANNCTFEYVSQPFLMDLEGKQGNFKNLREFVFKNIDGYFKIYSKHTPINLVRDLPQGFSALEPLVDLPIGINITRFQTLLALHRSYLTPGDSSSGWTAGAAAYYVGYLQPRTFLLKYNENGTITDAVDCALDPLSETKCTLKSFTVEKGIYQTSNFRVQPTESIVRFPNITNLCPFGEVFNATRFASVYAWNRKRISNCVADYSVLYNSASFSTFKCYGVSPTKLNDLCFTNVYADSFVIRGDEVRQIAPGQTGKIADYNYKLPDDFTGCVIAWNSNNLDSKVGGNYNYLYRLFRKSNLKPFERDISTEIYQAGSTPCNGVEGFNCYFPLQSYGFQPTNGVGYQPYRVVVLSFELLHAPATVCGPKKSTNLVKNKCVNFNFNGLTGTGVLTESNKKFLPFQQFGRDIADTTDAVRDPQTLEILDITPCSFGGVSVITPGTNTSNQVAVLYQGVNCTEVPVAIHADQLTPTWRVYSTGSNVFQTRAGCLIGAEHVNNSYECDIPIGAGICASYQTQTNSPRRARSVASQSIIAYTMSLGAENSVAYSNNSIAIPTNFTISVTTEILPVSMTKTSVDCTMYICGDSTECSNLLLQYGSFCTQLNRALTGIAVEQDKNTQEVFAQVKQIYKTPPIKDFGGFNFSQILPDPSKPSKRSFIEDLLFNKVTLADAGFIKQYGDCLGDIAARDLICAQKFNGLTVLPPLLTDEMIAQYTSALLAGTITSGWTFGAGAALQIPFAMQMAYRFNGIGVTQCVLYENQKLIANQFNSAIGKIQDSLSSTASALGKLQDVVNQNAQALNTLVKQLSSNFGAISSVLNDILSRLDKVEAEVQIDRLITGRLQSLQTYVTQQLIRAAEIRASANLAATKMSECVLGQSKRVDFCGKGYHLMSFPQSAPHGVVFLHVTYVPAQEKNFTTAPAICHDGKAHFPREGVFVSNGTHWFVTQRNFYEPQIITTDNTFVCGNCDVVIGIVNNTVYDPLQPELDSGGSGYIPEAPRDGQAYVRKDGEWVLLSTFL

SEQ ID NO: 13999 - protein, 1177 aa, Artificial Sequence
  SARS-CoV-2/Wuhan/HBCDC-HB-02/2020__EPI_ISL_412978 spike protein (1-1147)(N914C_S1123C) Foldon construct
MFVFLVLLPLVSSQCVNLTTRTQLPPAYTNSFTRGVYYPDKVFRSSVLHSTQDLFLPFFSNVTWFHAIHVSGTNGTKRFDNPVLPFNDGVYFASTEKSNIIRGWIFGTTLDSKTQSLLIVNNATNVVIKVCEFQFCNDPFLGVYYHKNNKSWMESEFRVYSSANNCTFEYVSQPFLMDLEGKQGNFKNLREFVFKNIDGYFKIYSKHTPINLVRDLPQGFSALEPLVDLPIGINITRFQTLLALHRSYLTPGDSSSGWTAGAAAYYVGYLQPRTFLLKYNENGTITDAVDCALDPLSETKCTLKSFTVEKGIYQTSNFRVQPTESIVRFPNITNLCPFGEVFNATRFASVYAWNRKRISNCVADYSVLYNSASFSTFKCYGVSPTKLNDLCFTNVYADSFVIRGDEVRQIAPGQTGKIADYNYKLPDDFTGCVIAWNSNNLDSKVGGNYNYLYRLFRKSNLKPFERDISTEIYQAGSTPCNGVEGFNCYFPLQSYGFQPTNGVGYQPYRVVVLSFELLHAPATVCGPKKSTNLVKNKCVNFNFNGLTGTGVLTESNKKFLPFQQFGRDIADTTDAVRDPQTLEILDITPCSFGGVSVITPGTNTSNQVAVLYQDVNCTEVPVAIHADQLTPTWRVYSTGSNVFQTRAGCLIGAEHVNNSYECDIPIGAGICASYQTQTNSPRRARSVASQSIIAYTMSLGAENSVAYSNNSIAIPTNFTISVTTEILPVSMTKTSVDCTMYICGDSTECSNFLLQYGSFCTQLNRALTGIAVEQDKNTQEVFAQVKQIYKTPPIKDFGGFNFSQILPDPSKPSKRSFIEDLLFNKVTLADAGFIKQYGDCLGDIAARDLICAQKFNGLTVLPPLLTDEMIAQYTSALLAGTITSGWTFGAGAALQIPFAMQMAYRFNGIGVTQCVLYENQKLIANQFNSAIGKIQDSLSSTASALGKLQDVVNQNAQALNTLVKQLSSNFGAISSVLNDILSRLDKVEAEVQIDRLITGRLQSLQTYVTQQLIRAAEIRASANLAATKMSECVLGQSKRVDFCGKGYHLMSFPQSAPHGVVFLHVTYVPAQEKNFTTAPAICHDGKAHFPREGVFVSNGTHWFVTQRNFYEPQIITTDNTFVCGNCDVVIGIVNNTVYDPLQPELDSGGSGYIPEAPRDGQAYVRKDGEWVLLSTFL

SEQ ID NO: 14000 - protein, 1177 aa, Artificial Sequence
  SARS-CoV-2/Australia/QLD02/2020__EPI_ISL_407896 spike protein (1-1147)(N914C_S1123C) Foldon construct
MFVFLVLLPLVSSQCVNLTTRTQLPPAYTNSFTRGVYYPDKVFRSSVLHSTQDLFLPFFSNVTWFHAIHVSGTNGTKRFDNPVLPFNDGVYFASTEKSNIIRGWIFGTTLDSKTQSLLIVNNATNVVIKVCEFQFCNDPFLGVYYHKNNKSWMESEFRVYSSANNCTFEYVSQPFLMDLEGKQGNFKNLREFVFKNIDGYFKIYSKHTPINLVRDLPQGFSALEPLVDLPIGINITRFQTLLALHRSYLTPGDSSSGWTAGAAAYYVGYLQPRTFLLKYNENGTITDAVDCALDPLSETKCTLKSFTVEKGIYQTSNFRVQPTESIVRFPNITNLCPFGEVFNATRFASVYAWNRKRISNCVADYSVLYNSASFSTFKCYGVSPTKLNDLCFTNVYADSFVIRGDEVRQIAPGQTGKIADYNYKLPDDFTGCVIAWNSNNLDSKVGGNYNYLYRLFRKSNLKPFERDISTEIYQAGSTPCNGVEGFNCYFPLQSYGFQPTNGVGYQPYRVVVLSFELLHAPATVCGPKKSTNLVKNKCVNFNFNGLTGTGVLTESNKKFLPFQQFGRDIADTTDAVRDPQTLEILDITPCSFGGVSVITPGTNTSNQVAVLYQDVNCTEVPVAIHADQLTPTWRVYSTGSNVFQTRAGCLIGAEHVNNSYECDIPIGAGICASYQTQTNSPRRARSVASQSIIAYTMSLGAENSVAYSNNSIAIPTNFTISVTTEILPVSMTKTSVDCTMYICGDSTECSNLLLQYGSFCTQLNRALTGIAVEQDKNTQEVFAQVKQIYKTPPIKDFGGFNFSQILPDPSKPSKRSFIEDLLFNKVTLADAGFIKQYGDCLGDIAARDLICAQKFNGLTVLPPLLTDEMIAQYTSALLAGTITSGWTFGAGAALQIPFAMQMAYRFNGIGVTQCVLYENQKLIANQFNSAIGKIQDSLSSTASALGKLQDVVNQNAQALNTLVKQLSSNFGAISSVLNDILSRLDKVEAEVQIDRLITGRLQSLQTYVTQQLIRAAEIRASANLAATKMSECVLGQSKRVDFCGKGYHLMSFPQSAPHGVVFLHVTYVPAQEKNFTTAPAICHDGKAHFPREGVFVSNGTHWFVTQRNFYEPQIITTDNTFVCGNCDVVIGIVNNTVYDPLQLELDSGGSGYIPEAPRDGQAYVRKDGEWVLLSTFL

SEQ ID NO: 14001 - protein, 1177 aa, Artificial Sequence
  SARS-CoV-2/India/1-31/2020__EPI_ISL_413523 spike protein (1-1147)(N914C_S1123C) Foldon construct
MFVFLVLLPLVSSQCVNLTTRTQLPPAYTNSFTRGVYYPDKVFRSSVLHSTQDLFLPFFSNVTWFHAIHVSGTNGTKRFDNPVLPFNDGVYFASTEKSNIIRGWIFGTTLDSKTQSLLIVNNATNVVIKVCEFQFCNDPFLGVYYHKNNKSWMESEFRVYSSANNCTFEYVSQPFLMDLEGKQGNFKNLREFVFKNIDGYFKIYSKHTPINLVRDLPQGFSALEPLVDLPIGINITRFQTLLALHRSYLTPGDSSSGWTAGAAAYYVGYLQPRTFLLKYNENGTITDAVDCALDPLSETKCTLKSFTVEKGIYQTSNFRVQPTESIVRFPNITNLCPFGEVFNATRFASVYAWNRKRISNCVADYSVLYNSASFSTFKCYGVSPTKLNDLCFTNVYADSFVIRGDEVRQIAPGQTGKIADYNYKLPDDFTGCVIAWNSNNLDSKVGGNYNYLYRLFRKSNLKPFERDISTEIYQAGSTPCNGVEGFNCYFPLQSYGFQPTNGVGYQPYRVVVLSFELLHAPATVCGPKKSTNLVKNKCVNFNFNGLTGTGVLTESNKKFLPFQQFGRDIADTTDAVRDPQTLEILDITPCSFGGVSVITPGTNTSNQVAVLYQDVNCTEVPVAIHADQLTPTWRVYSTGSNVFQTRAGCLIGAEHVNNSYECDIPIGAGICASYQTQTNSPRRARSVASQSIIAYTMSLGAENSVAYSNNSIAIPTNFTISVTTEILPVSMTKTSVDCTMYICGDSTECSNLLLQYGSFCTQLNRALTGIAVEQDKNTQEVFAQVKQIYKTPPIKDFGGFNFSQILPDPSKPSKRSFIEDLLFNKVTLADAGFIKQYGDCLGDIAARDLICAQKFNGLTVLPPLLTDEMIAQYTSALLAGTITSGWTFGAGAALQIPFAMQMAYRFNGIGVTQCVLYENQKLIANQFNSVIGKIQDSLSSTASALGKLQDVVNQNAQALNTLVKQLSSNFGAISSVLNDILSRLDKVEAEVQIDRLITGRLQSLQTYVTQQLIRAAEIRASANLAATKMSECVLGQSKRVDFCGKGYHLMSFPQSAPHGVVFLHVTYVPAQEKNFTTAPAICHDGKAHFPREGVFVSNGTHWFVTQRNFYEPQIITTDNTFVCGNCDVVIGIVNNTVYDPLQPELDSGGSGYIPEAPRDGQAYVRKDGEWVLLSTFL

SEQ ID NO: 14002 - protein, 1177 aa, Artificial Sequence
  SARS-CoV-2/Guangdong/GD2020087-P0008/2020__EPI_ISL_413863 spike protein (1-1147)(N914C_S1123C) Foldon construct
MFVFLVLLPLVSSQCVNLTTRTQLPPAYTNSFTRGVYYPDKVFRSSVLHSTQDLFLPFFSNVTWFHAIHVSGTNGTKRFDNPVLPFNDGVYFASTEKSNIIRGWIFGTTLDSKTQSLLIVNNATNVVIKVCEFQFCNDPFLGVYYHKNNKSWMESEFRVYSSANNCTFEYVSQPFLMDLEGKQGNFKNLREFVFKNIDGYFKIYSKHTPINLVRDLPQGFSALEPLVDLPIGINITRFQTLLALHRSYLTPGDSSSGWTAGAAAYYVGYLQPRTFLLKYNENGTITDAVDCALDPLSETKCTLKSFTVEKGIYQTSNFRVQPTESIVRFPNITNLCPFGEVFNATRFASVYAWNRKRISNCVADYSVLYNSASFSTFKCYGVSPTKLNDLCFTNVYADSFVIRGDEVREIAPGQTGKIADYNYKLPDDFTGCVIAWNSNNLDSKVGGNYNYLYRLFRKSNLKPFERDISTEIYQAGSTPCNGVEGFNCYFPLQSYGFQPTNGVGYQPYRVVVLSFELLHAPATVCGPKKSTNLVKNKCVNFNFNGLTGTGVLTESNKKFLPFQQFGRDIADTTDAVRDPQTLEILDITPCSFGGVSVITPGTNTSNQVAVLYQDVNCTEVPVAIHADQLTPTWRVYSTGSNVFQTRAGCLIGAEHVNNSYECDIPIGAGICASYQTQTNSPRRARSVASQSIIAYTMSLGAENSVAYSNNSIAIPTNFTISVTTEILPVSMTKTSVDCTMYICGDSTECSNLLLQYGSFCTQLNRALTGIAVEQDKNTQEVFAQVKQIYKTPPIKDFGGFNFSQILPDPSKPSKRSFIEDLLFNKVTLADAGFIKQYGDCLGDIAARDLICAQKFNGLTVLPPLLTDEMIAQYTSALLAGTITSGWTFGAGAALQIPFAMQMAYRFNGIGVTQCVLYENQKLIANQFNSAIGKIQDSLSSTASALGKLQDVVNQNAQALNTLVKQLSSNFGAISSVLNDILSRLDKVEAEVQIDRLITGRLQSLQTYVTQQLIRAAEIRASANLAATKMSECVLGQSKRVDFCGKGYHLMSFPQSAPHGVVFLHVTYVPAQEKNFTTAPAICHDGKAHFPREGVFVSNGTHWFVTQRNFYEPQIITTDNTFVCGNCDVVIGIVNNTVYDPLQPELDSGGSGYIPEAPRDGQAYVRKDGEWVLLSTFL

SEQ ID NO: 14003 - protein, 1177 aa, Artificial Sequence
  SARS-CoV-2/Sweden/01/2020__EPI_ISL_411951 spike protein (1-1147)(N914C_S1123C) Foldon construct
MFVFLVLLPLVSSQCVNLTTRTQLPPAYTNSFTRGVYYPDKVFRSSVLHSTQDLFLPFFSNVTWFHAIHVSGTNGTKRFDNPVLPFNDGVYFASTEKSNIIRGWIFGTTLDSKTQSLLIVNNATNVVIKVCEFQFCNDPFLGVYYHKNNKSWMESEFRVYSSANNCTFEYVSQPFLMDLEGKQGNFKNLREFVFKNIDGYFKIYSKHTPINLVRDLPQGFSALEPLVDLPIGINITRFQTLLALHRSYLTPGDSSSGWTAGAAAYYVGYLQPRTFLLKYNENGTITDAVDCALDPLSETKCTLKSFTVEKGIYQTSNFRVQPTESIVRFPNITNLCPFGEVFNATRFASVYAWNRKRISNCVADYSVLYNSASFSTFKCYGVSPTKLNDLCFTNVYADSFVIRGDEVRQIAPGQTGKIADYNYKLPDDFTGCVIAWNSNNLDSKVGGNYNYLYRLFRKSNLKPFERDISTEIYQAGSTPCNGVEGFNCYFPLQSYGFQPTNGVGYQPYRVVVLSFELLHAPATVCGPKKSTNLVKNKCVNFNFNGLTGTGVLTESNKKFLPFQQFGRDIADTTDAVRDPQTLEILDITPCSFGGVSVITPGTNTSNQVAVLYQDVNCTEVPVAIHADQLTPTWRVYSTGSNVFQTRAGCLIGAEHVNNSYECDIPIGAGICASYQTQTNSPRRARSVASQSIIAYTMSLGAENSVAYSNNSIAIPTNFTISVTTEILPVSMTKTSVDCTMYICGDSTECSNLLLQYGSFCTQLNRALTGIAVEQDKNTQEVFAQVKQIYKTPPIKDCGGFNFSQILPDPSKPSKRSFIEDLLFNKVTLADAGFIKQYGDCLGDIAARDLICAQKFNGLTVLPPLLTDEMIAQYTSALLAGTITSGWTFGAGAALQIPFAMQMAYRFNGIGVTQCVLYENQKLIANQFNSAIGKIQDSLSSTASALGKLQDVVNQNAQALNTLVKQLSSNFGAISSVLNDILSRLDKVEAEVQIDRLITGRLQSLQTYVTQQLIRAAEIRASANLAATKMSECVLGQSKRVDFCGKGYHLMSFPQSAPHGVVFLHVTYVPAQEKNFTTAPAICHDGKAHFPREGVFVSNGTHWFVTQRNFYEPQIITTDNTFVCGNCDVVIGIVNNTVYDPLQPELDSGGSGYIPEAPRDGQAYVRKDGEWVLLSTFL

SEQ ID NO: 14004 - protein, 1177 aa, Artificial Sequence
  SARS-CoV-2/Tianmen/HBCDC-HB-07/2020__EPI_ISL_412983 spike protein (1-1147)(N914C_S1123C) Foldon construct
MFVFLVLLPLVSSQCVNLTTRTQLPPAYTNSFTRGVYYPDKVFRSSVLHSTQDLFLPFFSNVTWFHAIHVSGTNGTKRFDNPVLPFNDGVYFASTEKSNIIRGWIFGTTLDSKTQSLLIVNNATNVVIKVCEFQFCNDPFLGVYYHKNNKSWMESEFRVYSSANNCTFEYVSQPFLMDLEGKQGNFKNLREFVFKNIDGYFKIYSKHTPINLVRDLPQGFSALEPLVDLPIGINITRFQTLLALHRSYLTPGDSSSGWTAGAAAYYVGYLQPRTFLLKYNENGTITDAVDCALDPLSETKCTLKSFTVEKGIYQTSNFRVQPTESIVRFPNITNLCPFGEVFNATRFASVYAWNRKRISNCVADYSVLYNSASFSTFKCYGVSPTKLNDLCFTNVYADSFVIRGDEVRQIAPGQTGKIADYNYKLPDDFTGCVIAWNSNNLDSKVGGNYNYLYRLFRKSNLKPFERDISTEIYQAGSTPCNGVEGFNCYFPLQSYGFQPTNGVGYQPYRVVVLSFELLHAPATVCGPKKSTNLVKNKCVNFNFNGLTGTGVLTESNKKFLPFQQFGRDIADTTDAVRDPQTLEILDITPCSFGGVSVITPGTNTSNQVAVLYQDLNCTEVPVAIHADQLTPTWRVYSTGSNVFQTRAGCLIGAEHVNNSYECDIPIGAGICASYQTQTNSPRRARSVASQSIIAYTMSLGAENSVAYSNNSIAIPTNFTISVTTEILPVSMTKTSVDCTMYICGDSTECSNLLLQYGSFCTQLNRALTGIAVEQDKNTQEVFAQVKQIYKTPPIKDFGGFNFSQILPDPSKPSKRSFIEDLLFNKVTLADAGFIKQYGDCLGDIAARDLICAQKFNGLTVLPPLLTDEMIAQYTSALLAGTITSGWTFGAGAALQIPFAMQMAYRFNGIGVTQCVLYENQKLIANQFNSAIGKIQDSLSSTASALGKLQDVVNQNAQALNTLVKQLSSNFGAISSVLNDILSRLDKVEAEVQIDRLITGRLQSLQTYVTQQLIRAAEIRASANLAATKMSECVLGQSKRVDFCGKGYHLMSFPQSAPHGVVFLHVTYVPAQEKNFTTAPAICHDGKAHFPREGVFVSNGTHWFVTQRNFYEPQIITTDNTFVCGNCDVVIGIVNNTVYDPLQPELDSGGSGYIPEAPRDGQAYVRKDGEWVLLSTFL

SEQ ID NO: 14005 - protein, 1177 aa, Artificial Sequence
  SARS-CoV-2/Hong Kong/case42_VM20002493/2020__EPI_ISL_414527 spike protein (1-1147)(N914C_S1123C) Foldon construct
MFVFLVLLPLVSSQCVNLTTRTQLPPAYTNSFTRGVYYPDKVFRSSVLHSTQDLFLPFFSNVTWFHAIHVSGTNGTKRFDNPVLPFNDGVYFASTEKSNIIRGWIFGTTLDSKTQSLLIVNNATNVVIKVCEFQFCNDPFLGVYYHKNNKSWMESEFRVYSSANNCTFEYVSQPFLMDLEGKQGNFKNLREFVFKNIDGYFKIYSKHTPINLVRDLPQGFSALEPLVDLPIGINITRFQTLLALHRSYLTPGDSSSGWTAGAAAYYVGYLQPRTFLLKYNENGTITDAVDCALDPLSETKCTLKSFTVEKGIYQTSNFRVQPTESIVRFPNITNLCPFGEVFNATRFASVYAWNRKRISNCVADYSVLYNSASFSTFKCYGVSPTKLNDLCFTNVYADSFVIRGDEVRQIAPGQTGKIADYNYKLPDDFTGCVIAWNSNNLDSKVGGNYNYLYRLFRKSNLKPFERDISTEIYQAGSTPCNGVEGFNCYFPLQSYGFQPTNGVGYQPYRVVVLSFELLHAPATVCGPKKSTNLVKNKCVNFNFNGLTGTGVLTESNKKFLPFQQFGRDIADTTDAVRDPQTLEILDITPCSFGGVSVITPGTNTSNQVAVLYQDVNCTEVPVAIHADQLTPTWRVYSTGSNVFQTRAGCLIGAEHVNNSYECDIPIGAGICASYQTQTNSPRRARSVASQSIIAYTMSLGAENSVAYSNNSIAIPTNFAISVTTEILPVSMTKTSVDCTMYICGDSTECSNLLLQYGSFCTQLNRALTGIAVEQDKNTQEVFAQVKQIYKTPPIKDFGGFNFSQILPDPSKPSKRSFIEDLLFNKVTLADAGFIKQYGDCLGDIAARDLICAQKFNGLTVLPPLLTDEMIAQYTSALLAGTITSGWTFGAGAALQIPFAMQMAYRFNGIGVTQCVLYENQKLIANQFNSAIGKIQDSLSSTASALGKLQDVVNQNAQALNTLVKQLSSNFGAISSVLNDILSRLDKVEAEVQIDRLITGRLQSLQTYVTQQLIRAAEIRASANLAATKMSECVLGQSKRVDFCGKGYHLMSFPQSAPHGVVFLHVTYVPAQEKNFTTAPAICHDGKAHFPREGVFVSNGTHWFVTQRNFYEPQIITTDNTFVCGNCDVVIGIVNNTVYDPLQPELDSGGSGYIPEAPRDGQAYVRKDGEWVLLSTFL

SEQ ID NO: 14006 - protein, 1177 aa, Artificial Sequence
  SARS-CoV-2/USA/CruiseA-23/2020__EPI_ISL_414482 spike protein (1-1147)(N914C_S1123C) Foldon construct
MFVFLVLLPLVSSQCVNLTTRTQLPPAYTNSFTRGVYYPDKVFRSSVLHSTQDLFLPFFSNVTWFHAIHVSGTNGTKRFDNPVLPFNDGVYFASTEKSNIIRGWIFGTTLDSKTQSLLIVNNATNVVIKVCEFQFCNDPFLGVYYHKNNKSWMESEFRVYSSANNCTFEYVSQPFLMDLEVKQGNFKNLREFVFKNIDGYFKIYSKHTPINLVRDLPQGFSALEPLVDLPIGINITRFQTLLALHRSYLTPGDSSSGWTAGAAAYYVGYLQPRTFLLKYNENGTITDAVDCALDPLSETKCTLKSFTVEKGIYQTSNFRVQPTESIVRFPNITNLCPFGEVFNATRFASVYAWNRKRISNCVADYSVLYNSASFSTFKCYGVSPTKLNDLCFTNVYADSFVIRGDEVRQIAPGQTGKIADYNYKLPDDFTGCVIAWNSNNLDSKVGGNYNYLYRLFRKSNLKPFERDISTEIYQAGSTPCNGVEGFNCYFPLQSYGFQPTNGVGYQPYRVVVLSFELLHAPATVCGPKKSTNLVKNKCVNFNFNGLTGTGVLTESNKKFLPFQQFGRDIADTTDAVRDPQTLEILDITPCSFGGVSVITPGTNTSNQVAVLYQDVNCTEVPVAIHADQLTPTWRVYSTGSNVFQTRAGCLIGAEHVNNSYECDIPIGAGICASYQTQTNSPRRARSVASQSIIAYTMSLGAENSVAYSNNSIAIPTNFTISVTTEILPVSMTKTSVDCTMYICGDSTECSNLLLQYGSFCTQLNRALTGIAVEQDKNTQEVFAQVKQIYKTPPIKDFGGFNFSQILPDPSKPSKRSFIEDLLFNKVTLADAGFIKQYGDCLGDIAARDLICAQKFNGLTVLPPLLTDEMIAQYTSALLAGTITSGWTFGAGAALQIPFAMQMAYRFNGIGVTQCVLYENQKLIANQFNSAIGKIQDSLSSTASALGKLQDVVNQNAQALNTLVKQLSSNFGAISSVLNDILSRLDKVEAEVQIDRLITGRLQSLQTYVTQQLIRAAEIRASANLAATKMSECVLGQSKRVDFCGKGYHLMSFPQSAPHGVVFLHVTYVPAQEKNFTTAPAICHDGKAHFPREGVFVSNGTHWFVTQRNFYEPQIITTDNTFVCGNCDVVIGIVNNTVYDPLQPELDSGGSGYIPEAPRDGQAYVRKDGEWVLLSTFL

SEQ ID NO: 14007 - protein, 1177 aa, Artificial Sequence
  SARS-CoV-2/Hong Kong/case85_VM20002868/2020__EPI_ISL_414519 spike protein (1-1147)(N914C_S1123C) Foldon construct
MFVFLVLVPLVSSQCVNLTTRTQLPPAYTNSFTRGVYYPDKVFRSSVLHSTQDLFLPFFSNVTWFHAIHVSGTNGTKRFDNPVLPFNDGVYFASTEKSNIIRGWIFGTTLDSKTQSLLIVNNATNVVIKVCEFQFCNDPFLGVYYHKNNKSWMESEFRVYSSANNCTFEYVSQPFLMDLEGKQGNFKNLREFVFKNIDGYFKIYSKHTPINLVRDLPQGFSALEPLVDLPIGINITRFQTLLALHRSYLTPGDSSSGWTAGAAAYYVGYLQPRTFLLKYNENGTITDAVDCALDPLSETKCTLKSFTVEKGIYQTSNFRVQPTESIVRFPNITNLCPFGEVFNATRFASVYAWNRKRISNCVADYSVLYNSASFSTFKCYGVSPTKLNDLCFTNVYADSFVIRGDEVRQIAPGQTGKIADYNYKLPDDFTGCVIAWNSNNLDSKVGGNYNYLYRLFRKSNLKPFERDISTEIYQAGSTPCNGVEGFNCYFPLQSYGFQPTNGVGYQPYRVVVLSFELLHAPATVCGPKKSTNLVKNKCVNFNFNGLTGTGVLTESNKKFLPFQQFGRDIADTTDAVRDPQTLEILDITPCSFGGVSVITPGTNTSNQVAVLYQDVNCTEVPVAIHADQLTPTWRVYSTGSNVFQTRAGCLIGAEHVNNSYECDIPIGAGICASYQTQTNSPRRARSVASQSIIAYTMSLGAENSVAYSNNSIAIPTNFTISVTTEILPVSMTKTSVDCTMYICGDSTECSNLLLQYGSFCTQLNRALTGIAVEQDKNTQEVFAQVKQIYKTPPIKDFGGFNFSQILPDPSKPSKRSFIEDLLFNKVTLADAGFIKQYGDCLGDIAARDLICAQKFNGLTVLPPLLTDEMIAQYTSALLAGTITSGWTFGAGAALQIPFAMQMAYRFNGIGVTQCVLYENQKLIANQFNSAIGKIQDSLSSTASALGKLQDVVNQNAQALNTLVKQLSSNFGAISSVLNDILSRLDKVEAEVQIDRLITGRLQSLQTYVTQQLIRAAEIRASANLAATKMSECVLGQSKRVDFCGKGYHLMSFPQSAPHGVVFLHVTYVPAQEKNFTTAPAICHDGKAHFPREGVFVSNGTHWFVTQRNFYEPQIITTDNTFVCGNCDVVIGIVNNTVYDPLQPELDSGGSGYIPEAPRDGQAYVRKDGEWVLLSTFL

SEQ ID NO: 14008 - protein, 1177 aa, Artificial Sequence; identical to SEQ ID NO: 13998
  SARS-CoV-2/England/200990660/2020__EPI_ISL_414523 spike protein (1-1147)(N914C_S1123C) Foldon construct

SEQ ID NO: 14009 - protein, 1177 aa, Artificial Sequence
  SARS-CoV-2/Australia/NSW09/2020__EPI_ISL_413595 spike protein (1-1147)(N914C_S1123C) Foldon construct
MFVFLVLLPLVSSQCVNLTTRTQLPPAYTNSFTRGVYYPDKVFRSSVLHSTQDLFLPFFSNVTWFHAIHVSGTNGTKRFDNPVLPFNDGVYFASTEKSNIIRGWIFGTTLDSKTQSLLIVNNATNVVIKVCEFQFCNDPFLGVYYHKNNKSWMESEFRVYSSANNCTFEYVSQPFLMDLEGKQGNFKNLREFVFKNIDGYFKIYSKHTPINLVRDLPQGFSALEPLVDLPIGINITRFQTLLALHRSYLTPGDSSSGWTAGAAAYYVGYLQPRTFLLKYNENGTITDAVDCALDPLSETKCTLKSFTVEKGIYQTSNFRVQPTESIVRFPNITNLCPFGEVFNATRFASVYAWNRKRISNCVADYSVLYNSASFSTFKCYGVSPTKLNDLCFTNVYADSFVIRGDEVRQIAPGQTGKIADYNYKLPDDFTGCVIAWNSNNLDSKVGGNYNYLYRLFRKSNLKPFERDISTEIYQAGSTPCNGVEGFNCYFPLQSYGFQPTNGVGYQPYRVVVLSFELLHAPATVCGPKKSTNLVKNKCVNFNFNGLTGTGVLTESNKKFLPFQQFGRDIADTTDAVRDPQTLEILDITPCSFGGVSVITPGTNTSNQVAVLYQDVNCTEVPVAIHADQLTPTWRVYSTGSNVFQTRAGCLIGAEHVNNSYECDIPIGAGICASYQTQTNSPRRARSVASQSIIAYTMSLGAENSVAYSNNSIAIPTNFTISVTTEILPVSMTKTSVDCTMYICGDSTECSNLLLQYGSFCTQLNRALTGIAVEQDKNTQEVFAQVKQIYKTPPIKDFGGFNFSQILPDPSKPSKRSFIEDLLFNKVTLADAGFIKQYGDCLGDIAARDLICAQKFNGLTVLPPLLTDEMIAQYTSALLAGTITSGWTFGAGAALQIPFAMQMAYRFNGIGVTQCVLYENQKLIANQFNSAIGKIQDSLSFTASALGKLQDVVNQNAQALNTLVKQLSSNFGAISSVLNDILSRLDKVEAEVQIDRLITGRLQSLQTYVTQQLIRAAEIRASANLAATKMSECVLGQSKRVDFCGKGYHLMSFPQSAPHGVVFLHVTYVPAQEKNFTTAPAICHDGKAHFPREGVFVSNGTHWFVTQRNFYEPQIITTDNTFVCGNCDVVIGIVNNTVYDPLQPELDSGGSGYIPEAPRDGQAYVRKDGEWVLLSTFL

SEQ ID NO: 14010 - protein, 1177 aa, Artificial Sequence; identical to SEQ ID NO: 13990
  SARS-CoV-2/Australia/NSW10/2020__EPI_ISL_413596 spike protein (1-1147)(N914C_S1123C) Foldon construct

SEQ ID NO: 14011 - protein, 1177 aa, Artificial Sequence
  SARS-CoV-2/Switzerland/1000477797/2020__EPI_ISL_413023 spike protein (1-1147)(N914C_S1123C) Foldon construct
MFVFLVLLPLVSSQCVNLTTRTQLPPAYTNSFTRGVYYPDKVFRSSVLHSTQDLFLPFFSNVTWFHAIHVSGTNGTKRFDNPVLPFNDGVYFASTEKSNIIRGWIFGTTLDSKTQSLLIVNNATNVVIKVCEFQFCNDPFLGVYYHKNNKSWMESEFRVYSSANNCTFEYVSQPFLMDLEGKQGNFKNLREFVFKNIDGYFNIYSKHTPINLVRDLPQGFSALEPLVDLPIGINITRFQTLLALHRSYLTPGDSSSGWTAGAAAYYVGYLQPRTFLLKYNENGTITDAVDCALDPLSETKCTLKSFTVEKGIYQTSNFRVQPTESIVRFPNITNLCPFGEVFNATRFASVYAWNRKRISNCVADYSVLYNSASFSTFKCYGVSPTKLNDLCFTNVYADSFVIRGDEVRQIAPGQTGKIADYNYKLPDDFTGCVIAWNSNNLDSKVGGNYNYLYRLFRKSNLKPFERDISTEIYQAGSTPCNGVEGFNCYFPLQSYGFQPTNGVGYQPYRVVVLSFELLHAPATVCGPKKSTNLVKNKCVNFNFNGLTGTGVLTESNKKFLPFQQFGRDIADTTDAVRDPQTLEILDITPCSFGGVSVITPGTNTSNQVAVLYQGVNCTEVPVAIHADQLTPTWRVYSTGSNVFQTRAGCLIGAEHVNNSYECDIPIGAGICASYQTQTNSPRRARSVASQSIIAYTMSLGAENSVAYSNNSIAIPTNFTISVTTEILPVSMTKTSVDCTMYICGDSTECSNLLLQYGSFCTQLNRALTGIAVEQDKNTQEVFAQVKQIYKTPPIKDFGGFNFSQILPDPSKPSKRSFIEDLLFNKVTLADAGFIKQYGDCLGDIAARDLICAQKFNGLTVLPPLLTDEMIAQYTSALLAGTITSGWTFGAGAALQIPFAMQMAYRFNGIGVTQCVLYENQKLIANQFNSAIGKIQDSLSSTASALGKLQDVVNQNAQALNTLVKQLSSNFGAISSVLNDILSRLDKVEAEVQIDRLITGRLQSLQTYVTQQLIRAAEIRASANLAATKMSECVLGQSKRVDFCGKGYHLMSFPQSAPHGVVFLHVTYVPAQEKNFTTAPAICHDGKAHFPREGVFVSNGTHWFVTQRNFYEPQIITTDNTFVCGNCDVVIGIVNNTVYDPLQPELDSGGSGYIPEAPRDGQAYVRKDGEWVLLSTFL

SEQ ID NO: 14012 - protein, 1177 aa, Artificial Sequence
  SARS-CoV-2/Belgium/BA-02291/2020__EPI_ISL_415159 spike protein (1-1147)(N914C_S1123C) Foldon construct
MFVFLVLLPLVSSQCVNLTTRTQLPPAYTNSFTRGVYYPDKVFRSSVLHSTQDLFLPFFSNVTWFHAIHVSGTNGTKRFDNPVLPFNDGVYFASTEKSNIIRGWIFGTTLDSKTQSLLIVNNATNVVIKVCEFQFCNDPFLGVYYHKNNKSWMESEFRVYSSANNCTFEYVSQPFLMDLEGKQGNFKNLREFVFKNIDGYFKIYSKHTPINLVRDLPQGFSALEPLVDLPIGINITRFQTLLALHRSYLTPGDSSSGWTAGAAAYYVGYLQPRTFLLKYNENGTITDAVDCALDPLSETKCTLKSFTVEKGIYQTSNFRVQPTESIVRFPNITNLCPFGEVFNATRFASVYAWNRKRISNCVADYSVLYNSASFSTFKCYGVSPTKLNDLCFTNVYADSFVIRGDEVRQIAPGQTGKIADYNYKLPDDFTGCVIAWNSNNLDSKVGGNYNYLYRLFRRSNLKPFERDISTEIYQAGSTPCNGVEGFNCYFPLQSYGFQPTNGVGYQPYRVVVLSFELLPAPATVCGPKKSTNLVKNKCVNFNFNGLTGTGVLTESNKKFLPFQQFGRDIADTTDAVRDPQTLEILDITPCSFGGVSVITPGTNTSNQVAVLYQGVNCTEVPVAIHADQLTPTWRVYSTGSNVFQTRAGCLIGAEHVNNSYECDIPIGAGICASYQTQTNSPRRARSVASQSIIAYTMSLGAENSVAYSNNSIAIPTNFTISVTTEILPVSMTKTSVDCTMYICGDSTECSNLLLQYGSFCTQLNRALTGIAVEQDKNTQEVFAQVKQIYKTPPIKDFGGFNFSQILPDPSKPSKRSFIEDLLFNKVTLADAGFIKQYGDCLGDIAARDLICAQKFNGLTVLPPLLTDEMIAQYTSALLAGTITSGWTFGAGAALQIPFAMQMAYRFNGIGVTQCVLYENQKLIANQFNSAIGKIQDSLSSAAPALGKLQDVVNQNAQALNTLVKQLSSNFGAISSVLNDILSRLDKVEAEVQIDRLITGRLQSLQTYVTQQLIRAAEIRASANLAATKMSECVLGQSKRVDFCGKGYHLMSFPQSAPHGVVFLHVTYVPAQEKNFTTAPAICHDGKAHFPREGVFVSNGTHWFVTQRNFYEPQIITTDNTFVCGNCDVVIGIVNNTVYDPLQPELDSGGSGYIPEAPRDGQAYVRKDGEWVLLSTFL

SEQ ID NO: 14013 - protein, 1177 aa, Artificial Sequence
  SARS-CoV-2/USA/WA8-UW5/2020__EPI_ISL_413486 spike protein (1-1147)(N914C_S1123C) Foldon construct
MFVFLVLLPLVSSQCVNLTTRTQLPPAYTNSFTRGVYYPDKVFRSSVLHSTQDLFLPFFSNVTWFHAIHVSGTNGTKRFDNPVLPFNDGVYFASTEKSNIIRGWIFGTTLDSKTQSLLIVNNATNVVIKVCEFQFCNDPFLGVYYHKNNKSWMESEFRVYSSANNCTFEYVSQPFLMDLEGKQGNFKNLREFVFKNIDGYFKIYSKHTPINLVRDLPQGFSALEPLVDLPIGINITRFQTLLALHRSYLTPGDSSSGWTAGAAAYYVGYLQPRTFLLKYNENGTITDAVDCALDPLSETKCTLKSFTVEKGIYQTSNFRVQPTESIVRFPNITNLCPFGEVFNATRFASVYAWNRKRISNCVADYSVLYNSASFSTFKCYGVSPTKLNDLCFTNVYADSFVIRGDEVRQIAPGQTGKIADYNYKLPDDFTGCVIAWNSNNLDSKVGGNYNYLYRLFRKSNLKPFERDISTEIYQAGSTPCNGVEGFNCYFPLQSYGFQPTNGVGYQPYRVVVLSFELLHAPATVCGPKKSTNLVKNKCVNFNFNGLTGTGVLTESNKKFLPFQQFGRDIADTTDAVRDPQTLEILDITPCSFGGVSVITPGTNTSNQVAVLYQDVNCTEVPVAIHADQLTPTWRVYSTGSNVFQTRAGCLIGAEYVNNSYECDIPIGAGICASYQTQTNSPRRARSVASQSIIAYTMSLGAENSVAYSNNSIAIPTNFTISVTTEILPVSMTKTSVDCTMYICGDSTECSNLLLQYGSFCTQLNRALTGIAVEQDKNTQEVFAQVKQIYKTPPIKDFGGFNFSQILPDPSKPSKRSFIEDLLFNKVTLADAGFIKQYGDCLGDIAARDLICAQKFNGLTVLPPLLTDEMIAQYTSALLAGTITSGWTFGAGAALQIPFAMQMAYRFNGIGVTQCVLYENQKLIANQFNSAIGKIQDSLSSTASALGKLQDVVNQNAQALNTLVKQLSSNFGAISSVLNDILSRLDKVEAEVQIDRLITGRLQSLQTYVTQQLIRAAEIRASANLAATKMSECVLGQSKRVDFCGKGYHLMSFPQSAPHGVVFLHVTYVPAQEKNFTTAPAICHDGKAHFPREGVFVSNGTHWFVTQRNFYEPQIITTDNTFVCGNCDVVIGIVNNTVYDPLQPELDSGGSGYIPEAPRDGQAYVRKDGEWVLLSTFL

SEQ ID NO: 14014 - protein, 1177 aa, Artificial Sequence
  SARS-CoV-2/England/20102000506/2020__EPI_ISL_415147 spike protein (1-1147)(N914C_S1123C) Foldon construct
MFVFLVLLPLVSSQCVNLTTRTQLPPAYTNSFTRGVYYPDKVFRSSVLHSTQDLFLPFFSNVTWFHAIHVSGTNGTKRFDNPVLPFNDGVYFASTEKSNIIRGWIFGTTLDSKTQSLLIVNNATNVVIKVCEFQFCNDPFLGVYYHKNNKSWMESEFRVYSSANNCTFEYVSQPFLMDLEGKQGNFKNLREFVFKNIDGYFKIYSKHTPINLVRDLPQGFSALEPLVDLPIGINITRFQTLLALHRSYLTPGDSSSGWTAGAAAYYVGYLQPRTFLLKYNENGTITDAVDCALDPLSETKCTLKSFTVEKGIYQTSNFRVQPTESIVRFPNITNLCPFGEVFNATRFASVYAWNRKRISNCVADYSVLYNSASFSTFKCYGVSPTKLNDLCFTNVYADSFVIRGDEVRQIAPGQTGKIADYNYKLPDDFTGCVIAWNSNNLDSKVGGNYNYLYRLFRKSNLKPFERDISTEIYQAGSTPCNGVEGFNCYFPLQSYGFQPTNGVGYQPYRVVVLSFELLHAPATVCGPKKSTNLVKNKCVNFNFNGLTGTGVLTESNKKFLPFQQFGRDIADTTDAVRDPQTLEILDITPCSFGGVSVITPGTNTSNQVAVLYQGVNCTEVPVAIHADQLTPTWRVYSTGSNVFQTRAGCLIGAEHVNNSYECDIPIGAGICASYQTQTNSPRRARSVASQSIIAYTMSLGAENSVAYSNNSIAIPTNFTISVTTEILPVSMTKTSVDCTMYICGDSTECSNLLLQYGSFCTQLNRALTGIAVEQDKNTQEVFAQVKQIYKTPPIKDFGGFNFSQILPDPSKPSKRSFIEDLLFNKVTLADAGFIKQYGYCLGDIAARDLICAQKFNGLTVLPPLLTDEMIAQYTSALLAGTITSGWTFGAGAALQIPFAMQMAYRFNGIGVTQCVLYENQKLIANQFNSAIGKIQDSLSSTASALGKLQDVVNQNAQALNTLVKQLSSNFGAISSVLNDILSRLDKVEAEVQIDRLITGRLQSLQTYVTQQLIRAAEIRASANLAATKMSECVLGQSKRVDFCGKGYHLMSFPQSAPHGVVFLHVTYVPAQEKNFTTAPAICHDGKAHFPREGVFVSNGTHWFVTQRNFYEPQIITTDNTFVCGNCDVVIGIVNNTVYDPLQPELDSGGSGYIPEAPRDGQAYVRKDGEWVLLSTFL

SEQ ID NO: 14015 - protein, 1177 aa, Artificial Sequence
  SARS-CoV-2/Belgium/VAG-03013/2020__EPI_ISL_415155 spike protein (1-1147)(N914C_S1123C) Foldon construct
MFVFLVLLPLVSSQCVNLTTRTQLPPAYTNSFTRGVYYPDKVFRSSVLHSTQDLFLPFFSNVTWFHAIHVSGTNGTKRFDNPVLPFNDGVYFASTEKSNIIRGWIFGTTLDSKTQSLLIVNNATNVVIKVCEFQFCNDPFLGVYYHKNNKSWMESEFRVYSSANNCTFEYVSQPFLMDLEGKQGNFKNLREFVFKNIDGYFKIYSKHTPINLVRDLPQGFSALEPLVDLPIGINITRFQTLLALHRSYLTPGDSSSGWTAGAAAYYVGYLQPRTFLLKYNENGTITDAVDCALDPLSETKCTLKSFTVEKGIYQTSNFRVQPTESIVRFPNITNLCPFGEVFNATRFASVYAWNRKRISNCVADYSVLYNSASFSTFKCYGVSPTKLNDLCFTNVYADSFVIRGDEVRQIAPGQTGKIADYNYKLPDDFTGCVIAWNSNNLDSKVGGNYNYLYRLFRKSNLKPFERDISTEIYQAGSTPCNGVEGFNCYFPLQSYGFQPTNGVGYQPYRVVVLSFELLHAPATVCGPKKSTNLVKNKCVNFNFNGLTGTGVLTESNKKFLPFQQFGRDIADTTDAVRDPQTLEILDITPCSFGGVSVITPGTNTSNQVAVLYQGVNCTEVPVAIHADQLTPTWRVYSTGSNVFQTRAGCLIGAEHVNNSYECDIPIGAGICASYQTQTNSPRRARSVASQSIIAYTMSLGAENSVAYSNNSIAIPTNFTISVTTEILPVSMTKTSVDCTMYICGDSTECSNLLLQYGSFCTQLNRALTGIAVEQDKNTQEVFAQVKQIYKTPPIKDFGGFNFSQILPDPSKPSKRSFIEDLLFNKVTLADAGFIKQYGDCLGDIAARDLICAQKFNGLTVLPPLLTDEMIAQYTSALLAGTITSGWTFGAGAALQIPFAMQMAYRFNGIGVTQCVLYENQKLIANQFNSAIGKIQDSLSSTATALGKLQDVVNQNAQALNTLVKQLSSNFGAISSVLNDILSRLDKVEAEVQIDRLITGRLQSLQTYVTQQLIRAAEIRASANLAATKMSECVLGQSKRVDFCGKGYHLMSFPQSAPHGVVFLHVTYVPAQEKNFTTAPAICHDGKAHFPREGVFVSNGTHWFVTQRNFYEPQIITTDNTFVCGNCDVVIGIVNNTVYDPLQPELDSGGSGYIPEAPRDGQAYVRKDGEWVLLSTFL

SEQ ID NO: 14016 - protein, 1177 aa, Artificial Sequence
  SARS-CoV-2/Belgium/BC-03016/2020__EPI_ISL_415157 spike protein (1-1147)(N914C_S1123C) Foldon construct
MFVFLVLLPLVSSQCVNLTTRTQLPPAYTNSFTRGVYYPDKVFRSSVLHSTQDLFLPFFSNVTWFHAIHVSGTNGTKRFDNPVLPFNDGVYFASTEKSNIIRGWIFGTTLDSKTQSLLIVNNATNVVIKVCEFQFCNDPFLGVYYHKNNKSWMESEFRVYSSANNCTFEYVSQPFLMDLEGKQGNFKNLREFVFKNIDGYFKIYSKHTPINLVRDLPQGFSALEPLVDLPIGINITRFQTLLALHRSYLTPGDSSSGWTAGAAAYYVGYLQPRTFLLKYNENGTITDAVDCALDPLSETKCTLKSFTVEKGIYQTSNFRVQPTESIVRFPNITNLCPFGEVFNATRFASVYAWNRKRISNCVADYSVLYNSASFSTFKCYGVSPTKLNDLCFTNVYADSFVIRGDEVRQIAPGQTGKIADYNYKLPDDFTGCVIAWNSNNLDSKVGGNYNYLYRLFRKSNLKPFERDISTEIYQAGSTPCNGVEGFNCYFPLQSYGFQPTNGVGYQPYRVVVLSFELLHAPATVCGPKKSTNLVKNKCVNFNFNGLTGTGVLTESNKKFLPFQQFGRDIADTTDAVRDPQTLEILDITPCSFGGVSVITPGTNTSNQVAVLYQGVNCTEVPVAIHADQLTPTWRVYSTGSNVFQTRAGCLIGAEHVNNSYECDIPIGAGICASYQTQTNSPRRARSVASQSIIAYTMSLGAENSVAYSNNSIAIPTNFTISVTTEILPVSMTKTSVDCTMYICGDSTECSNLLLQYGSFCTQLNRALTGIAVEQDKNTQEVFAQVKQIYKTPPIKDFGGFNFSQILPDPSKPSKRSFIEDLLFNKVTLADAGFIKQYGDCLGDIAARDLICAQKFNGLTVLPPLLTDEMIAQYTSALLAGTITSGWTFGAGAALQIPFAMQMAYRFNGIGVTQCVLYENQKLIANQFNSAIGKIQDSLSSTAPALGKLQDVVNQNAQALNTLVKQLSSNFGAISSVLNDILSRLDKVEAEVQIDRLITGRLQSLQTYVTQQLIRAAEIRASANLAATKMSECVLGQSKRVDFCGKGYHLMSFPQSAPHGVVFLHVTYVPAQEKNFTTAPAICHDGKAHFPREGVFVSNGTHWFVTQRNFYEPQIITTDNTFVCGNCDVVIGIVNNTVYDPLQPELDSGGSGYIPEAPRDGQAYVRKDGEWVLLSTFL

SEQ ID NO: 14017 - protein, 1177 aa, Artificial Sequence
  SARS-CoV-2/Germany/BavPat3/2020__EPI_ISL_414521 spike protein (1-1147)(N914C_S1123C) Foldon construct
MFVFLVLLPLVSSQCVNLTTRTQLPPAYTNSFTRGVYYPDKVFRSSVLHSTQDLFLPFFSNVTWFHAIHVSGTNGTKRFDNPVLPFNDGVYFASTEKSNIIRGWIFGTTLDSKTQSLLIVNNATNVVIKVCEFQFCNDPFLGVYYHKNNKSWMESEFRVYSSANNCTFEYVSQPFLMDLEGKQGNFKNLREFVFKNIDGYFKIYSKHTPINLVRDLPQGFSALEPLVDLPIGINITRFQTLLALHRSYLTPGDSSSGWTAGAAAYYVGYLQPRTFLLKYNENGTITDAVDCALDPLSETKCTLKSFTVEKGIYQTSNFRVQPTESIVRFPNITNLCPFGEVFNATRFASVYAWNRKRISNCVADYSVLYNSASFSTFKCYGVSPTKLNDLCFTNVYADSFVIRGDEVRQIAPGQTGKIADYNYKLPDDFTGCVIAWNSNNLDSKVGGNYNYLYRLFRKSNLKPFERDISTEIYQAGSTPCNGVEGFNCYFPLQSYGFQPTNGVGYQPYRVVVLSFELLHAPATVCGPKKSTNLVKNKCVNFNFNGLTGTGVLTESNKKFLPFQQFGRDIADTTDAVRDPQTLEILDITPCSFGGVSVITPGTNTSNQVAVLYQDVNCTEVPVAIHADQLTPTWRVYSTGSNVFQTRAGCLIGAEHVNNSYECDIPIGAGICASYQTQTNSPRRARSVASQSIIAYTMSLGAENSVAYSNNSIAIPTNFTISVTTEILPVSMTKTSVDCTMYICGDSTECSNLLLQYGSFCTQLNRALTGIAVEQDKNTQQVFAQVKQIYKTPPIKDFGGFNFSQILPDPSKPSKRSFIEDLLFNKVTLADAGFIKQYGDCLGDIAARDLICAQKFNGLTVLPPLLTDEMIAQYTSALLAGTITSGWTFGAGAALQIPFAMQMAYRFNGIGVTQCVLYENQKLIANQFNSAIGKIQDSLSSTASALGKLQDVVNQNAQALNTLVKQLSSNFGAISSVLNDILSRLDKVEAEVQIDRLITGRLQSLQTYVTQQLIRAAEIRASANLAATKMSECVLGQSKRVDFCGKGYHLMSFPQSAPHGVVFLHVTYVPAQEKNFTTAPAICHDGKAHFPREGVFVSNGTHWFVTQRNFYEPQIITTDNTFVCGNCDVVIGIVNNTVYDPLQPELDSGGSGYIPEAPRDGQAYVRKDGEWVLLSTFL

SEQ ID NO: 14018 - protein, 1177 aa, Artificial Sequence
  SARS-CoV-2/France/HF1805/2020__EPI_ISL_414628 spike protein (1-1147)(N914C_S1123C) Foldon construct
MFVFLVLLPLVSSQCVNLTTRTQLPPAYTNSFTRGVYYPDKVFRSSVLHSTQDLFLPFFSNVTWFHAIHVSGTNGTKRFDNPVLPFNDGVYFASTEKSNIIRGWIFGTTLDSKTQSLLIVNNATNVVIKVCEFQFCNDPFLGVYYHKNNKSWMESEFRVYSSANNCTFEYVSQPFLMDLEGKQGNFKNLREFVFKNIDGYFKIYSKHTPINLVRDLPQGFSALEPLVDLPIGINITRFQTLLALHRSYLTPGDSSSGWTAGAAAYYVGYLQPRTFLLKYNENGTITDAVDCALDPLSETKCTLKSFTVEKGIYQTSNFRVQPTESIVRFPNITNLCPFGEVFNATRFASVYAWNRKRISNCVADYSVLYNSASFSTFKCYGVSPTKLNDLCFTNVYADSFVIRGDEVRQIAPGQTGKIADYNYKLPDDFTGCVIAWNSNNLDSKVGGNYNYLYRLFRKSNLKPFERDISTEIYQAGSTPCNGVEGFNCYFPLQSYGFQPTNGVGYQPYRVVVLSFELLHAPATVCGPKKSTNLVKNKCVNFNFNGLTGTGVLTESNKKFLPFQQFGRDIADTTDAVRDPQTLEILDITPCSFGGVSVITPGTNTSNQVAVLYQGVNCTEVPVAIHADQLTPTWRVYSTGSNVFQTRAGCLIGAEHVNNSYECDIPIGAGICASYQTQTNSPRRARSVASQSIIAYTMSLGAENSVAYSNNSIAIPTNFTISVTTEILPVSMTKTSVDCTMYICGDSTECSNLLLQYGSFCTQLNRALTGIAVEQDKNTQEVFAQVKQIYKTPPIKDFGGFNFSQILPDPSKPSKRSFIEDLLFNKVTLADAGFIKQYGDCLGDIAARDLICAQKFNGLTVLPPLLTDEMIAQYTSALLAGTITSGWTFGAGAALQIPFAMQMAYRFNGIGVTQCVLYENQKLIANQFNSAIGKIQDSLSSTASALGKLQDVVNQNAQALNTLVKQLSSNFGAISSVLNDILSRLDKVEAEVQIDRLITGRLQSLQTYVTQQLIRAAEIRASANLAATKMSECVLGQSKRVDFCGKGYHLMSFPQSAPHGVVFLHVTYVPAQEKNFTTAPAICHDGKAHFPREGVFVSNGTHWFVTQRNFYEPQIITTDNTFVCGNCDVVIGVVNNTVYDPLQPELDSGGSGYIPEAPRDGQAYVRKDGEWVLLSTFL

SEQ ID NO: 14019 - protein, 1177 aa, Artificial Sequence
  SARS-CoV-2/Netherlands/ZuidHolland_9/2020__EPI_ISL_414445 spike protein (1-1147)(N914C_S1123C) Foldon construct
MFVFLVLLPLVSSQCVNLTTRTQLPPAYTNSFTRGVYYPDKVFRSSVLHSTQDLFLPFFSNVTWFHAIHVSGTNGTKRFDNPVLPFNDGVYFASTEKSNIIRGWIFGTTLDSKTQSLLIVNNATNVVIKVCEFQFCNDPFLGVYYHKNNKSWMESEFRVYSSANNCTFEYVSQPFLMDLEGKQGNFKNLREFVFKNIDGYFKIYSKHTPINLVRDLPQGFSALEPLVDLPIGINITRFQTLLALHRSYLTPGDSSSGWTAGAAAYYVGYLQPRTFLLKYNENGTITDAVDCALDPLSETKCTLKSFTVEKGIYQTSNFRVQPTESIVRFPNITNLCPFGEVFNATRFASVYAWNRKRISNCVADYSVLYNSASFSTFKCYGVSPTKLNDLCFTNVYADSFVIRGDEVRQIAPGQTGKIADYNYKLPDDFTGCVIAWNSNNLDSKVGGNYNYLYRLFRKSNLKPFERDISTEIYQAGSTPCNGVEGFNCYFPLQSYGFQPTNGVGYQPYRVVVLSFELLHAPATVCGPKKSTNLVKNKCVNFNFNGLTGTGVLTESNKKFLPFQQFGRDIADTTDAVRDPQTLEILDITPCSFGGVSVITPGTNTSNQVAVLYQGVNCTEVPVAIHADQLTPTWRVYSTGSNVFQTRAGCLIGAEHVNNSYECDIPIGAGICASYQTQTNSPRRARSVASQSIIAYTMSLGAENSVAYSNNSIAIPTNFTISVTTEILPVSMTKTSVDCTMYICGDSTECSNLLLQYGSFCTQLNRALTGIAVEQDKNTQEVFAQVKQIYKTPPIKDFGGFNFSQILPDPSKPSKRSFIEDLLFNKVTLADAGFIKQYGDCLGDIAARDLICVQKFNGLTVLPPLLTDEMIAQYTSALLAGTITSGWTFGAGAALQIPFAMQMAYRFNGIGVTQCVLYENQKLIANQFNSAIGKIQDSLSSTASALGKLQDVVNQNAQALNTLVKQLSSNFGAISSVLNDILSRLDKVEAEVQIDRLITGRLQSLQTYVTQQLIRAAEIRASANLAATKMSECVLGQSKRVDFCGKGYHLMSFPQSAPHGVVFLHVTYVPAQEKNFTTAPAICHDGKAHFPREGVFVSNGTHWFVTQRNFYEPQIITTDNTFVCGNCDVVIGIVNNTVYDPLQPELDSGGSGYIPEAPRDGQAYVRKDGEWVLLSTFL

SEQ ID NO: 14020 - protein, 1177 aa, Artificial Sequence
  SARS-CoV-2/Finland/FIN03032020A/2020__EPI_ISL_413602 spike protein (1-1147)(N914C_S1123C) Foldon construct
MFVFLVLLPLVSSQCVNLTTRTQLPPAYTNSFTRGVYYPDKVFRSSVLHSTQDLFLPFFSNVTWFHAIHVSGTNGTKRFDNPVLPFNDGVYFASTEKSNIIRGWIFGTTLDSKTQSLLIVNNATNVVIKVCEFQFCNDPFLGVYYHKNNKSWMESEFRVYSSANNCTFEYVSQPFLMDLEGKQGNFKNLREFVFKNIDGYFKIYSKHTPINLVRDLPQGFSALEPLVDLPIGINITRFQTLLALHRSYLTPGDSSSGWTAGAAAYYVGYLQPRTFLLKYNENGTITDAVDCALDPLSETKCTLKSFTVEKGIYQTSNFRVQPTESIVRFPNITNLCPFGEVFNATRFASVYAWNRKRISNCVADYSVLYNSASFSTFKCYGVSPTKLNDLCFTNVYADSFVIRGDEVRQIAPGQTGKIADYNYKLPDDFTGCVISWNSNNLDSKVGGNYNYLYRLFRKSNLKPFERDISTEIYQAGSTPCNGVEGFNCYFPLQSYGFQPTNGVGYQPYRVVVLSFELLHAPATVCGPKKSTNLVKNKCVNFNFNGLTGTGVLTESNKKFLPFQQFGRDIADTTDAVRDPQTLEILDITPCSFGGVSVITPGTNTSNQVAVLYQGVNCTEVPVAIHADQLTPTWRVYSTGSNVFQTRAGCLIGAEHVNNSYECDIPIGAGICASYQTQTNSPRRARSVASQSIIAYTMSLGAENSVAYSNNSIAIPTNFTISVTTEILPVSMTKTSVDCTMYICGDSTECSNLLLQYGSFCTQLNRALTGIAVEQDKNTQEVFAQVKQIYKTPPIKDFGGFNFSQILPDPSKPSKRSFIEDLLFNKVTLADAGFIKQYGDCLGDIAARDLICAQKFNGLTVLPPLLTDEMIAQYTSALLAGTITSGWTFGAGAALQIPFAMQMAYRFNGIGVTQCVLYENQKLIANQFNSAIGKIQDSLSSTASALGKLQDVVNQNAQALNTLVKQLSSNFGAISSVLNDILSRLDKVEAEVQIDRLITGRLQSLQTYVTQQLIRAAEIRASANLAATKMSECVLGQSKRVDFCGKGYHLMSFPQSAPHGVVFLHVTYVPAQEKNFTTAPAICHDGKAHFPREGVFVSNGTHWFVTQRNFYEPQIITTDNTFVCGNCDVVIGIVNNTVYDPLQPELDSGGSGYIPEAPRDGQAYVRKDGEWVLLSTFL

SEQ ID NO: 14021 - protein, 1177 aa, Artificial Sequence
  SARS-CoV-2/France/GE1977/2020__EPI_ISL_414632 spike protein (1-1147)(N914C_S1123C) Foldon construct
MFVFLVLLPLVSSQCVNLTTRTQLPPAYTNSFTRGVYYPDKVFRSSVLHSTQDLFLPFFSNVTWFHAIHVSGTNGTKRFDNPVLPFNDGVYFASTEKSNIIRGWIFGTTLDSKTQSLLIVNNATNVVIKVCEFQFCNDPFLGVYYHKNNKSWMESEFRVYSSANNCTFEYVSQPFLMDLEGKQGNFKNLREFVFKNIDGYFKIYSKHTPINLVRDLPQGFSALEPLVDLPIGINITRFQTLLALHRSYLTPGDSSSGWTAGAAAYYVGYLQPRTFLLKYNENGTITDAVDCALDPLSETKCTLKSFTVEKGIYQTSNFRVQPTESIVRFPNITNLCPFGEVFNATRFASVYAWNRKRISNCVADYSVLYNSASFSTFKCYGVSPTKLNDLCFTNVYADSFVIRGDEVRQIAPGQTGKIADYNYKLPDDFTGCVIAWNSNNLDSKVGGNYNYLYRLFRKSNLKPFERDISTEIYQAGSTPCNGVEGFNCYFPLQSYGFQPTNGVGYQPYRVVVLSFELLHAPATVCGPKKSTNLVKNKCVNFNFNGLTGTGVLTESNKKFLPFQQFGRDIADTTDAVRDPQTLEILDITPCSFGGVSVITPGTNTSNQVAVLYQGVNCTEVPVAIHADQLTPTWRVYSTGSNVFQTRAGCLIGAEHVNNSYECDIPIGAGICASYQTQTNSPRRARSVASQSIIAYTMSLGAENSVAYSNNSIAIPTNFTISVTTEILPVSMTKTSVDCTMYICGDSTECSNLLLQYGSFCTQLNRALTGIAVEQDKNTQEVFAQVKQIYKTPPIKDFGGFNFSQILPDPSKPSKRSFIEDLLFNKVTLADAGFIKQYGDCLGDIAARDLICAQKFNGLTVLPPLLTDEMIAQYTSALLAGTITSGWTFGAGAALQIPFAMQMAYRFNGIGVTQCVLYENQKLIANQFNSAIGKIQDSLFSTASALGKLQDVVNQNAQALNTLVKQLSSNFGAISSVLNDILSRLDKVEAEVQIDRLITGRLQSLQTYVTQQLIRAAEIRASANLAATKMSECVLGQSKRVDFCGKGYHLMSFPQSAPHGVVFLHVTYVPAQEKNFTTAPAICHDGKAHFPREGVFVSNGTHWFVTQRNFYEPQIITTDNTFVCGNCDVVIGIVNNTVYDPLQPELDSGGSGYIPEAPRDGQAYVRKDGEWVLLSTFL

SEQ ID NO: 14022 - protein, 1177 aa, Artificial Sequence
  SARS-CoV-2/Finland/FIN-313/2020__EPI_ISL_414641 spike protein (1-1147)(N914C_S1123C) Foldon construct
MFVFLVLLPLVSSQCVNLTTRTQLPPAYTNSFTRGVYYPDKVFRSSVLHSTQDLFLPFFSNVTWFHAIHVSGTNGTKRFDNPVLPFNDGVYFASTEKSNIIRGWIFGTTLDSKTQSLLIVNNATNVVIKVCEFQFCNDPFLGVYYHKNNKSWMESEFRVYSSANNCTFEYVSQPFLMDLEGKQGNFKNLREFVFKNIDGYFKIYSKHTPINLVRDLPQGFSALEPLVDLPIGINITRFKTLLALHRSYLTPGDSSSGWTAGAAAYYVGYLQPRTFLLKYNENGTITDAVDCALDPLSETKCTLKSFTVEKGIYQTSNFRVQPTESIVRFPNITNLCPFGEVFNATRFASVYAWNRKRISNCVADYSVLYNSASFSTFKCYGVSPTKLNDLCFTNVYADSFVIRGDEVRQIAPGQTGKIADYNYKLPDDFTGCVIAWNSNNLDSKVGGNYNYLYRLFRKSNLKPFERDISTEIYQAGSTPCNGVEGFNCYFPLQSYGFQPTNGVGYQPYRVVVLSFELLHAPATVCGPKKSTNLVKNKCVNFNFNGLTGTGVLTESNKKFLPFQQFGRDIADTTDAVRDPQTLEILDITPCSFGGVSVITPGTNTSNQVAVLYQGVNCTEVPVAIHADQLTPTWRVYSTGSNVFQTRAGCLIGAEHVNNSYECDIPIGAGICASYQTQTNSPRRARSVASQSIIAYTMSLGAENSVAYSNNSIAIPTNFTISVTTEILPVSMTKTSVDCTMYICGDSTECSNLLLQYGSFCTQLNRALTGIAVEQDKNTQEVFAQVKQIYKTPPIKDFGGFNFSQILPDPSKPSKRSFIEDLLFNKVTLADAGFIKQYGDCLGDIAARDLICAQKFNGLTVLPPLLTDEMIAQYTSALLAGTITSGWTFGAGAALQIPFAMQMAYRFNGIGVTQCVLYENQKLIANQFNSAIGKIQDSLSSTASALGKLQDVVNQNAQALNTLVKQLSSNFGAISSVLNDILSRLDKVEAEVQIDRLITGRLQSLQTYVTQQLIRAAEIRASANLAATKMSECVLGQSKRVDFCGKGYHLMSFPQSAPHGVVFLHVTYVPAQEKNFTTAPAICHDGKAHFPREGVFVSNGTHWFVTQRNFYEPQIITTDNTFVCGNCDVVIGIVNNTVYDPLQPELDSGGSGYIPEAPRDGQAYVRKDGEWVLLSTFL

SEQ ID NO: 14023 - protein, 1177 aa, Artificial Sequence
  SARS-CoV-2/Netherlands/ZuidHolland_2/2020__EPI_ISL_414556 spike protein (1-1147)(N914C_S1123C) Foldon construct
MFVFLVLLPLVSSQCVNLTTRTQLPPAYTNSFTRGVYYPDKVFRSSVLHSTQDLFLPFFSNVTWFHAIHVSGTNGTKRFDNPVLPFNDGVYFASTEKSNIIRGWIFGTTLDSKTQSLLIVNNATNVVIKVCEFQFCNDPFLGVYYHKNNKSWMESEFRVYSSANNCTFEYVSQPFLMDLEGKQGNFKNLREFVFKNIDGYFKIYSKHTPINLVRDLPQGFSALEPLVDLPIGINITRFQTLLALHRSYLTPGDSSSGWTAGAAAYYVGYLQPRTFLLKYNENGTITDAVDCALDPLSETKCTLKSFTVEKGIYQTSNFRVQPTESIVRFPNITNLCPFGEVFNATRFASVYAWNRKRISNCVADYSVLYNSASFSTFKCYGVSPTKLNDLCFTNVYADSFVIRGDEVRQIAPGQTGKIADYNYKLPDDFTGCVIAWNSNNLDSKVGGNYNYLYRLFRKSNLKPFERDISTEIYQAGSTPCNGVEGFNCYFPLQSYGFQPTNGVGYQPYRVVVLSFELLHAPATVCGPKKSTNLVKNKCVNFNFNGLTGTGVLTESNKKFLPFQQFGRDIADTTDAVRDPQTLEILDITPCSFGGVSVITPGTNTSNQVAVLYQGVNCTEVPVAIHADQLTPTWRVYSTGSNVFQTRAGCLIGAEHVNNSYECDIPIGAGICASYQTQTNSPRRARSVASQSIIAYTMSLGAENSVAYSNNSIAIPTNFTISVTTEILPVSMTKTSVDCTMYICGDSTECSNLLLQYGSFCTQLNRALTGIALEQDKNTQEVFAQVKQIYKTPPIKDFGGFNFSQILPDPSKPSKRSFIEDLLFNKVTLADAGFIKQYGDCLGDIAARDLICAQKFNGLTVLPPLLTDEMIAQYTSALLAGTITSGWTFGAGAALQIPFAMQMAYRFNGIGVTQCVLYENQKLIANQFNSAIGKIQDSLSSTASALGKLQDVVNQNAQALNTLVKQLSSNFGAISSVLNDILSRLDKVEAEVQIDRLITGRLQSLQTYVTQQLIRAAEIRASANLAATKMSECVLGQSKRVDFCGKGYHLMSFPQSAPHGVVFLHVTYVPAQEKNFTTAPAICHDGKAHFPREGVFVSNGTHWFVTQRNFYEPQIITTDNTFVCGNCDVVIGIVNNTVYDPLQPELDSGGSGYIPEAPRDGQAYVRKDGEWVLLSTFL

SEQ ID NO: 14024 - protein, 1177 aa, Artificial Sequence
  SARS-CoV-2/USA/WA-UW31/2020__EPI_ISL_414618 spike protein (1-1147)(N914C_S1123C) Foldon construct
MFVFLVLLPLVSSQCVNLTTRTQLPPAYTNSFTRGVYYPDKVFRSSVLHSTQDLFLPFFSNVTWFHAIHVSGTNGTKRFDNPVLPFNDGVYFASTEKSNIIRGWIFGTTLDSKTQSLLIVNNATNVVIKVCEFQFCNDPFLGVYYHKNNKSWMESEFRVYSSANNCTFEYVSQPFLMDLEGKQGNFKNLREFVFKNIDGYFKIYSKHTPINLVRDLPQGFSALEPLVDLPIGINITRFQTLLALHRSYLTPGDSSSGWTAGAAAYYVGYLQPRTFLLKYNENGTITDAVDCALDPLSETKCTLKSFTVEKGIYQTSNFRVQPTESIVRFPNITNLCPFGEVFNATRFASVYAWNRKRISNCVADYSVLYNSASFSTFKCYGVSPTKLNDLCFTNVYADSFVIRGDEVRQIAPGQTGKIADYNYKLPDDFTGCVIAWNSNNLDSKVGGNYNYLYRLFRKSNLKPFERDISTEIYQAGSTPCNGAEGFNCYFPLQSYGFQPTNGVGYQPYRVVVLSFELLHAPATVCGPKKSTNLVKNKCVNFNFNGLTGTGVLTESNKKFLPFQQFGRDIADTTDAVRDPQTLEILDITPCSFGGVSVITPGTNTSNQVAVLYQDVNCTEVPVAIHADQLTPTWRVYSTGSNVFQTRAGCLIGAEHVNNSYECDIPIGAGICASYQTQTNSPRRARSVASQSIIAYTMSLGAENSVAYSNNSIAIPTNFTISVTTEILPVSMTKTSVDCTMYICGDSTECSNLLLQYGSFCTQLNRALTGIAVEQDKNTQEVFAQVKQIYKTPPIKDFGGFNFSQILPDPSKPSKRSFIEDLLFNKVTLADAGFIKQYGDCLGDIAARDLICAQKFNGLTVLPPLLTDEMIAQYTSALLAGTITSGWTFGAGAALQIPFAMQMAYRFNGIGVTQCVLYENQKLIANQFNSAIGKIQDSLSSTASALGKLQDVVNQNAQALNTLVKQLSSNFGAISSVLNDILSRLDKVEAEVQIDRLITGRLQSLQTYVTQQLIRAAEIRASANLAATKMSECVLGQSKRVDFCGKGYHLMSFPQSAPHGVVFLHVTYVPAQEKNFTTAPAICHDGKAHFPREGVFVSNGTHWFVTQRNFYEPQIITTDNTFVCGNCDVVIGIVNNTVYDPLQPELDSGGSGYIPEAPRDGQAYVRKDGEWVLLSTFL

SEQ ID NO: 14025 - protein, 1177 aa, Artificial Sequence
  SARS-CoV-2/South Korea/SNU01/2020__EPI_ISL_411929 spike protein (1-1147)(N914C_S1123C) Foldon construct
MFVFLVLLPLVSSQCVNLTTRTQLPPAYTNSFTRGVYYPDKVFRSSVLHSTQDLFLPFFSNVTWFHAIHVSGTNGTKRFDNPVLPFNDGVYFASTEKSNIIRGWIFGTTLDSKTQSLLIVNNATNVVIKVCEFQFCNDPFLGVYYHKNNKSWMESEFRVYSSANNCTFEYVSQPFLMDLEGKQGNFKNLREFVFKNIDGYFKIYSKHTPINLVRDLPQGFWALEPLVDLPIGINITRFQTLLALHRSYLTPGDSSSGWTAGAAAYYVGYLQPRTFLLKYNENGTITDAVDCALDPLSETKCTLKSFTVEKGIYQTSNFRVQPTESIVRFPNITNLCPFGEVFNATRFASVYAWNRKRISNCVADYSVLYNSASFSTFKCYGVSPTKLNDLCFTNVYADSFVIRGDEVRQIAPGQTGKIADYNYKLPDDFTGCVIAWNSNNLDSKVGGNYNYLYRLFRKSNLKPFERDISTEIYQAGSTPCNGVEGFNCYFPLQSYGFQPTNGVGYQPYRVVVLSFELLHAPATVCGPKKSTNLVKNKCVNFNFNGLTGTGVLTESNKKFLPFQQFGRDIADTTDAVRDPQTLEILDITPCSFGGVSVITPGTNTSNQVAVLYQDVNCTEVPVAIHADQLTPTWRVYSTGSNVFQTRAGCLIGAEHVNNSYECDIPIGAGICASYQTQTNSPRRARSVASQSIIAYTMSLGAENSVAYSNNSIAIPTNFTISVTTEILPVSMTKTSVDCTMYICGDSTECSNLLLQYGSFCTQLNRALTGIAVEQDKNTQEVFAQVKQIYKTPPIKDFGGFNFSQILPDPSKPSKRSFIEDLLFNKVTLADAGFIKQYGDCLGDIAARDLICAQKFNGLTVLPPLLTDEMIAQYTSALLAGTITSGWTFGAGAALQIPFAMQMAYRFNGIGVTQCVLYENQKLIANQFNSAIGKIQDSLSSTASALGKLQDVVNQNAQALNTLVKQLSSNFGAISSVLNDILSRLDKVEAEVQIDRLITGRLQSLQTYVTQQLIRAAEIRASANLAATKMSECVLGQSKRVDFCGKGYHLMSFPQSAPHGVVFLHVTYVPAQEKNFTTAPAICHDGKAHFPREGVFVSNGTHWFVTQRNFYEPQIITTDNTFVCGNCDVVIGIVNNTVYDPLQPELDSGGSGYIPEAPRDGQAYVRKDGEWVLLSTFL

SEQ ID NO: 14026 - protein, 1177 aa, Artificial Sequence
  SARS-CoV-2/China/WF0004/2020__EPI_ISL_413694 spike protein (1-1147)(N914C_S1123C) Foldon construct
MFVFLVLLPLVSSQCVNLTTRTQLPPAYTNSFTRGVYYPDKVFRSSVLHSTQDLFLPFFSNVTWFHAIHVSGTNGTKRFDNPVLPFNDGVYFASTEKSNIIRGWIFGTTLDSKTQSLLIVNNATNVVIKVCEFQFCNDPFLGVYYHKNNKSWTESEFRVYSSANNCTFEYVSQPFLMDLEGKQGNFKNLREFVFKNIDGYFKIYSKHTPINLVRDLPQGFSALEPLVDLPIGINITRFQTLLALHRSYLTPGDSSSGWTAGAAAYYVGYLQPRTFLLKYNENGTITDAVDCALDPLSETKCTLKSFTVEKGIYQTSNFRVQPTESIVRFPNITNLCPFGEVFNATRFASVYAWNRKRISNCVADYSVLYNSASFSTFKCYGVSPTKLNDLCFTNVYADSFVIRGDEVRQIAPGQTGKIADYNYKLPDDFTGCVIAWNSNNLDSKVGGNYNYLYRLFRKSNLKPFERDISTEIYQAGSTPCNGVEGFNCYFPLQSYGFQPTNGVGYQPYRVVVLSFELLHAPATVCGPKKSTNLVKNKCVNFNFNGLTGTGVLTESNKKFLPFQQFGRDIADTTDAVRDPQTLEILDITPCSFGGVSVITPGTNTSNQVAVLYQDVNCTEVPVAIHADQLTPTWRVYSTGSNVFQTRAGCLIGAEHVNNSYECDIPIGAGICASYQTQTNSPRRARSVASQSIIAYTMSLGAENSVAYSNNSIAIPTNFTISVTTEILPVSMTKTSVDCTMYICGDSTECSNLLLQYGSFCTQLNRALTGIAVEQDKNTQEVFAQVKQIYKTPPIKDFGGFNFSQILPDPSKPSKRSFIEDLLFNKVTLADAGFIKQYGDCLGDIAARDLICAQKFNGLTVLPPLLTDEMIAQYTSALLAGTITSGWTFGAGAALQIPFAMQMAYRFNGIGVTQCVLYENQKLIANQFNSAIGKIQDSLSSTASALGKLQDVVNQNAQALNTLVKQLSSNFGAISSVLNDILSRLDKVEAEVQIDRLITGRLQSLQTYVTQQLIRAAEIRASANLAATKMSECVLGQSKRFDFCGKGYHLMSFPQSAPHGVVFLHVTYVPAQEKNFTTAPAICHDGKAHFPREGVFVSNGTHWFVTQRNFYEPQIITTDNTFVCGNCDVVIGIVNNTVYDPLQPELDSGGSGYIPEAPRDGQAYVRKDGEWVLLSTFL

SEQ ID NO: 14027 - protein, 1177 aa, Artificial Sequence
  SARS-CoV-2/China/WF0028/2020__EPI_ISL_413791 spike protein (1-1147)(N914C_S1123C) Foldon construct
MFVFLVLLPLVSSQCVNLTTRTQLPPAYTNSFTRGVYYPDKVFRSSVLHSTQDLFLPFFSNVTWFHAIHVSGTNGTKRFDNPVLPFNDGVYFASTEKSNIIRGWIFGTTLDSKTQSLLIVNNATNVVIKVCEFQFCNDPFLGVYYHKNNKSWMESEFRVYSSANNCTFEYVSQPFLMDLEGKQGNFKNLREFVFKNIDGYFKIYSKHTPINLVRDLPQGFSALEPLVDLPIGINITRFQTLLALHRSYLTPGDSSSGWTAGAAAYYVGYLQPRTFLLKYNENGTITDAVDCALDPLSETKCTLKSFTVEKGIYQTSNFRVQPTESIVRFPNITNLCPFGEVFNATRFASVYAWNRKRISNCVADYSVLYNSASFSTFKCYGVSPTKLNDLCFTNVYADSFVIRGDEVRQIAPGQTGKIADYNYKLPDDFTGCVIAWNSNNLDSKVGGNYNYLYRLFRKSNLKPFERDISTEIYQAGSTPCNGVEGFNCYFPLQSYGFQPTNGVGYQPYRVVVLSFELLHAPATVCGPKKSTNLVKNKCVNFNFNGLTGTGVLTESNKKFLPFQQFGRDIADTTDAVRDPQTLEILDITPCSFGGVSVITPGTNTSNQVAVLYQDVNCTEVPVAIHADQLTPTWRVYSTGSNVFQTRAGCLIGAEHVNNSYECDIPIGAGICASYQTQTNSPRRARSVASQSIIAYTMSLGAENSVAYSNNSIAIPTNFTISVTTEILPVSMTKTSVDCTMYICGDSTECSNLLLQYGSFCTQLNRALTGIAVEQDKNTQEVFAQVKQIYKTPPIKDFGGFNFSQILPDPSKPSKRSFIEDLLFNKVTLADAGFIKQYGDCLGDIAARDLICAQKFNGLTVLPPLLTDEMIAQYTSALLAGTITSGWTFGAGAALQIPFAMQMAYRFNGIGVTQCVLYENQKLIANQFNSAIGKIQDSLSSTASALGKLQDVVNQNAQALNTLVKQLSSNFGAISSVLNDILSRLDKVEAEVQIDRLITGRLQSLQTYVTQQLIRAAEIRASANLAATKMSECVLGQSKRVDFCGKGYHLMSFPQSAPHGVVFLHVTYVPAQEKNFTTAPAICHDGKAHFPREGVFVSNGTHWFVTQRNFYEPQIITTDNTFVCGNCDVVIGIVNNTVYDPLQPELESGGSGYIPEAPRDGQAYVRKDGEWVLLSTFL

SEQ ID NO: 14028 - protein, 1177 aa, Artificial Sequence
  SARS-CoV-2/2019-nCoV/USA-CruiseA-18/2020__MT159716.1 spike protein (1-1147)(N914C_S1123C) Foldon construct
MFVFLVLLPLVSSQCVNLTTRTQLPPAYTNSFTRGVYYPDKVFRSSVLHSTQDLFLPFFSNVTWFHAIHVSGTNGTKRFDNPVLPFNDGVYFASTEKSNIIRGWIFGTTLDSKTQSLLIVNNATNVVIKVCEFQFCNDPFLGVYYHKNNKSWMESELRVYSSANNCTFEYVSQPFLMDLEGKQGNFKNLREFVFKNIDGYFKIYSKHTPINLVRDLPQGFSALEPLVDLPIGINITRFQTLLALHRSYLTPGDSSSGWTAGAAAYYVGYLQPRTFLLKYNENGTITDAVDCALDPLSETKCTLKSFTVEKGIYQTSNFRVQPTESIVRFPNITNLCPFGEVFNATRFASVYAWNRKRISNCVADYSVLYNSASFSTFKCYGVSPTKLNDLCFTNVYADSFVIRGDEVRQIAPGQTGKIADYNYKLPDDFTGCVIAWNSNNLDSKVGGNYNYLYRLFRKSNLKPFERDISTEIYQAGSTPCNGVEGFNCYFPLQSYGFQPTNGVGYQPYRVVVLSFELLHAPATVCGPKKSTNLVKNKCVNFNFNGLTGTGVLTESNKKFLPFQQFGRDIADTTDAVRDPQTLEILDITPCSFGGVSVITPGTNTSNQVAVLYQDVNCTEVPVAIHADQLTPTWRVYSTGSNVFQTRAGCLIGAEHVNNSYECDIPIGAGICASYQTQTNSPRRARSVASQSIIAYTMSLGAENSVAYSNNSIAIPTNFTISVTTEILPVSMTKTSVDCTMYICGDSTECSNLLLQYGSFCTQLNRALTGIAVEQDKNTQEVFAQVKQIYKTPPIKDFGGFNFSQILPDPSKPSKRSFIEDLLFNKVTLADAGFIKQYGDCLGDIAARDLICAQKFNGLTVLPPLLTDEMIAQYTSALLAGTITSGWTFGAGAALQIPFAMQMAYRFNGIGVTQCVLYENQKLIANQFNSAIGKIQDSLSSTASALGKLQDVVNQNAQALNTLVKQLSSNFGAISSVLNDILSRLDKVEAEVQIDRLITGRLQSLQTYVTQQLIRAAEIRASANLAATKMSECVLGQSKRVDFCGKGYHLMSFPQSAPHGVVFLHVTYVPAQEKNFTTAPAICHDGKAHFPREGVFVSNGTHWFVTQRNFYEPQIITTDNTFVCGNCDVVIGIVNNTVYDPLQPELDSGGSGYIPEAPRDGQAYVRKDGEWVLLSTFL

SEQ ID NO: 14029 - protein, 1177 aa, Artificial Sequence
  SARS-CoV-2/SARS-CoV-2/Yunnan-01/human/2020/CHN__MT049951.1 spike protein (1-1147)(N914C_S1123C) Foldon construct
MFVFLVLLPLVSSQCVNLTTRTQLPPANTNSFTRGVYYPDKVFRSSVLHSTQDLFLPFFSNVTWFHAIHVSGTNGTKRFDNPVLPFNDGVYFASTEKSNIIRGWIFGTTLDSKTQSLLIVNNATNVVIKVCEFQFCNDPFLGVYYHKNNKSWMESEFRVYSSANNCTFEYVSQPFLMDLEGKQGNFKNLREFVFKNIDGYFKIYSKHTPINLVRDLPQGFSALEPLVDLPIGINITRFQTLLALHRSYLTPGDSSSGWTAGAAAYYVGYLQPRTFLLKYNENGTITDAVDCALDPLSETKCTLKSFTVEKGIYQTSNFRVQPTESIVRFPNITNLCPFGEVFNATRFASVYAWNRKRISNCVADYSVLYNSASFSTFKCYGVSPTKLNDLCFTNVYADSFVIRGDEVRQIAPGQTGKIADYNYKLPDDFTGCVIAWNSNNLDSKVGGNYNYLYRLFRKSNLKPFERDISTEIYQAGSTPCNGVEGFNCYFPLQSYGFQPTNGVGYQPYRVVVLSFELLHAPATVCGPKKSTNLVKNKCVNFNFNGLTGTGVLTESNKKFLPFQQFGRDIADTTDAVRDPQTLEILDITPCSFGGVSVITPGTNTSNQVAVLYQDVNCTEVPVAIHADQLTPTWRVYSTGSNVFQTRAGCLIGAEHVNNSYECDIPIGAGICASYQTQTNSPRRARSVASQSIIAYTMSLGAENSVAYSNNSIAIPTNFTISVTTEILPVSMTKTSVDCTMYICGDSTECSNLLLQYGSFCTQLNRALTGIAVEQDKNTQEVFAQVKQIYKTPPIKDFGGFNFSQILPDPSKPSKRSFIEDLLFNKVTLADAGFIKQYGDCLGDIAARDLICAQKFNGLTVLPPLLTDEMIAQYTSALLAGTITSGWTFGAGAALQIPFAMQMAYRFNGIGVTQCVLYENQKLIANQFNSAIGKIQDSLSSTASALGKLQDVVNQNAQALNTLVKQLSSNFGAISSVLNDILSRLDKVEAEVQIDRLITGRLQSLQTYVTQQLIRAAEIRASANLAATKMSECVLGQSKRVDFCGKGYHLMSFPQSAPHGVVFLHVTYVPAQEKNFTTAPAICHDGKAHFPREGVFVSNGTHWFVTQRNFYEPQIITTDNTFVCGNCDVVIGIVNNTVYDPLQPELDSGGSGYIPEAPRDGQAYVRKDGEWVLLSTFL

SEQ ID NO: 14030 - protein, 1177 aa, Artificial Sequence
  SARS-CoV-2/USA/WA-UW292/2020__EPI_ISL_418077 spike protein (1-1147)(N914C_S1123C) Foldon construct
MFVFLVLLPLVSSQCVNLTTRTQLPPAYTNSFTRGVYYPDKVFRSSVLHSTQDLFLPFFSNVTWFHAIHVSGTNGTKRFDNPVLPFNDGVYFASTEKSNIIRGWIFGTTLDSKTQSLLIVNNATNVVIKVCEFQFCNDPFLGVYYHKNNKSWMESEFRVYSSANNCTFEYVSQPFLMDLEGKQGNFKNLREFVFKNIDGYFKIYSKHTPINLVRDLPQGFSALEPLVDLPIGINITRFQTLLALHRSYLTPGDSSSGWTAGAAAYYVGYLQPRTFLLKYNENGTITDAVDCALDPLSETKCTLKSFTVEKGIYQTSNFRVQPTESIVRFPNITNLCPFGEVFNATRFASVYAWNRKRISNCVADYSVLYNSASFSTFKCYGVSPTKLNDLCFTNVYADSFVIRGDEVRQIAPGQTGKIADYNYKLPDDFTGCVIAWNSNNLDSKVGGNYNYLYRLFRKSNLKPFERDISTEIYQASSTPCNGVEGFNCYFPLQSYGFQPTNGVGYQPYRVVVLSFELLHAPATVCGPKKSTNLVKNKCVNFNFNGLTGTGVLTESNKKFLPFQQFGRDIADTTDAVRDPQTLEILDITPCSFGGVSVITPGTNTSNQVAVLYQDVNCTEVPVAIHADQLTPTWRVYSTGSNVFQTRAGCLIGAEHVNNSYECDIPIGAGICASYQTQTNSPRRARSVASQSIIAYTMSLGAENSVAYSNNSIAIPTNFTISVTTEILPVSMTKTSVDCTMYICGDSTECSNLLLQYGSFCTQLNRALTGIAVEQDKNTQEVFAQVKQIYKTPPIKDFGGFNFSQILPDPSKPSKRSFIEDLLFNKVTLADAGFIKQYGDCLGDIAARDLICAQKFNGLTVLPPLLTDEMIAQYTSALLAGTITSGWTFGAGAALQIPFAMQMAYRFNGIGVTQCVLYENQKLIANQFNSAIGKIQDSLSSTASALGKLQDVVNQNAQALNTLVKQLSSNFGAISSVLNDILSRLDKVEAEVQIDRLITGRLQSLQTYVTQQLIRAAEIRASANLAATKMSECVLGQSKRVDFCGKGYHLMSFPQSAPHGVVFLHVTYVPAQEKNFTTAPAICHDGKAHFPREGVFVSNGTHWFVTQRNFYEPQIITTDNTFVCGNCDVVIGIVNNTVYDPLQPELDSGGSGYIPEAPRDGQAYVRKDGEWVLLSTFL

SEQ ID NO: 14031 - protein, 1177 aa, Artificial Sequence
  SARS-CoV-2/Iceland/192/2020__EPI_ISL_417819 spike protein (1-1147)(N914C_S1123C) Foldon construct
MFVFFVLLPLVSSQCVNLTTRTQLPPAYTNSFTRGVYYPDKVFRSSVLHSTQDLFLPFFSNVTWFHAIHVSGTNGTKRFDNPVLPFNDGVYFASTEKSNIIRGWIFGTTLDSKTQSLLIVNNATNVVIKVCEFQFCNDPFLGVYYHKNNKSWMESEFRVYSSANNCTFEYVSQPFLMDLEGKQGNFKNLREFVFKNIDGYFKIYSKHTPINLVRDLPQGFSALEPLVDLPIGINITRFQTLLALHRSYLTPGDSSSGWTAGAAAYYVGYLQPRTFLLKYNENGTITDAVDCALDPLSETKCTLKSFTVEKGIYQTSNFRVQPTESIVRFPNITNLCPFGEVFNATRFASVYAWNRKRISNCVADYSVLYNSASFSTFKCYGVSPTKLNDLCFTNVYADSFVIRGDEVRQIAPGQTGKIADYNYKLPDDFTGCVIAWNSNNLDSKVGGNYNYLYRLFRKSNLKPFERDISTEIYQAGSTPCNGVEGFNCYFPLQSYGFQPTNGVGYQPYRVVVLSFELLHAPATVCGPKKSTNLVKNKCVNFNFNGLTGTGVLTESNKKFLPFQQFGRDIADTTDAVRDPQTLEILDITPCSFGGVSVITPGTNTSNQVAVLYQGVNCTEVPVAIHADQLTPTWRVYSTGSNVFQTRAGCLIGAEHVNNSYECDIPIGAGICASYQTQTNSPRRARSVASQSIIAYTMSLGAENSVAYSNNSIAIPTNFTISVTTEILPVSMTKTSVDCTMYICGDSTECSNLLLQYGSFCTQLNRALTGIAVEQDKNTQEVFAQVKQIYKTPPIKDFGGFNFSQILPDPSKPSKRSFIEDLLFNKVTLADAGFIKQYGDCLGDIAARDLICAQKFNGLTVLPPLLTDEMIAQYTSALLAGTITSGWTFGAGAALQIPFAMQMAYRFNGIGVTQCVLYENQKLIANQFNSAIGKIQDSLSSTASALGKLQDVVNQNAQALNTLVKQLSSNFGAISSVLNDILSRLDKVEAEVQIDRLITGRLQSLQTYVTQQLIRAAEIRASANLAATKMSECVLGQSKRVDFCGKGYHLMSFPQSAPHGVVFLHVTYVPAQEKNFTTAPAICHDGKAHFPREGVFVSNGTHWFVTQRNFYEPQIITTDNTFVCGNCDVVIGIVNNTVYDPLQPELDSGGSGYIPEAPRDGQAYVRKDGEWVLLSTFL

SEQ ID NO: 14032 - protein, 1177 aa, Artificial Sequence
  SARS-CoV-2/Belgium/ULG-6939/2020__EPI_ISL_417020 spike protein (1-1147)(N914C_S1123C) Foldon construct
MFVFLVLLPLVSSQCVNLTTRTQLPPAYTNSFTRGVYYPDKVFRSSVLHSTQDLFLPFFSNVTWFHAIHVSGTNGTKRFDNPVLPFNDGVYFASTEKSNIIRGWIFGTTLDSKTQSLLIVNNATNVVIKVCEFQFCNDPFLGVYYHKNNKSWMESEFRVYSSANNCTFEYVSQPFLMDLEGKQGNFKNLREFVFKNIDGYFKIYSKHTPINLVRDLPQGFSALEPLVDLPIGINITRFQTLLALHRSYLTPGDSSSGWTAGAAAYYVGYLQPRTFLLKYNENGTITDAVDCALDPLSETKCTLKSFTVEKGIYQTSNFRVQPTESIVRFPNITNLCPFGEVFNATRFASVYAWNRKRISNCVADYSVLYNSASFSTFKCYGVSPTKLNDLCFTNVYADSFVIRGDEVRQIAPGQTGKIADYNYKLPDDFTGCVIAWNSNNLDSKVGGNYNYLYRLFRKSNLKPFERDISTEIYQAGSTPCNGVEGFNCYFPLQSYGFQPTNGVGYQPYRVVVLSFELLHAPATVCGPKKSTNLVKNKCVNFNFNGLTGTGVLTESNKKFLPFQQFGRDIADTTDAVRDPQTLEILDITPCSFGGVSVITPGTNTSNQVAVLYQGVNCTEVPVAIHADQLTPTWRVYSTGSNVFQTRAGCLIGAEHVNNSYECDIPIGAGICASYQTQTNSPRRARSVASQSIIAYTMSLGAENSVVYSNNSIAIPTNFTISVTTEILPVSMTKTSVDCTMYICGDSTECSNLLLQYGSFCTQLNRALTGIAVEQDKNTQEVFAQVKQIYKTPPIKDFGGFNFSQILPDPSKPSKRSFIEDLLFNKVTLADAGFIKQYGDCLGDIAARDLICAQKFNGLTVLPPLLTDEMIAQYTSALLAGTITSGWTFGAGAALQIPFAMQMAYRFNGIGVTQCVLYENQKLIANQFNSAIGKIQDSLSSTASALGKLQDVVNQNAQALNTLVKQLSSNFGAISSVLNDILSRLDKVEAEVQIDRLITGRLQSLQTYVTQQLIRAAEIRASANLAATKMSECVLGQSKRVDFCGKGYHLMSFPQSAPHGVVFLHVTYVPAQEKNFTTAPAICHDGKAHFPREGVFVSNGTHWFVTQRNFYEPQIITTDNTFVCGNCDVVIGIVNNTVYDPLQPELDSGGSGYIPEAPRDGQAYVRKDGEWVLLSTFL

SEQ ID NO: 14033 - protein, 1177 aa, Artificial Sequence
  SARS-CoV-2/France/HF2496/2020__EPI_ISL_418231 spike protein (1-1147)(N914C_S1123C) Foldon construct
MFVFLVLLPLVSSQCVNLTTRTQLPPAYTNSFTRGVYYPDKVFRSSVLHSTQDLFLPFFSNVTWFHAIHVSGTNGTKRFDNPVLPFNDGVYFASTEKSNIIRGWIFGTTLDSKTQSLLIVNNATNVVIKVCEFQFCNDPFLGVYYHKNNKSWMESEFRVYSSANNCTFEYVSQPFLMDLEGKQGNFKNLREFVFKNIDGYFKIYSKHTPINLVRDLPQGFSALEPLVDLPIGINITRFQTLLALHRSYLTPGDSSSGWTAGAAAYYVGYLQPRTFLLKYNENGTITDAVDCALDPLSETKCTLKSFTVEKGIYQTSNFRVQPTESIVRFPNITNLCPFGEVFNATRFASVYAWNRKRISNCVADYSVLYNSASFSTFKCYGVSPTKLNDLCFTNVYADSFVIRGDEVRQIAPGQTGKIADYNYKLPDDFTGCVIAWNSNNLDSKVGGNYNYLYRLFRKSNLKPFERDISTEIYQAGSTPCNGVEGFNCYFPLQSYGFQPTNGVGYQPYRVVVLSFELLHAPATVCGPKKSTNLVKNKCVNFNFNGLTGTGVLTESNKKFLPFQQFGRDIADTTDAVRDPQTLEILDITPCSFGGVSVITPGTNTSNQVAVLYQGVNCTEVPVAIHADQLTPTWRVYSTGSNVFQTRAGCLIGAEHVNNSYECDIPIGAGICASYQTQTNSPRRARSVASQSIIAYTMSLGAENSVAYSNNSIAIPTNFTISVTTEILPVSMTKTSVDCTMYICGDSTECSNLLLQYGSFCTQLNRALTGIAVEQDKNTQEVFAQVKQIYKTPPIKDFGGFNFSQILPDPSKPSKRSFIEDLLFNKVTLADAGFIKQYGDCLGDIVARDLICAQKFNGLTVLPPLLTDEMIAQYTSALLAGTITSGWTFGAGAALQIPFAMQMAYRFNGIGVTQCVLYENQKLIANQFNSAIGKIQDSLSSTASALGKLQDVVNQNAQALNTLVKQLSSNFGAISSVLNDILSRLDKVEAEVQIDRLITGRLQSLQTYVTQQLIRAAEIRASANLAATKMSECVLGQSKRVDFCGKGYHLMSFPQSAPHGVVFLHVTYVPAQEKNFTTAPAICHDGKAHFPREGVFVSNGTHWFVTQRNFYEPQIITTDNTFVCGNCDVVIGIVNNTVYDPLQPELDSGGSGYIPEAPRDGQAYVRKDGEWVLLSTFL

SEQ ID NO: 14034 - protein, 1177 aa, Artificial Sequence
  SARS-CoV-2/USA/WA-UW291/2020__EPI_ISL_418076 spike protein (1-1147)(N914C_S1123C) Foldon construct
MFVFLVLLPLVSSQCVNLTTRTQLPPAYTNSFTRGVYYPDKVFRSSVLHSTQDLFLPFFSNVTWFHAIHVSGTNGTKRFDNPVLPFNDGVYFASTEKSNIIRGWIFGTTLDSKTQSLLIVNNATNVVIKVCEFQFCNDPFLGVYYHKNNKSWMESEFRVYSSANNCTFEYVSQPFLMDLEGKQGNFKNLREFVFKNIDGYFKIYSKHTPINLVRDLPQGFSALEPLVDLPIGINITRFQTLLALHRSYLTPGDSSSGWTAGAAAYYVGYLQPRTFLLKYNENGTITDAVDCALDPLSETKCTLKSFTVEKGIYQTSNFRVQPTESIVRFPNITNLCPFGEVFNATRFASVYAWNRKRISNCVADYSVLYNSASFSTFKCYGVSPTKLNDLCFTNVYADSFVIRGDEVRQIAPGQTGKIADYNYKLPDDFTGCVIAWNSNNLDSKVGGNYNYLYRLFRKSNLKPFERDISTEIYQAGSTPCNGVEGFNCYFPLQSYGFQPTNGVGYQPYRVVVLSFELLHAPATVCGPKKSTNLVKNKCVNFNFNGLTGTGVLTESNKKFLPFQQFGRDIADTTDAVRDPQTLEILDITPCSFGGVSVITPGTNTSNQVAVLYQGVNCTEVPVAIHADQLTPTWRVYSTGSNVFQTRAGCLIGAEHVNNSYECDIPIGAGICASYQTQTNSPRRARSVASQSIIAYTMSLGAENSVAYSNNSIAIPTNFTISVTTEILPVSMTKTSVDCTMYICGDSTECSNLLLQYGSFCTQLNRALTGIAVEQDKNTQEVFAQVKQIYKTPPIKDFGGFNFSQILPDPSKPSKRSFIEDLLFNKVTLADAGFIKQYGDCLGDIAARDLICAQKFNGLTVLPPLLTDEMIAQYTSALLAGTITSGWTFGAGAALQIPFAMQMAYRFNGIGVTQCVLYENQKLIANQFNSAIGKIQYSLSSTASALGKLQDVVNQNAQALNTLVKQLSSNFGAISSVLNDILSRLDKVEAEVQIDRLITGRLQSLQTYVTQQLIRAAEIRASANLAATKMSECVLGQSKRVDFCGKGYHLMSFPQSAPHGVVFLHVTYVPAQEKNFTTAPAICHDGKAHFPREGVFVSNGTHWFVTQRNFYEPQIITTDNTFVCGNCDVVIGIVNNTVYDPLQPELDSGGSGYIPEAPRDGQAYVRKDGEWVLLSTFL

SEQ ID NO: 14035 - protein, 1177 aa, Artificial Sequence; identical to SEQ ID NO: 13998
  SARS-CoV-2/Portugal/PT0034/2020__EPI_ISL_418019 spike protein (1-1147)(N914C_S1123C) Foldon construct

SEQ ID NO: 14036 - protein, 1177 aa, Artificial Sequence; identical to SEQ ID NO: 13990
  SARS-CoV-2/Iceland/202/2020__EPI_ISL_417750 spike protein (1-1147)(N914C_S1123C) Foldon construct

SEQ ID NO: 14037 - protein, 1177 aa, Artificial Sequence
  SARS-CoV-2/USA/WA-UW261/2020__EPI_ISL_418046 spike protein (1-1147)(N914C_S1123C) Foldon construct
MFVFLVLLPLVSSQCVNLTTRTQLPPAYTNSFTRGVYYPDKVFRSSVLHSTQDLFLPFFSNVTWFHAIHVSGTNGTKRFDNPVLPFNDGVYFASTEKSNIIRGWIFGTTLDSKTQSLLIVNNATNVVIKVCEFQFCNDPFLGVYYHKNNKSWMESEFRVYSSANNCTFEYVSQPFLMDLEGKQGNFKNLREFVFKNIDGYFKIYSKHTPINLVRDLPQGFSALEPLVDLPIGINITRFQTLLALHRSYLTPGDSSSGWTAGAAAYYVGYLQPRTFLLKYNENGTITDAVDCALDPLSETKCTLKSFTVEKGIYQTSNFRVQPTESIVRFPNITNLCPFGEVFNATRFTSVYAWNRKRISNCVADYSVLYNSASFSTFKCYGVSPTKLNDLCFTNVYADSFVIRGDEVRQIAPGQTGKIADYNYKLPDDFTGCVIAWNSNNLDSKVGGNYNYLYRLFRKSNLKPFERDISTEIYQAGSTPCNGVEGFNCYFPLQSYGFQPTNGVGYQPYRVVVLSFELLHAPATVCGPKKSTNLVKNKCVNFNFNGLTGTGVLTESNKKFLPFQQFGRDIADTTDAVRDPQTLEILDITPCSFGGVSVITPGTNTSNQVAVLYQDVNCTEVPVAIHADQLTPTWRVYSTGSNVFQTRAGCLIGAEHVNNSYECDIPIGAGICASYQTQTNSPRRARSVASQSIIAYTMSLGAENSVAYSNNSIAIPTNFTISVTTEILPVSMTKTSVDCTMYICGDSTECSNLLLQYGSFCTQLNRALTGIAVEQDKNTQEVFAQVKQIYKTPPIKDFGGFNFSQILPDPSKPSKRSFIEDLLFNKVTLADAGFIKQYGDCLGDIAARDLICAQKFNGLTVLPPLLTDEMIAQYTSALLAGTITSGWTFGAGAALQIPFAMQMAYRFNGIGVTQCVLYENQKLIANQFNSAIGKIQDSLSSTASALGKLQDVVNQNAQALNTLVKQLSSNFGAISSVLNDILSRLDKVEAEVQIDRLITGRLQSLQTYVTQQLIRAAEIRASANLAATKMSECVLGQSKRVDFCGKGYHLMSFPQSAPHGVVFLHVTYVPAQEKNFTTAPAICHDGKAHFPREGVFVSNGTHWFVTQRNFYEPQIITTDNTFVCGNCDVVIGIVNNTVYDPLQPELDSGGSGYIPEAPRDGQAYVRKDGEWVLLSTFL

SEQ ID NO: 14038 - protein, 1177 aa, Artificial Sequence
  SARS-CoV-2/Portugal/PT0035/2020__EPI_ISL_418020 spike protein (1-1147)(N914C_S1123C) Foldon construct
MFVFLVLLPLVSSQCVNLTTRTQLPPAYTNSFTRGVYYPDKVFRSSVLHSTQDLFLPFFSNVTWFHAIHVSGTNGTKRFDNPVLPFNDGVYFASTEKSNIIRGWIFGTTLDSKTQSLLIVNNATNVVIKVCEFQFCNDPFLGVYYHKNNKSWMESEFRVYSSANNCTFEYVSQPFLMDLEGKQGNFKNLREFVFKNIDGYFKIYSKHTPINLVRDLPQGFSALEPLVDLPIGINITRFQTLLALHRSYLTPGDSSSGWTAGAAAYYVGYLQPRTFLLKYNENGTITDAVDCALDPLSETKCTLKSFTVEKGIYQTSNFRVQPTESIVRFPNITNLCPFGEVFNATRFASVYAWNRKRISNCVADYSVLYNSASFSTFKCYGVSPTKLNDLCFTNVYADSFVIRGDEVRQIAPGQTGKIADYNYKLPDDFTGCVIAWNSNNLDSKVGGNYNYLYRLFRKSNLKPFERDISTEIYQAGSTPCNGVEGFNCYFPLQSYGFQPTNGVGYQPYRVVVLSFELLHAPATVCGPKKSTNLVKNKCVNFNFNGLTGTGVLTESNKKFLPFQQFGRDIADTTDAVRDPQTLEILDITPCSFGGVSVITPGTNTSNQVAVLYQDVNCTEVPVAIHADQLTPTWRVYSTGSNVFQTRAGCLIGAEHVNNSYECDIPIGAGICASYQTQTNSPRRARSVASQSIIAYTMSLGAENSVAYSNNSIAIPTNFTISVTTEILPVSMTKTSVDCTMYICGDSTECSNLLLQYGSFCTQLNRALTGIAVEQDKNTQEVFAQVKQIYKTPPIKDFGGFNFSQILPDPSKPSKRSFIEDLLFNKVTLADAGFIKQYGDCLGDISARDLICAQKFNGLTVLPPLLTDEMIAQYTSALLAGTITSGWTFGAGAALQIPFAMQMAYRFNGIGVTQCVLYENQKLIANQFNSAIGKIQDSLSSTASALGKLQDVVNQNAQALNTLVKQLSSNFGAISSVLNDILSRLDKVEAEVQIDRLITGRLQSLQTYVTQQLIRAAEIRASANLAATKMSECVLGQSKRVDFCGKGYHLMSFPQSAPHGVVFLHVTYVPAQEKNFTTAPAICHDGKAHFPREGVFVSNGTHWFVTQRNFYEPQIITTDNTFVCGNCDVVIGIVNNTVYDPLQPELDSGGSGYIPEAPRDGQAYVRKDGEWVLLSTFL

SEQ ID NO: 14039 - protein, 1177 aa, Artificial Sequence
  SARS-CoV-2/USA/NY-NYUMC7/2020__EPI_ISL_418192 spike protein (1-1147)(N914C_S1123C) Foldon construct
MFVFLVLLPLVSSQCVNLTTRTQLPPAYTNSFTRGVYYPDKVFRSSVLHSTQDLFLPFFSNVTWFHAIHVSGTNGTKRFDNPVLPFNDGVYFASTEKSNIIRGWIFGTTLDSKTQSLLIVNNATNVVIKVCEFQFCNDPFLGVYHHKNNKSWMESEFRVYSSANNCTFEYVSQPFLMDLEGKQGNFKNLREFVFKNIDGYFKIYSKHTPINLVRDLPQGFSALEPLVDLPIGINITRFQTLLALHRSYLTPGDSSSGWTAGAAAYYVGYLQPRTFLLKYNENGTITDAVDCALDPLSETKCTLKSFTVEKGIYQTSNFRVQPTESIVRFPNITNLCPFGEVFNATRFASVYAWNRKRISNCVADYSVLYNSASFSTFKCYGVSPTKLNDLCFTNVYADSFVIRGDEVRQIAPGQTGKIADYNYKLPDDFTGCVIAWNSNNLDSKVGGNYNYLYRLFRKSNLKPFERDISTEIYQAGSTPCNGVEGFNCYFPLQSYGFQPTNGVGYQPYRVVVLSFELLHAPATVCGPKKSTNLVKNKCVNFNFNGLTGTGVLTESNKKFLPFQQFGRDIADTTDAVRDPQTLEILDITPCSFGGVSVITPGTNTSNQVAVLYQGVNCTEVPVAIHADQLTPTWRVYSTGSNVFQTRAGCLIGAEHVNNSYECDIPIGAGICASYQTQTNSPRRARSVASQSIIAYTMSLGAENSVAYSNNSIAIPTNFTISVTTEILPVSMTKTSVDCTMYICGDSTECSNLLLQYGSFCTQLNRALTGIAVEQDKNTQEVFAQVKQIYKTPPIKDFGGFNFSQILPDPSKPSKRSFIEDLLFNKVTLADAGFIKQYGDCLGDIAARDLICAQKFNGLTVLPPLLTDEMIAQYTSALLAGTITSGWTFGAGAALQIPFAMQMAYRFNGIGVTQCVLYENQKLIANQFNSAIGKIQDSLSSTASALGKLQDVVNQNAQALNTLVKQLSSNFGAISSVLNDILSRLDKVEAEVQIDRLITGRLQSLQTYVTQQLIRAAEIRASANLAATKMSECVLGQSKRVDFCGKGYHLMSFPQSAPHGVVFLHVTYVPAQEKNFTTAPAICHDGKAHFPREGVFVSNGTHWFVTQRNFYEPQIITTDNTFVCGNCDVVIGIVNNTVYDPLQPELDSGGSGYIPEAPRDGQAYVRKDGEWVLLSTFL

SEQ ID NO: 14040 - protein, 1177 aa, Artificial Sequence
  SARS-CoV-2/Iceland/189/2020__EPI_ISL_417709 spike protein (1-1147)(N914C_S1123C) Foldon construct
MFVFLVLLPLVSSQCVNLTTRTQLPPAYTNSFTRGVYYPDKVFRSSVLHSTQDLFLPFFSNVTWFHAIHVSGTNGTKRFDNPVLPFNDGVYFASTEKSNIIRGWIFGTTLDSKTQSLLIVNNATNVVIKVCEFQFCNDPFLGVYYHKNNKSWMESEFRVYSSANNCTFEYVSQPFLMDLEGKQGNFKNLREFVFKNIDGYFKIYSKHTPINLVRDLPQGFSALEPLVDLPIGINITRFQTLLALHRSYLTPGDSSSGWTAGAAAYYVGYLQPRTFLLKYNENGTITDAVDCALDPLSETKCTLKSFTVEKGIYQTSNFRVQPTESIVRFPNITNLCPFGEVFNATRFASVYAWNRKRISNCVADYSVLYNSASFSTFKCYGVSPTKLNDLCFTNVYADSFVIRGDEVRQIAPGQTGKIADYNYKLPDDFTGCVIAWNSNNLDSKVGGNYNYLYRLFRKSNLKPFERDISTEIYQAGSTPCNGVEGFNCYFPLQSYGFQPTNGVGYQPYRVVVLSFELLHAPATVCGPKKSTNLVKNKCVNFNFNGLTGTGVLTESNKKFLPFQQFGRDIADTTDAVRDPQTLEILDITPCSFGGVSVITPGTNTSNQVAVLYQGVNCTEVPVAIHADQLTPTWRVYSTGSNVFQTRAGCLIGAEHVNNSYECDIPIGAGICASYQTQTNSPRRARSVASQSIIAYTMSLGAENSVAYSNNSIAIPTNFTISVTTEILPVSMTKTSVDCTMYICGDSTECSNLLLQYGSFCTQLNRALTGIAVEQDKNTQEVFAQVKQIYKTPPIKDFGGFNFSQILPDPSKPSKRSFIEDLLFNKVTLADAGFTKQYGDCLGDIAARDLICAQKFNGLTVLPPLLTDEMIAQYTSALLAGTITSGWTFGAGAALQIPFAMQMAYRFNGIGVTQCVLYENQKLIANQFNSAIGKIQDSLSSTASALGKLQDVVNQNAQALNTLVKQLSSNFGAISSVLNDILSRLDKVEAEVQIDRLITGRLQSLQTYVTQQLIRAAEIRASANLAATKMSECVLGQSKRVDFCGKGYHLMSFPQSAPHGVVFLHVTYVPAQEKNFTTAPAICHDGKAHFPREGVFVSNGTHWFVTQRNFYEPQIITTDNTFVCGNCDVVIGIVNNTVYDPLQPELDSGGSGYIPEAPRDGQAYVRKDGEWVLLSTFL

SEQ ID NO: 14041 - protein, 1177 aa, Artificial Sequence
  SARS-CoV-2/Australia/NSW56/2020__EPI_ISL_417408 spike protein (1-1147)(N914C_S1123C) Foldon construct
MFVFLVLLPLVSSQCVNLTTRTQLPPAYTNSFTRGVYYPDKVFRSSVLHSTQDLFLPFFSNVTWFHAIHVSGTNGTKRFDNPVLPFNDGVYFASTEKSNIIRGWIFGTTLDSKTQSLLIVNNATNVVIKVCEFQFCNDPFLGVYYHKNNKSWMESEFRVYSSANNCTFEYVSQPFLMDLEGKQGNFKNLREFVFKNIDGYFKIYSKHTPINLVRDLPQGFSALEPLVDLPIGINITRFQTLLALHRSYLTPGDSSSGWTAGAAAYYVGYLQPRTFLLKYNENGTITDAVDCALDPLSETKCTLKSFTVEKGIYQTSNFRVQPTESIVRFPNITNLCPFGEVFNATRFASVYAWNRKRISNCVADYSVLYNSASFSTFKCYGVSPTKLNDLCFTNVYADSFVIRGDEVRQIAPGQTGKIADYNYKLPDDFTGCVIAWNSNNLDSKVGGNYNYLYRLFRKSNLKPFERDISTEIYQAGSTPCNGVEGFNCYFPLQSYGFQPTNGVGYQPYRVVVLSFELLHAPATVCGPKKSTNLVKNKCVNFNFNGLTGTGVLTESNKKFLPFQQFGRDIADTTDAVRDPQTLEILDITPCSFGGVSVITPGTNTSNQVAVLYQDVNCTEVPVAIHADQLTPTWRVYSTGSNVFQTRAGCLIGAEHVNNSYECDIPIGAGICASYQTQTNSPRRARSVASQSIIAYTMSLGAENSVAYSNNSIAIPTNFTISVTTEILPVSMTKTSVDCTMYICGDSTECSNLLLQYGSFCTQLNRALTGIAVEQDKNTQEVFAQVKQIYKTPPIKDFGGFNFSQILPDSSKPSKRSFIEDLLFNKVTLADAGFIKQYGDCLGDIAARDLICAQKFNGLTVLPPLLTDEMIAQYTSALLAGTITSGWTFGAGAALQIPFAMQMAYRFNGIGVTQCVLYENQKLIANQFNSAIGKIQDSLSSTASALGKLQDVVNQNAQALNTLVKQLSSNFGAISSVLNDILSRLDKVEAEVQIDRLITGRLQSLQTYVTQQLIRAAEIRASANLAATKMSECVLGQSKRVDFCGKGYHLMSFPQSAPHGVVFLHVTYVPAQEKNFTTAPAICHDGKAHFPREGVFVSNGTHWFVTQRNFYEPQIITTDNTFVCGNCDVVIGIVNNTVYDPLQPELDSGGSGYIPEAPRDGQAYVRKDGEWVLLSTFL

SEQ ID NO: 14042 - protein, 1177 aa, Artificial Sequence
  SARS-CoV-2/Iceland/280/2020__EPI_ISL_417608 spike protein (1-1147)(N914C_S1123C) Foldon construct
MFVFLVLLPLVSSQCVNLTTRTQLPPAYTNSFTRGVYYPDKVFRSSVLHSTQDLFLPFFSNVTWFHAIHVSGTNGTKRFDNPVLPFNDGVYFASTEKSNIIRGWIFGTTLDSKTQSLLIVNNATNVVIKVCEFQFCNDPFLGVYYHKNNKSWMESEFRVYSSANNCTFEYVSQPFLMDLEGKQGNFKNLREFVFKNIDGYFKIYSKHTPINLVRDLPQGFSALEPLVDLPIGINITRFQTLLALHRSYLTPGDSSSGWTAGAAAYYVGYLQPRTFLLKYNENGTITDAVDCALDPLSETKCTLKSFTVEKGIYQTSNFRVQPTESIVRFPNITNLCPFGEVFNATRFASVYAWNRKRISNCVADYSVLYNSASFSTFKCYGVSPTKLNDLCFTNVYADSFVIRGDEVRQIAPGQTGKIADYNYKLPDDFTGCVIAWNSNNLDSKVGGNYNYLYRLFRKSNLKPFERDISTEIYQAGSTPCNGVEGFNCYFPLQSYGFQPTNGVGYQPYRVVVLSFELLHAPATVCGPKKSTNLVKNKCVNFNFNGLTGTGVLTESNKKFLPFQQFGRDIADTTDAVRDPQTLEILDITPCSFGGVSVITPGTNTSNQVAVLYQGVNCTEVPVAIHADQLTPTWRVYSTGSNVFQTRAGCLIGAEHVNNSYECDIPIGAGICASYHTQTNSPRRARSVASQSIIAYTMSLGAENSVAYSNNSIAIPTNFTISVTTEILPVSMTKTSVDCTMYICGDSTECSNLLLQYGSFCTQLNRALTGIAVEQDKNTQEVFAQVKQIYKTPPIKDFGGFNFSQILPDPSKPSKRSFIEDLLFNKVTLADAGFIKQYGDCLGDIAARDLICAQKFNGLTVLPPLLTDEMIAQYTSALLAGTITSGWTFGAGAALQIPFAMQMAYRFNGIGVTQCVLYENQKLIANQFNSAIGKIQDSLSSTASALGKLQDVVNQNAQALNTLVKQLSSNFGAISSVLNDILSRLDKVEAEVQIDRLITGRLQSLQTYVTQQLIRAAEIRASANLAATKMSECVLGQSKRVDFCGKGYHLMSFPQSAPHGVVFLHVTYVPAQEKNFTTAPAICHDGKAHFPREGVFVSNGTHWFVTQRNFYEPQIITTDNTFVCGNCDVVIGIVNNTVYDPLQPELDSGGSGYIPEAPRDGQAYVRKDGEWVLLSTFL

SEQ ID NO: 14043 - protein, 1177 aa, Artificial Sequence; identical to SEQ ID NO: 13998
  SARS-CoV-2/Iceland/247/2020__EPI_ISL_417575 spike protein (1-1147)(N914C_S1123C) Foldon construct

SEQ ID NO: 14044 - protein, 1177 aa, Artificial Sequence
  SARS-CoV-2/Iceland/238/2020__EPI_ISL_417566 spike protein (1-1147)(N914C_S1123C) Foldon construct
MFVFLVLLPLVSSQCVNLTTRTQLPPAYTNSFTRGVYYPDKVFRSSVLHSTQDLFLPFFSNVTWFHAIHVSGTNGTKRFDNPVLPFNDGVYFASTEKSNIIRGWIFGTTLDSKTQSLLIVNNATNVVIKVCEFQFCNDPFLGVYYHKNNKSWMESEFRVYSSANNCTFEYVSQPFLMDLEGKQGNFKNLREFVFKNIDGYFKIYSKHTPINLVRDLPQGFSALEPLVDLPIGINITRFQTLLALHRSYLTPGDSSSGWTAGAAAYYVGYLQPRTFLLKYNENGTITDAVDCALDPLSETKCTLKSFTVEKGIYQTSNFRVQPTESIVRFPNITNLCPFGEVFNATRFASVYAWNRKRISNCVADYSVLYNSASFSTFKCYGVSPTKLNDLCFTNVYADSFVIRGDEVRQIAPGQTGKIADYNYKLPDDFTGCVIAWNSNNLDSKVGGNYNYLYRLFRKSNLKPFERDISTEIYQAGSTPCNGVEGFNCYFPLQSYGFQPTNGVGYQPYRVVVLSFELLHAPATVCGPKKSTNLVKNKCVNFNFNGLTGTGVLTESNKKFLPFQQFGRDIADTTDAVRDPQTLEILDITPCSFGGVSVITPGTNTSNQVAVLYQGVNCTEVPVAIHADQLTPTWRVYSTGSNVFQTRAGCLIGAEHVNNSYECDIPIGAGICASYQTQTNSPRRARSVASQSIIAYTMSLGAENSVAYSNNSIAIPTNFTISVTTEILPVSMTKTSVDCTMYICGDSTECSNLLLQYGSFCTQLNRALTGIAVEQDKNTQEVFAQVKQIYKTPPIKDFGGFNFSQILPDPSKPSKRSFIEDLLFNKVTLADVGFIKQYGDCLGDIAARDLICAQKFNGLTVLPPLLTDEMIAQYTSALLAGTITSGWTFGAGAALQIPFAMQMAYRFNGIGVTQCVLYENQKLIANQFNSAIGKIQDSLSSTASALGKLQDVVNQNAQALNTLVKQLSSNFGAISSVLNDILSRLDKVEAEVQIDRLITGRLQSLQTYVTQQLIRAAEIRASANLAATKMSECVLGQSKRVDFCGKGYHLMSFPQSAPHGVVFLHVTYVPAQEKNFTTAPAICHDGKAHFPREGVFVSNGTHWFVTQRNFYEPQIITTDNTFVCGNCDVVIGIVNNTVYDPLQPELDSGGSGYIPEAPRDGQAYVRKDGEWVLLSTFL

SEQ ID NO: 14045 - protein, 1177 aa, Artificial Sequence
  SARS-CoV-2/Greece/16/2020__EPI_ISL_418265 spike protein (1-1147)(N914C_S1123C) Foldon construct
MFVFLVLLPLVSSQCVNLTTRTQLPPAYTNSFTRGVYYPDKVFRSSVLHSTQDLFLPFFSNVTWFHAIHVSGTNGTKRFDNPVLPFNDGVYFASTEKSNIIRGWIFGTTLDSKTQSLLIVNNATNVVIKVCEFQFCNDPFLGVYYHKNNKSWMESEFRVYSSANNCTFEYVSQPFLMDLEGKQGNFKNLREFVFKNVDGYFKIYSKHTPINLVRDLPQGFSALEPLVDLPIGINITRFQTLLALHRSYLTPGDSSSGWTAGAAAYYVGYLQPRTFLLKYNENGTITDAVDCALDPLSETKCTLKSFTVEKGIYQTSNFRVQPTESIVRFPNITNLCPFGEVFNATRFASVYAWNRKRISNCVADYSVLYNSASFSTFKCYGVSPTKLNDLCFTNVYADSFVIRGDEVRQIAPGQTGKIADYNYKLPDDFTGCVIAWNSNNLDSKVGGNYNYLYRLFRKSNLKPFERDISTEIYQAGSTPCNGVEGFNCYFPLQSYGFQPTNGVGYQPYRVVVLSFELLHAPATVCGPKKSTNLVKNKCVNFNFNGLTGTGVLTESNKKFLPFQQFGRDIADTTDAVRDPQTLEILDITPCSFGGVSVITPGTNTSNQVAVLYQDVNCTEVPVAIHADQLTPTWRVYSTGSNVFQTRAGCLIGAEHVNNSYECDIPIGAGICASYQTQTNSPRRARSVASQSIIAYTMSLGAENSVAYSNNSIAIPTNFTISVTTEILPVSMTKTSVDCTMYICGDSTECSNLLLQYGSFCTQLNRALTGIAVEQDKNTQEVFAQVKQIYKTPPIKDFGGFNFSQILPDPSKPSKRSFIEDLLFNKVTLADAGFIKQYGDCLGDIAARDLICAQKFNGLTVLPPLLTDEMIAQYTSALLAGTITSGWTFGAGAALQIPFAMQMAYRFNGIGVTQCVLYENQKLIANQFNSAIGKIQDSLSSTASALGKLQDVVNQNAQALNTLVKQLSSNFGAISSVLNDILSRLDKVEAEVQIDRLITGRLQSLQTYVTQQLIRAAEIRASANLAATKMSECVLGQSKRVDFCGKGYHLMSFPQSAPHGVVFLHVTYVPAQEKNFTTAPAICHDGKAHFPREGVFVSNGTHWFVTQRNFYEPQIITTDNTFVCGNCDVVIGIVNNTVYDPLQPELDSGGSGYIPEAPRDGQAYVRKDGEWVLLSTFL

SEQ ID NO: 14046 - protein, 1177 aa, Artificial Sequence
  SARS-CoV-2/Iceland/319/2020__EPI_ISL_417648 spike protein (1-1147)(N914C_S1123C) Foldon construct
MFVFLVLLPLVSSQCVNLTTRTQLPPAYTNSFTRGVYYPDKVFRSSVLHSTQDLFLPFFSNVTWFHAIHVSGTNGTKRFDNPVLPFNDGVYFASTEKSNIIRGWIFGTTLDSKTQSLLIVNNATNVVIKVCEFQFCNDPFLGVYYHKNNKSWMESEFRVYSSANNCTFEYVSQPFLIDLEGKQGNFKNLREFVFKNIDGYFKIYSKHTPINLVRDLPQGFSALEPLVDLPIGINITRFQTLLALHRSYLTPGDSSSGWTAGAAAYYVGYLQPRTFLLKYNENGTITDAVDCALDPLSETKCTLKSFTVEKGIYQTSNFRVQPTESIVRFPNITNLCPFGEVFNATRFASVYAWNRKRISNCVADYSVLYNSASFSTFKCYGVSPTKLNDLCFTNVYADSFVIRGDEVRQIAPGQTGKIADYNYKLPDDFTGCVIAWNSNNLDSKVGGNYNYLYRLFRKSNLKPFERDISTEIYQAGSTPCNGVEGFNCYFPLQSYGFQPTNGVGYQPYRVVVLSFELLHAPATVCGPKKSTNLVKNKCVNFNFNGLTGTGVLTESNKKFLPFQQFGRDIADTTDAVRDPQTLEILDITPCSFGGVSVITPGTNTSNQVAVLYQGVNCTEVPVAIHADQLTPTWRVYSTGSNVFQTRAGCLIGAEHVNNSYECDIPIGAGICASYQTQTNSPRRARSVASQSIIAYTMSLGAENSVAYSNNSIAIPTNFTISVTTEILPVSMTKTSVDCTMYICGDSTECSNLLLQYGSFCTQLNRALTGIAVEQDKNTQEVFAQVKQIYKTPPIKDFGGFNFSQILPDPSKPSKRSFIEDLLFNKVTLADAGFIKQYGDCLGDIAARDLICAQKFNGLTVLPPLLTDEMIAQYTSALLAGTITSGWTFGAGAALQIPFAMQMAYRFNGIGVTQCVLYENQKLIANQFNSAIGKIQDSLSSTASALGKLQDVVNQNAQALNTLVKQLSSNFGAISSVLNDILSRLDKVEAEVQIDRLITGRLQSLQTYVTQQLIRAAEIRASANLAATKMSECVLGQSKRVDFCGKGYHLMSFPQSAPHGVVFLHVTYVPAQEKNFTTAPAICHDGKAHFPREGVFVSNGTHWFVTQRNFYEPQIITTDNTFVCGNCDVVIGIVNNTVYDPLQPELDSGGSGYIPEAPRDGQAYVRKDGEWVLLSTFL

SEQ ID NO: 14047 - protein, 1177 aa, Artificial Sequence
  SARS-CoV-2/Congo/94/2020__EPI_ISL_417947 spike protein (1-1147)(N914C_S1123C) Foldon construct
MFVFLVLLPLVSSQCVNLTTRTQLPPAYTNSFTRGVYYPDKVFRSSVLHSTQDLFLPFFSNVTWFHAIHVSGTNGTKRFDNPVLPFNDGVYFASTEKSNIIRGWIFGTTLDSKTQSLLIVNNATNVVIKVCEFQFCNDPFLGVYYHKNNKSWMESEFRVYSSANNCTFEYVSQPFLMDLEGKQGNFKNLREFVFKNIDGYFKIYSKHTPINLVRDLPQGFSALEPLVDLPIGINITRFQTLLALHRSYLTPGDSSSGWTAGAAAYYVGYLQPRTFLLKYNENGTITDAVDCALDPLSETKCTLKSFTVEKGIYQTSNFRVQPTESIVRFPNITNLCPFGEVFNATRFASVYAWNRKRISNCVADYSVLYNSASFSTFKCYGVSPTKLNDLCFTNVYADSFVIRGDEVRQIAPGQTGKIADYNYKLPDDFTGCVIAWNSNNLDSKVGGNYNYLYRLFRKSNLKPFERDISTEIYQAGSTPCNGVEGFNCYFPLQSYGFQPTNGVGYQPYRVVVLSFELLHAPATVCGPKKSTNLVKNKCVNFNFNGLTGTGVLTESNKKFLPFQQFGRDIADTTDAVRDPQTLEILDITPCSFGGVSVITPGTNTSNQVAVLYQGVNCTEVPVAIHADQLTPTWRVYSTGSNVFQTRAGCLIGAEHVNNSYECDIPIGAGICASYQTQTNSPRRARSVASQSIIAYTMSLGAENSVAYSNNSIAIPTNFTISVTTEILPVSMTKTSVDCTMYICGDSTECSNLLLQYGSFCTQLNRALTGIAVEQDKNTQEVFAQVKQIYKTPPIKDFGGFNFSQILPDPSKPSKRSFIEDILFNKVTLADAGFIKQYGDCLGDIAARDLICAQKFNGLTVLPPLLTDEMIAQYTSALLAGTITSGWTFGAGAALQIPFAMQMAYRFNGIGVTQCVLYENQKLIANQFNSAIGKIQDSLSSTASALGKLQDVVNQNAQALNTLVKQLSSNFGAISSVLNDILSRLDKVEAEVQIDRLITGRLQSLQTYVTQQLIRAAEIRASANLAATKMSECVLGQSKRVDFCGKGYHLMSFPQSAPHGVVFLHVTYVPAQEKNFTTAPAICHDGKAHFPREGVFVSNGTHWFVTQRNFYEPQIITTDNTFVCGNCDVVIGIVNNTVYDPLQPELDSGGSGYIPEAPRDGQAYVRKDGEWVLLSTFL

SEQ ID NO: 14048 - protein, 1177 aa, Artificial Sequence
  SARS-CoV-2/Congo/158/2020__EPI_ISL_417950 spike protein (1-1147)(N914C_S1123C) Foldon construct
MFVFLVLLPLVSSQCVNLTTRTQLPPAYTNSFTRGVYYPDKVFRSSVLHSTQDLFLPFFSNVTWFHAIHVSGTNGTKRFDNPVLPFNDGVYFASTEKSNIIRGWIFGTTLDSKTQSLLIVNNATNVVIKVCEFQFCNDPFLGVYYHKNNKSWMESEFRVYSSANNCTFEYVSQPFLMDLEGKQGNFKNLREFVFKNIDGYFKIYSKHTPINLVRDLPQGFSALEPLVDLPIGINITRFQTLLALHRSYLTPGDSSSGWTAGAAAYYVGYLQPRTFLLKYNENGTITDAVDCALDPLSETKCTLKSFTVEKGIYQTSNFRVQPTESIVRFPNITNLCPFGEVFNATRFASVYAWNRKRISNCVADYSVLYNSASFSTFKCYGVSPTKLNDLCFTNVYADSFVIRGDEVRQIAPGQTGKIADYNYKLPDDFTGCVIAWNSNNLDSKVGGNYNYLYRLFRKSNLKPFERDISTEIYQAGSTPCNGVEGFNCYFPLQSYGFQPTNGVGYQPYRVVVLSFELLHAPATVCGPKKSTNLVKNKCVNFNFNGLTGTGVLTESNKKFLPFQQFGRDIADTTDAVRDPQTLEILDITPCSFGGVSVITPGTNTSNQVAVLYQDVNCTEVPVAIHADQLTPTWRVYSTGSNVFQTRAGCLIGAEHVNNSYECDIPIGAGICASYQTQTNSPRRARSVASQSIIAYTMSLGAENSVAYSNNSIAIPTNFTISVTTEILPVSMTKTSVDCTMYICGDSTECSNLLLQYGSFCTQLNRALTGIAVEQDKNTQEVFAQVKQIYKTPPIKDFGGFNFSQILPDPSKPSKRSFIEDLLFNKVTLADAGFIKQYGDCLGDIAARDLICAQKFNGLTVLPPLLTDEMIAQYTSALLAGTITSGWTFGAGAALQIPFAMQMAYRFNGIGVTQCVLYENQKLIANQFNSAIGKIQDSLSSTASALGKLQDVVNQNAQALNTLVKQLSSNFGAISSVLNDILSRLDKVEAEVQIDRLITGRLQSLQTYVTQQLIRAAEIRASANLAATKMSECVLGQSKRVDFCGKGYHLMSFPQSAPHGVVFLHVTYVPAQEKNFTTAPAICHDGKAHFPREGVFVSNGTHWFVTQRNFYEPQIITTDNTFLCGNCDVVIGIVNNTVYDPLQPELDSGGSGYIPEAPRDGQAYVRKDGEWVLLSTFL

SEQ ID NO: 14049 - protein, 1177 aa, Artificial Sequence
  SARS-CoV-2/USA/UT-00034/2020__EPI_ISL_417977 spike protein (1-1147)(N914C_S1123C) Foldon construct
MFVFLVLLPLVSSQCVNLTTRTQLPPAYTNSFTRGVYYPDKVFRSSVLHSTQDLFLPFFSNVTWFHAIHVSGTNGTKRFDNPVLPFNDGVYFASTEKSNIIRGWIFGTTLDSKTQSLLIVNNATNVVIKVCEFQFCNDPFLGVYYYKNNKSWMESEFRVYSSANNCTFEYVSQPFLMDLEGKQGNFKNLREFVFKNIDGYFKIYSKHTPINLVRDLPQGFSALEPLVDLPIGINITRFQTLLALHRSYLTPGDSSSGWTAGAAAYYVGYLQPRTFLLKYNENGTITDAVDCALDPLSETKCTLKSFTVEKGIYQTSNFRVQPTESIVRFPNITNLCPFGEVFNATRFASVYAWNRKRISNCVADYSVLYNSASFSTFKCYGVSPTKLNDLCFTNVYADSFVIRGDEVRQIAPGQTGKIADYNYKLPDDFTGCVIAWNSNNLDSKVGGNYNYLYRLFRKSNLKPFERDISTEIYQAGSTPCNGVEGFNCYFPLQSYGFQPTNGVGYQPYRVVVLSFELLHAPATVCGPKKSTNLVKNKCVNFNFNGLTGTGVLTESNKKFLPFQQFGRDIADTTDAVRDPQTLEILDITPCSFGGVSVITPGTNTSNQVAVLYQGVNCTEVPVAIHADQLTPTWRVYSTGSNVFQTRAGCLIGAEHVNNSYECDIPIGAGICASYQTQTNSPRRARSVASQSIIAYTMSLGAENSVAYSNNSIAIPTNFTISVTTEILPVSMTKTSVDCTMYICGDSTECSNLLLQYGSFCTQLNRALTGIAVEQDKNTQEVFAQVKQIYKTPPIKDFGGFNFSQILPDPSKPSKRSFIEDLLFNKVTLADAGFIKQYGDCLGDIAARDLICAQKFNGLTVLPPLLTDEMIAQYTSALLAGTITSGWTFGAGAALQIPFAMQMAYRFNGIGVTQCVLYENQKLIANQFNSAIGKIQDSLSSTASALGKLQDVVNQNAQALNTLVKQLSSNFGAISSVLNDILSRLDKVEAEVQIDRLITGRLQSLQTYVTQQLIRAAEIRASANLAATKMSECVLGQSKRVDFCGKGYHLMSFPQSAPHGVVFLHVTYVPAQEKNFTTAPAICHDGKAHFPREGVFVSNGTHWFVTQRNFYEPQIITTDNTFVCGNCDVVIGIVNNTVYDPLQPELDSGGSGYIPEAPRDGQAYVRKDGEWVLLSTFL

SEQ ID NO: 14050 - protein, 1177 aa, Artificial Sequence
  SARS-CoV-2/USA/UT-00033/2020__EPI_ISL_417976 spike protein (1-1147)(N914C_S1123C) Foldon construct
MFVFLVLLPLVSSQCVNLTTRTQLPPAYTNSFTRGVYYPDKVFRSSVLHSTQDLFLPFFSNVTWFHAIHVSGTNGTKRFDNPVLPFNDGVYFASTEKSNIIRGWIFGTTLDSKTQSLLIVNNATNVVIKVCEFQFCNDPFLGVYYHKNNKSWMESEFRVYSSANNCTFEYVSQPFLMDLEGKQGNFKNLREFVFKNIDGYFKIYSKHTPINLVRDLPQGFSALEPLVDLPIGINITRFQTLLALHRSYLTPGDSSSGLTAGAAAYYVGYLQPRTFLLKYNENGTITDAVDCALDPLSETKCTLKSFTVEKGIYQTSNFRVQPTESIVRFPNITNLCPFGEVFNATRFASVYAWNRKRISNCVADYSVLYNSASFSTFKCYGVSPTKLNDLCFTNVYADSFVIRGDEVRQIAPGQTGKIADYNYKLPDDFTGCVIAWNSNNLDSKVGGNYNYLYRLFRKSNLKPFERDISTEIYQAGSTPCNGVEGFNCYFPLQSYGFQPTNGVGYQPYRVVVLSFELLHAPATVCGPKKSTNLVKNKCVNFNFNGLTGTGVLTESNKKFLPFQQFGRDIADTTDAVRDPQTLEILDITPCSFGGVSVITPGTNTSNQVAVLYQGVNCTEVPVAIHADQLTPTWRVYSTGSNVFQTRAGCLIGAEHVNNSYECDIPIGAGICASYQTQTNSPRRARSVASQSIIAYTMSLGAENSVAYSNNSIAIPTNFTISVTTEILPVSMTKTSVDCTMYICGDSTECSNLLLQYGSFCTQLNRALTGIAVEQDKNTQEVFAQVKQIYKTPPIKDFGGFNFSQILPDPSKPSKRSFIEDLLFNKVTLADAGFIKQYGDCLGDIAARDLICAQKFNGLTVLPPLLTDEMIAQYTSALLAGTITSGWTFGAGAALQIPFAMQMAYRFNGIGVTQCVLYENQKLIANQFNSAIGKIQDSLSSTASALGKLQDVVNQNAQALNTLVKQLSSNFGAISSVLNDILSRLDKVEAEVQIDRLITGRLQSLQTYVTQQLIRAAEIRASANLAATKMSECVLGQSKRVDFCGKGYHLMSFPQSAPHGVVFLHVTYVPAQEKNFTTAPAICHDGKAHFPREGVFVSNGTHWFVTQRNFYEPQIITTDNTFVCGNCDVVIGIVNNTVYDPLQPELDSGGSGYIPEAPRDGQAYVRKDGEWVLLSTFL

SEQ ID NO: 14051 - protein, 1177 aa, Artificial Sequence
  SARS-CoV-2/USA/WI-13/2020__EPI_ISL_417516 spike protein (1-1147)(N914C_S1123C) Foldon construct
MFVFLVLLPLVSSQCVNLTTRTQLPPAYTNSFTRGVYYPDKVFRSSVLHSTQDLFLPFFSNVTWFHAIHVSGTNGTKRFDNPVLPFNDGVYFASTEKSNIIRGWIFGTTLDSKTQSLLIVNNATNVVIKVCEFQFCNDPFLGVYYHKNNKSWMESEFRVYSSANNCTFEYVSQPFLMDLEGKQGNFKNLREFVFKNIDGYFKIYSKHTPINLVRDLPQGFSALEPLVDLPIGINITRFQTLLALHRSYLTPGDSSSGWTAGAAAYYVGYLQPRTFLLKYNENGTITDAVDCALDPLSETKCTLKSFTVEKGIYQTSNFRVLPTESIVRFPNITNLCPFGEVFNATRFASVYAWNRKRISNCVADYSVLYNSASFSTFKCYGVSPTKLNDLCFTNVYADSFVIRGDEVRQIAPGQTGKIADYNYKLPDDFTGCVIAWNSNNLDSKVGGNYNYLYRLFRKSNLKPFERDISTEIYQAGSTPCNGVEGFNCYFPLQSYGFQPTNGVGYQPYRVVVLSFELLHAPATVCGPKKSTNLVKNKCVNFNFNGLTGTGVLTESNKKFLPFQQFGRDIADTTDAVRDPQTLEILDITPCSFGGVSVITPGTNTSNQVAVLYQGVNCTEVPVAIHADQLTPTWRVYSTGSNVFQTRAGCLIGAEHVNNSYECDIPIGAGICASYQTQTNSPRRARSVASQSIIAYTMSLGAENSVAYSNNSIAIPTNFTISVTTEILPVSMTKTSVDCTMYICGDSTECSNLLLQYGSFCTQLNRALTGIAVEQDKNTQEVFAQVKQIYKTPPIKDFGGFNFSQILPDPSKPSKRSFIEDLLFNKVTLADAGFIKQYGDCLGDIAARDLICAQKFNGLTVLPPLLTDEMIAQYTSALLAGTITSGWTFGAGAALQIPFAMQMAYRFNGIGVTQCVLYENQKLIANQFNSAIGKIQDSLSSTASALGKLQDVVNQNAQALNTLVKQLSSNFGAISSVLNDILSRLDKVEAEVQIDRLITGRLQSLQTYVTQQLIRAAEIRASANLAATKMSECVLGQSKRVDFCGKGYHLMSFPQSAPHGVVFLHVTYVPAQEKNFTTAPAICHDGKAHFPREGVFVSNGTHWFVTQRNFYEPQIITTDNTFVCGNCDVVIGIVNNTVYDPLQPELDSGGSGYIPEAPRDGQAYVRKDGEWVLLSTFL

SEQ ID NO: 14052 - protein, 1176 aa, Artificial Sequence
  SARS-CoV-2/India/1-27/2020__EPI_ISL_413522 spike protein (1-1146)(N913C_S1122C) Foldon construct
MFVFLVLLPLVSSQCVNLTTRTQLPPAYTNSFTRGVYYPDKVFRSSVLHSTQDLFLPFFSNVTWFHAIHVSGTNGTKRFDNPVLPFNDGVYFASTEKSNIIRGWIFGTTLDSKTQSLLIVNNATNVVIKVCEFQFCNDPFLGVYHKNNKSWMESEFRVYSSANNCTFEYVSQPFLMDLEGKQGNFKNLREFVFKNIDGYFKIYSKHTPINLVRDLPQGFSALEPLVDLPIGINITRFQTLLALHRSYLTPGDSSSGWTAGAAAYYVGYLQPRTFLLKYNENGTITDAVDCALDPLSETKCTLKSFTVEKGIYQTSNFRVQPTESIVRFPNITNLCPFGEVFNATRFASVYAWNRKRISNCVADYSVLYNSASFSTFKCYGVSPTKLNDLCFTNVYADSFVIRGDEVIQIAPGQTGKIADYNYKLPDDFTGCVIAWNSNNLDSKVGGNYNYLYRLFRKSNLKPFERDISTEIYQAGSTPCNGVEGFNCYFPLQSYGFQPTNGVGYQPYRVVVLSFELLHAPATVCGPKKSTNLVKNKCVNFNFNGLTGTGVLTESNKKFLPFQQFGRDIADTTDAVRDPQTLEILDITPCSFGGVSVITPGTNTSNQVAVLYQDVNCTEVPVAIHADQLTPTWRVYSTGSNVFQTRAGCLIGAEHVNNSYECDIPIGAGICASYQTQTNSPRRARSVASQSIIAYTMSLGAENSVAYSNNSIAIPTNFTISVTTEILPVSMTKTSVDCTMYICGDSTECSNLLLQYGSFCTQLNRALTGIAVEQDKNTQEVFAQVKQIYKTPPIKDFGGFNFSQILPDPSKPSKRSFIEDLLFNKVTLADAGFIKQYGDCLGDIAARDLICAQKFNGLTVLPPLLTDEMIAQYTSALLAGTITSGWTFGAGAALQIPFAMQMAYRFNGIGVTQCVLYENQKLIANQFNSAIGKIQDSLSSTASALGKLQDVVNQNAQALNTLVKQLSSNFGAISSVLNDILSRLDKVEAEVQIDRLITGRLQSLQTYVTQQLIRAAEIRASANLAATKMSECVLGQSKRVDFCGKGYHLMSFPQSAPHGVVFLHVTYVPAQEKNFTTAPAICHDGKAHFPREGVFVSNGTHWFVTQRNFYEPQIITTDNTFVCGNCDVVIGIVNNTVYDPLQPELDSGGSGYIPEAPRDGQAYVRKDGEWVLLSTFL

SEQ ID NO: 14053 - protein, 1171 aa, Artificial Sequence
  SARS-CoV-2/pangolin/Guangxi/P4L/2017__EPI_ISL_410538 spike protein (1-1141)(N908C_S1117C) Foldon construct
MFVFLFVLPLVSSQCVNLTTRTGIPPGYTNSSTRGVYYPDKVFRSSILHLTQDLFLPFFSNVTWFNTINYQGGFKKFDNPVLPFNDGVYFASTEKSNIIRGWIFGTTLDARTQSLLIVNNATNVVIKVCEFQFCTDPFLGVYYHNNNKTWVENEFRVYSSANNCTFEYISQPFLMDLEGKQGNFKNLREFVFKNVDGYFKIYSKHTPIDLVRDLPRGFAALEPLVDLPIGINITRFQTLLALHRSYLTPGNLESGWTTGAAAYYVGYLQQRTFLLSYNQNGTITDAVDCSLDPLSETKCTLKSLTVEKGIYQTSNFRVQPTISIVRFPNITNLCPFGEVFNASKFASVYAWNRKRISNCVADYSVLYNSTSFSTFKCYGVSPTKLNDLCFTNVYADSFVVKGDEVRQIAPGQTGVIADYNYKLPDDFTGCVIAWNSVKQDALTGGNYGYLYRLFRKSKLKPFERDISTEIYQAGSTPCNGQVGLNCYYPLERYGFHPTTGVNYQPFRVVVLSFELLNGPATVCGPKLSTTLVKDKCVNFNFNGLTGTGVLTTSKKQFLPFQQFGRDISDTTDAVRDPQTLEILDITPCSFGGVSVITPGTNTSNQVAVLYQDVNCTEVPMAIHAEQLTPAWRVYSAGANVFQTRAGCLVGAEHVNNSYECDIPVGAGICASYHSMSSLRSVNQRSIIAYTMSLGAENSVAYSNNSIAIPTNFTISVTTEILPVSMTKTSVDCTMYICGDSIECSNLLLQYGSFCTQLNRALTGIAVEQDKNTQEVFAQVKQIYKTPPIKDFGGFNFSQILPDPSKPSKRSFIEDLLFNKVTLADAGFIKQYGDCLGDIAARDLICAQKFNGLTVLPPLLTDEMIAQYTSALLAGTITSGWTFGAGAALQIPFAMQMAYRFNGIGVTQCVLYENQKLIANQFNSAIGKIQDSLSSTASALGKLQDVVNQNAQALNTLVKQLSSNFGAISSVLNDILSRLDKVEAEVQIDRLITGRLQSLQTYVTQQLIRAAEIRASANLAATKMSECVLGQSKRVDFCGKGYHLMSFPQSAPHGVVFLHVTYVPAQEKNFTTAPAICHEGKAHFPREGVFVSNGTHWFITQRNFYEPQIITTDNTFVCGSCDVVIGIVNNTVYDPLQPELDSGGSGYIPEAPRDGQAYVRKDGEWVLLSTFL

SEQ ID NO: 14054 - protein, 1171 aa, Artificial Sequence
  SARS-CoV-2/pangolin/Guangxi/P5L/2017__EPI_ISL_410540 spike protein (1-1141)(N908C_S1117C) Foldon construct
MFVFLFVLPLVSSQCVNLTTRTGIPPGYTNSSTRGVYYPDKVFRSSILHLTQDLFLPFFSNVTWFNTINYQGGFKKFDNPVLPFNDGVYFASTEKSNIIRGWIFGTTLDARTQSLLIVNNATNVVIKVCEFQFCTDPFLGVYYHNNNKTWVENEFRVYSSANNCTFEYISQPFLMDLEGKQGNFKNLREFVFKNVDGYFKIYSKHTPIDLVRDLPRGFAALEPLVDLPIGINITRFQTLLALHRSYLTPGKLESGWTTGAAAYYVGYLQQRTFLLSYNQNGTITDAVDCSLDPLSETKCTLKSLTVEKGIYQTSNFRVQPTISIVRFPNITNLCPFGEVFNASKFASVYAWNRKRISNCVADYSVLYNSTSFSTFKCYGVSPTKLNDLCFTNVYADSFVVKGDEVRQIAPGQTGVIADYNYKLPDDFTGCVIAWNSVKQDALTGGNYGYLYRLFRKSKLKPFERDISTEIYQAGSTPCNGQVGLNCYYPLERYGFHPTTGVNYQPFRVVVLSFELLNGPATVCGPKLSTTLVKDKCVNFNFNGLTGTGVLTTSKKQFLPFQQFGRDISDTTDAVRDPQTLEILDITPCSFGGVSVITPGTNTSNQVAVLYQDVNCTEVPMAIHAEQLTPAWRVYSAGANVFQTRAGCLVGAEHVNNSYECDIPVGAGICASYHSMSSFRSVNQRSIIAYTMSLGAENSVAYSNNSIAIPTNFTISVTTEILPVSMTKTSVDCTMYICGDSIECSNLLLQYGSFCTQLNRALTGIAVEQDKNTQEVFAQVKQIYKTPPIKDFGGFNFSQILPDPSKPSKRSFIEDLLFNKVTLADAGFIKQYGDCLGDIAARDLICAQKFNGLTVLPPLLTDEMIAQYTSALLAGTITSGWTFGAGAALQIPFAMQMAYRFNGIGVTQCVLYENQKLIANQFNSAIGKIQDSLSSTASALGKLQDVVNQNAQALNTLVKQLSSNFGAISSVLNDILSRLDKVEAEVQIDRLITGRLQSLQTYVTQQLIRAAEIRASANLAATKMSECVLGQSKRVDFCGKGYHLMSFPQSAPHGVVFLHVTYVPAQEKNFTTAPAICHEGKAHFPREGVFVSNGTHWFITQRNFYEPQIITTDNTFVCGSCDVVIGIVNNTVYDPLQPELDSGGSGYIPEAPRDGQAYVRKDGEWVLLSTFL

SEQ ID NO: 14055 - protein, 1171 aa, Artificial Sequence
  SARS-CoV-2/pangolin/Guangxi/P5E/2017__EPI_ISL_410541 spike protein (1-1141)(N908C_S1117C) Foldon construct
MFVFLFVLPLVSSQCVNLTTRTGIPPGYTNSSTRGVYYPDKVFRSSILHLTQDLFLPFFSNVTWFNTITYQGGSKKFDNPVLPFNDGVYFASTEKSNIIRGWIFGTTLDARTQSLLIVNNATNVVIKVCEFQFCTDPFLGVYYHNNNKTWVENEFRVYSSANNCTFEYISQPFLMDLEGKQGNFKNLREFVFKNVDGYFKIYSKHTPIDLVRDLPRGFAALEPLVDLPIGINITRFQTLLALHRSYLTPGKLESGWTTGAAAYYVGYLQQRTFLLSYNQNGTITDAVDCSLDPLSETKCTLKSLTVEKGIYQTSNFRVQPTISIVRFPNITNLCPFGEVFNASKFASVYAWNRKRISNCVADYSVLYNSTSFSTFKCYGVSPTKLNDLCFTNVYADSFVVKGDEVRQIAPGQTGVIADYNYKLPDDFTGCVIAWNSVKQDALTGDNYGYLYRLFRKSKLKPFERDISTEIYQAGSTPCNGQVGLNCYYPLERYGFHPTTGVNYQPFRVVVLSFELLNGPATVCGPKLSTTLVKDKCVNFNFNGLTGTGVLTTSKKQFLPFQQFGRDISDTTDAVRDPQTLEILDITPCSFGGVSVITPGTNTSNQVAVLYQDVNCTEVPMAIHAEQLTPAWRVYSAGANVFQTRAGCLVGAEHVNNSYECDIPVGAGICASYHSMSSFRSVNQRSIIAYTMSLGAENSVAYSNNSIAIPTNFTISVTTEILPVSMTKTSVDCTMYICGDSIECSNLLLQYGSFCTQLNRALTGIAVEQDKNTQEVFAQVKQIYKTPPIKDFGGFNFSQILPDPSKPSKRSFIEDLLFNKVTLADAGFIKQYGDCLGDIAARDLICAQKFNGLTVLPPLLTDEMIAQYTSALLAGTITSGWTFGAGAALQIPFAMQMAYRFNGIGVTQCVLYENQKLIANQFNSAIGKIQDSLSSTASALGKLQDVVNQNAQALNTLVKQLSSNFGAISSVLNDILSRLDKVEAEVQIDRLITGRLQSLQTYVTQQLIRAAEIRASANLAATKMSECVLGQSKRVDFCGKGYHLMSFPQSAPHGVVFLHVTYVPAQEKNFTTAPAICHEGKAHFPREGVFVSNGTHWFITQRNFYEPQIITTDNTFVCGSCDVVIGIVNNTVYDPLQPELDSGGSGYIPEAPRDGQAYVRKDGEWVLLSTFL

SEQ ID NO: 14056 - protein, 1169 aa, Artificial Sequence
  SARS-CoV-2/pangolin/Guangxi/P1E/2017__EPI_ISL_410539 spike protein (1-1139)(N906C_S1115C) Foldon construct
MFVFLFVLPLVSSQCVNLTTRTGIQPGYTNSSTRGVYYPDKVFRSSILHLTQDLFLPFFSNVTWFNTINYQGGFKKFDNPVLPFNDGVYFASTEKSNIIRGWIFGTTLDARTQSLLIVNNATNVVIKVCEFQFCTDPFLGVYYHNNNKTWVENEFRVYSSANNCTFEYISQPFLMDLEGKQGNFKNLREFVFKNVDGYFKIYSKHTPIDLVRDLPRGFAALEPLVDLPIGINITRFQTLLALHRSYLTPGKLESGWTTGAAAYYVGYLQQRTFLLSYNQNGTITDAVDCSLDPLSETKCTLKSLTVEKGIYQTSNFRVQPTISIVRFPNITNLCPFGEVFNASKFASVYAWNRKRISNCVADYSVLYNSTSFSTFKCYGVSPTKLNDLCFTNVYADSFVVKGDEVRQIAPGQTGVIADYNYKLPDDFTGCVIAWNSVKQDALTGGNYLYRLFRKSKLKPFERDISTEIYQAGSTPCNGQVGLNCYYPLERYGFHPTTGVNYQPFRVVVLSFELLNGPATVCGPKLSTTLVKDKCVNFNFNGLTGTGVLTTSKKQFLPFQQFGRDISDTTDAVRDPQTLEILDITPCSFGGVSVITPGTNTSNQVAVLYQDVNCTEVPMAIHAEQLTPAWRVYSAGANVFQTRAGCLVGAEHVNNSYECDIPVGAGICASYHSMSSLRSVNQRSIIAYTMSLGAENSVAYSNNSIAIPTNFTISVTTEILPVSMTKTSVDCTMYICGDSIECSNLLLQYGSFCTQLNRALTGIAVEQDKNTQEVFAQVKQIYKTPPIKDFGGFNFSQILPDPSKPSKRSFIEDLLFNKVTLADAGFIKQYGDCLGDIAARDLICAQKFNGLTVLPPLLTDEMIAQYTSALLAGTITSGWTFGAGAALQIPFAMQMAYRFNGIGVTQCVLYENQKLIANQFNSAIGKIQDSLSSTASALGKLQDVVNQNAQALNTLVKQLSSNFGAISSVLNDILSRLDKVEAEVQIDRLITGRLQSLQTYVTQQLIRAAEIRASANLAATKMSECVLGQSKRVDFCGKGYHLMSFPQSAPHGVVFLHVTYVPAQEKNFTTAPAICHEGKAHFPREGVFVSNGTHWFITQRNFYEPQIITTDNTFVCGSCDVVIGIVNNTVYDPLQPELDSGGSGYIPEAPRDGQAYVRKDGEWVLLSTFL

SEQ ID NO: 14057 - protein, 1301 aa, Artificial Sequence
  SARS-CoV-2/Wuhan/WIV05/2019__EPI_ISL_402128 spike protein (1-1147)(N914C_S1123C) WhcAg construct
MFVFLVLLPLVSSQCVNLTTRTQLPPAYTNSFTRGVYYPDKVFRSSVLHSTQDLFLPFFSNVTWFHAIHVSGTNGTKRFDNPVLPFNDGVYFASTEKSNIIRGWIFGTTLDSKTQSLLIVNNATNVVIKVCEFQFCNDPFLGVYYHKNNKSWMESEFRVYSSANNCTFEYVSQPFLMDLEGKQGNFKNLREFVFKNIDGYFKIYSKHTPINLVRDLPQGFSALEPLVDLPIGINITRFQTLLALHRSYLTPGDSSSGWTAGAAAYYVGYLQPRTFLLKYNENGTITDAVDCALDPLSETKCTLKSFTVEKGIYQTSNFRVQPTESIVRFPNITNLCPFGEVFNATRFASVYAWNRKRISNCVADYSVLYNSASFSTFKCYGVSPTKLNDLCFTNVYADSFVIRGDEVRQIAPGQTGKIADYNYKLPDDFTGCVIAWNSNNLDSKVGGNYNYLYRLFRKSNLKPFERDISTEIYQAGSTPCNGVEGFNCYFPLQSYGFQPTNGVGYQPYRVVVLSFELLHAPATVCGPKKSTNLVKNKCVNFNFNGLTGTGVLTESNKKFLPFQQFGRDIADTTDAVRDPQTLEILDITPCSFGGVSVITPGTNTSNQVAVLYQDVNCTEVPVAIHADQLTPTWRVYSTGSNVFQTRAGCLIGAEHVNNSYECDIPIGAGICASYQTQTNSPRRARSVASQSIIAYTMSLGAENSVAYSNNSIAIPTNFTISVTTEILPVSMTKTSVDCTMYICGDSTECSNLLLQYGSFCTQLNRALTGIAVEQDKNTQEVFAQVKQIYKTPPIKDFGGFNFSQILPDPSKPSKRSFIEDLLFNKVTLADAGFIKQYGDCLGDIAARDLICAQKFNGLTVLPPLLTDEMIAQYTSALLAGTITSGWTFGAGAALQIPFAMQMAYRFNGIGVTQCVLYENQKLIANQFNSAIGKIQDSLSSTASALGKLQDVVNQNAQALNTLVKQLSSNFGAISSVLNDILSRLDKVEAEVQIDRLITGRLQSLQTYVTQQLIRAAEIRASANLAATKMSECVLGQSKRVDFCGKGYHLMSFPQSAPHGVVFLHVTYVPAQEKNFTTAPAICHDGKAHFPREGVFVSNGTHWFVTQRNFYEPQIITTDNTFVCGNCDVVIGIVNNTVYDPLQPELDSGGGGSDIDPYKEFGSSYQLLNFLPLDFFPDLNALVDTATALYEEELTGREHCSPHHTAIRQALVCWDELTKLIAWMSSNITSEQVRTIIVNHVNDTWGLKVRQSLWFHLSCLTFGQHTVQEFLVSFGVWIRTPAPYRPPNAPILSTLPEHTVIC

SEQ ID NO: 14058 - protein, 1297 aa, Artificial Sequence
  SARS-CoV-2/bat/Yunnan/RaTG13/2013__EPI_ISL_402131 spike protein (1-1143)(N910C_S1119C) WhcAg construct
MFVFLVLLPLVSSQCVNLTTRTQLPPAYTNSSTRGVYYPDKVFRSSVLHLTQDLFLPFFSNVTWFHAIHVSGTNGIKRFDNPVLPFNDGVYFASTEKSNIIRGWIFGTTLDSKTQSLLIVNNATNVVIKVCEFQFCNDPFLGVYYHKNNKSWMESEFRVYSSANNCTFEYVSQPFLMDLEGKQGNFKNLREFVFKNIDGYFKIYSKHTPINLVRDLPPGFSALEPLVDLPIGINITRFQTLLALHRSYLTPGDSSSGWTAGAAAYYVGYLQPRTFLLKYNENGTITDAVDCALDPLSETKCTLKSFTVEKGIYQTSNFRVQPTDSIVRFPNITNLCPFGEVFNATTFASVYAWNRKRISNCVADYSVLYNSTSFSTFKCYGVSPTKLNDLCFTNVYADSFVITGDEVRQIAPGQTGKIADYNYKLPDDFTGCVIAWNSKHIDAKEGGNFNYLYRLFRKANLKPFERDISTEIYQAGSKPCNGQTGLNCYYPLYRYGFYPTDGVGHQPYRVVVLSFELLNAPATVCGPKKSTNLVKNKCVNFNFNGLTGTGVLTESNKKFLPFQQFGRDIADTTDAVRDPQTLEILDITPCSFGGVSVITPGTNASNQVAVLYQDVNCTEVPVAIHADQLTPTWRVYSTGSNVFQTRAGCLIGAEHVNNSYECDIPIGAGICASYQTQTNSRSVASQSIIAYTMSLGAENSVAYSNNSIAIPTNFTISVTTEILPVSMTKTSVDCTMYICGDSTECSNLLLQYGSFCTQLNRALTGIAVEQDKNTQEVFAQVKQIYKTPPIKDFGGFNFSQILPDPSKPSKRSFIEDLLFNKVTLADAGFIKQYGDCLGDIAARDLICAQKFNGLTVLPPLLTDEMIAQYTSALLAGTITSGWTFGAGAALQIPFAMQMAYRFNGIGVTQCVLYENQKLIANQFNSAIGKIQDSLSSTASALGKLQDVVNQNAQALNTLVKQLSSNFGAISSVLNDILSRLDKVEAEVQIDRLITGRLQSLQTYVTQQLIRAAEIRASANLAATKMSECVLGQSKRVDFCGKGYHLMSFPQSAPHGVVFLHVTYVPAQEKNFTTAPAICHDGKAHFPREGVFVSNGTHWFVTQRNFYEPQIITTDNTFVCGSCDVVIGIVNNTVYDPLQPELDSGGGGSDIDPYKEFGSSYQLLNFLPLDFFPDLNALVDTATALYEEELTGREHCSPHHTAIRQALVCWDELTKLIAWMSSNITSEQVRTIIVNHVNDTWGLKVRQSLWFHLSCLTFGQHTVQEFLVSFGVWIRTPAPYRPPNAPILSTLPEHTVIC

SEQ ID NO: 14059 - protein, 1301 aa, Artificial Sequence
  SARS-CoV-2/Wuhan/HBCDC-HB-01/2019__EPI_ISL_402132 spike protein (1-1147)(N914C_S1123C) WhcAg construct
MFVFLVLLPLVSSQCVNLTTRTQLPPAYTNSITRGVYYPDKVFRSSVLHSTQDLFLPFFSNVTWFHAIHVSGTNGTKRFDNPVLPFNDGVYFASTEKSNIIRGWIFGTTLDSKTQSLLIVNNATNVVIKVCEFQFCNDPFLGVYYHKNNKSWMESEFRVYSSANNCTFEYVSQPFLMDLEGKQGNFKNLREFVFKNIDGYFKIYSKHTPINLVRDLPQGFSALEPLVDLPIGINITRFQTLLALHRSYLTPGDSSSGWTAGAAAYYVGYLQPRTFLLKYNENGTITDAVDCALDPLSETKCTLKSFTVEKGIYQTSNFRVQPTESIVRFPNITNLCPFGEVFNATRFASVYAWNRKRISNCVADYSVLYNSASFSTFKCYGVSPTKLNDLCFTNVYADSFVIRGDEVRQIAPGQTGKIADYNYKLPDDFTGCVIAWNSNNLDSKVGGNYNYLYRLFRKSNLKPFERDISTEIYQAGSTPCNGVEGFNCYFPLQSYGFQPTNGVGYQPYRVVVLSFELLHAPATVCGPKKSTNLVKNKCVNFNFNGLTGTGVLTESNKKFLPFQQFGRDIADTTDAVRDPQTLEILDITPCSFGGVSVITPGTNTSNQVAVLYQDVNCTEVPVAIHADQLTPTWRVYSTGSNVFQTRAGCLIGAEHVNNSYECDIPIGAGICASYQTQTNSPRRARSVASQSIIAYTMSLGAENSVAYSNNSIAIPTNFTISVTTEILPVSMTKTSVDCTMYICGDSTECSNLLLQYGSFCTQLNRALTGIAVEQDKNTQEVFAQVKQIYKTPPIKDFGGFNFSQILPDPSKPSKRSFIEDLLFNKVTLADAGFIKQYGDCLGDIAARDLICAQKFNGLTVLPPLLTDEMIAQYTSALLAGTITSGWTFGAGAALQIPFAMQMAYRFNGIGVTQCVLYENQKLIANQFNSAIGKIQDSLSSTASALGKLQDVVNQNAQALNTLVKQLSSNFGAISSVLNDILSRLDKVEAEVQIDRLITGRLQSLQTYVTQQLIRAAEIRASANLAATKMSECVLGQSKRVDFCGKGYHLMSFPQSAPHGVVFLHVTYVPAQEKNFTTAPAICHDGKAHFPREGVFVSNGTHWFVTQRNFYEPQIITTDNTFVCGNCDVVIGIVNNTVYDPLQPELDSGGGGSDIDPYKEFGSSYQLLNFLPLDFFPDLNALVDTATALYEEELTGREHCSPHHTAIRQALVCWDELTKLIAWMSSNITSEQVRTIIVNHVNDTWGLKVRQSLWFHLSCLTFGQHTVQEFLVSFGVWIRTPAPYRPPNAPILSTLPEHTVIC

SEQ ID NO: 14060 - protein, 1301 aa, Artificial Sequence
  SARS-CoV-2/Guangdong/20SF028/2020__EPI_ISL_403936 spike protein (1-1147)(N914C_S1123C) WhcAg construct
MFVFLVLLPLVSSQCVNLTTRTQLPPAYTNSFTRGVYYPDKVFRSSVLYSTQDLFLPFFSNVTWFHAIHVSGTNGTKRFDNPVLPFNDGVYFASTEKSNIIRGWIFGTTLDSKTQSLLIVNNATNVVIKVCEFQFCNDPFLGVYYHKNNKSWMESEFRVYSSANNCTFEYVSQPFLMDLEGKQGNFKNLREFVFKNIDGYFKIYSKHTPINLVRDLPQGFSALEPLVDLPIGINITRFQTLLALHRSYLTPGDSSSGWTAGAAAYYVGYLQPRTFLLKYNENGTITDAVDCALDPLSETKCTLKSFTVEKGIYQTSNFRVQPTESIVRFPNITNLCPFGEVFNATRFASVYAWNRKRISNCVADYSVLYNSASFSTFKCYGVSPTKLNDLCFTNVYADSFVIRGDEVRQIAPGQTGKIADYNYKLPDDFTGCVIAWNSNNLDSKVGGNYNYLYRLFRKSNLKPFERDISTEIYQAGSTPCNGVEGFNCYFPLQSYGFQPTNGVGYQPYRVVVLSFELLHAPATVCGPKKSTNLVKNKCVNFNFNGLTGTGVLTESNKKFLPFQQFGRDIADTTDAVRDPQTLEILDITPCSFGGVSVITPGTNTSNQVAVLYQDVNCTEVPVAIHADQLTPTWRVYSTGSNVFQTRAGCLIGAEHVNNSYECDIPIGAGICASYQTQTNSPRRARSVASQSIIAYTMSLGAENSVAYSNNSIAIPTNFTISVTTEILPVSMTKTSVDCTMYICGDSTECSNLLLQYGSFCTQLNRALTGIAVEQDKNTQEVFAQVKQIYKTPPIKDFGGFNFSQILPDPSKPSKRSFIEDLLFNKVTLADAGFIKQYGDCLGDIAARDLICAQKFNGLTVLPPLLTDEMIAQYTSALLAGTITSGWTFGAGAALQIPFAMQMAYRFNGIGVTQCVLYENQKLIANQFNSAIGKIQDSLSSTASALGKLQDVVNQNAQALNTLVKQLSSNFGAISSVLNDILSRLDKVEAEVQIDRLITGRLQSLQTYVTQQLIRAAEIRASANLAATKMSECVLGQSKRVDFCGKGYHLMSFPQSAPHGVVFLHVTYVPAQEKNFTTAPAICHDGKAHFPREGVFVSNGTHWFVTQRNFYEPQIITTDNTFVCGNCDVVIGIVNNTVYDPLQPELDSGGGGSDIDPYKEFGSSYQLLNFLPLDFFPDLNALVDTATALYEEELTGREHCSPHHTAIRQALVCWDELTKLIAWMSSNITSEQVRTIIVNHVNDTWGLKVRQSLWFHLSCLTFGQHTVQEFLVSFGVWIRTPAPYRPPNAPILSTLPEHTVIC

SEQ ID NO: 14061 - protein, 1301 aa, Artificial Sequence
  SARS-CoV-2/Shenzhen/SZTH-001/2020__EPI_ISL_406592 spike protein (1-1147)(N914C_S1123C) WhcAg construct
MFVFLVLLPLVSSQCVNLTTRTQLPPAYTNSFTRGVYYPDKVFRSSVLHSTQDLFLPFFSNVTWFHAIHVSGTNGTKRFDNPVLPFNDGVYFASTEKSNIIRGWIFGTTLDSKTQSLLIVNNATNVVIKVCEFQFCNDPFLGVYYHKNNKSWMESEFRVYSSANNCTFEYVSQPFLMDLEGKQGNFKNLREFVFKNIDGYFKIYSKHTPINLVRDLPQGFSALEPLVDLPIGINITRFQTLLALHRSYLTPGDSSSGWTAGAAAYYVGYLQPRTFLLKYNENGTITDAVDCALDPLSETKCTLKSFTVEKGIYQTSNFRVQPTESIVRFPNITNLCPFGEVFNATRFASVYAWNRKRISNCVADYSVLYNSASFSTFKCYGVSPTKLNDLCFTNVYADSFVIRGDEVRQIAPGQTGKIADYNYKLPDDFTGCVIAWNSNNLDSKVGGNYNYLYRLFRKSNLKPFERDISTEIYQAGSTPCNGVEGFNCYFPLQSYGFQPTNGVGYQPYRVVVLSFELLHAPATVCGPKKSTNLVKNKCVNFNFNGLTGTGVLTESNKKFLPFQQFGRDIADTTDAVRDPQTLEILDITPCSFGGVSVITPGTNTSNQVAVLYQDVNCTEVPVAIHADQLTPTWRVYSTGSNVFQTRAGCLIGAEHVNNSYECDIPIGAGICASYQTQTNSPRRARSVASQSIIAYTMSLGAENSVAYSNNSIAIPTNFTISVTTEILPVSMTKTSVDCTMYICGDSTECSNLLLQYGSFCTQLNRALTGIAVEQDKNTQEVFAQVKQIYKTPPIKDFGGFNFSQILPDPSKPSKRSFIEDLLFNKVTLADAGFIKQYGDCLGDIAARDLICAQKFNGLTVLPPLLTDEMIAQYTSALLAGTITSGWTFGAGAALQIPFAMQMAYRFNGIGVTQCVLYENQKLIANQFNSAIGKIQDSLSSTASALGKLQDVVNQNAQALNTLVKQLSSNFGAISSVLNDILSRLDKVEAEVQIDRLITGRLQSLQTYVTQQLIRAAEIRASANLAATKMSECVLGQSKRVDFCGKGYHLMSFPQSAPHGVVFLHVTYVPAQEKNFTTAPAICHDGKAHFPREGVFVSNGTHWFVTQRNFYEPQIITTDNTFVCGNCDVLIGIVNNTVYDPLQPELDSGGGGSDIDPYKEFGSSYQLLNFLPLDFFPDLNALVDTATALYEEELTGREHCSPHHTAIRQALVCWDELTKLIAWMSSNITSEQVRTIIVNHVNDTWGLKVRQSLWFHLSCLTFGQHTVQEFLVSFGVWIRTPAPYRPPNAPILSTLPEHTVIC

SEQ ID NO: 14062 - protein, 1301 aa, Artificial Sequence
  SARS-CoV-2/Shenzhen/SZTH-004/2020__EPI_ISL_406595 spike protein (1-1147)(N914C_S1123C) WhcAg construct
MFVFLVLLPLVSSQCVNLTTRTQLPPAYTNSFTRGVYYPDKVFRSSVLHSTQDLFLPFFSNVTWFHAIHVSGTNGTKRFDNPVLPFNDGVYFASTEKSNIIRGWIFGTTLDSKTQSLLIVNNATNVVIKVCEFQFCNDPFLGVYYHKNNKSWMESEFRVYSSANNCTFEYVSQPFLMDLEGKQGNFKNLREFVFKNIDGYFKIYSKHTPINLVRDLPQGFSALEPLVDLPIGINITRFQTLLALHRSYLTPGDSSSGWTAGAAAYYVGYLQPRTFLLKYNENGTITDAVDCALDPLSETKCTLKSFTVEKGIYQTSNFRVQPTESIVRFPNITNLCPFGEVFNATRFASVYAWDRKRISNCVAYYSVLYNSASFSTFKCYGVSPTKLNDLCFTNVYADSFVIRGDEVRQIAPGQTGKIADYNYKLPDDFTGCVIAWNSNNLDSKVGGNYNYLYRLFRKSNLKPFERDISTEIYQAGSTPCNGVEGFNCYFPLQSYGFQPTNGVGYQPYRVVVLSFELLHAPATVCGPKKSTNLVKNKCVNFNFNGLTGTGVLTESNKKFLPFQQFGRDIADTTDAVRDPQTLEILDITPCSFGGVSVITPGTNTSNQVAVLYQDVNCTEVPVAIHADQLTPTWRVYSTGSNVFQTRAGCLIGAEHVNNSYECDIPIGAGICASYQTQTNSPRRARSVASQSIIAYTMSLGAENSVAYSNNSIAIPTNFTISVTTEILPVSMTKTSVDCTMYICGDSTECSNLLLQYGSFCTQLNRALTGIAVEQDKNTQEVFAQVKQIYKTPPIKDFGGFNFSQILPDPSKPSKRSFIEDLLFNKVTLADAGFIKQYGDCLGDIAARDLICAQKFNGLTVLPPLLTDEMIAQYTSALLAGTITSGWTFGAGAALQIPFAMQMAYRFNGIGVTQCVLYENQKLIANQFNSAIGKIQDSLSSTASALGKLQDVVNQNAQALNTLVKQLSSNFGAISSVLNDILSRLDKVEAEVQIDRLITGRLQSLQTYVTQQLIRAAEIRASANLAATKMSECVLGQSKRVDFCGKGYHLMSFPQSAPHGVVFLHVTYVPAQEKNFTTAPAICHDGKAHFPREGVFVSNGTHWFVTQRNFYEPQIITTDNTFVCGNCDVVIGIVNNTVYDPLQPELDSGGGGSDIDPYKEFGSSYQLLNFLPLDFFPDLNALVDTATALYEEELTGREHCSPHHTAIRQALVCWDELTKLIAWMSSNITSEQVRTIIVNHVNDTWGLKVRQSLWFHLSCLTFGQHTVQEFLVSFGVWIRTPAPYRPPNAPILSTLPEHTVIC

SEQ ID NO: 14063 - protein, 1301 aa, Artificial Sequence
  SARS-CoV-2/France/IDF0372/2020__EPI_ISL_406596 spike protein (1-1147)(N914C_S1123C) WhcAg construct
MFVFLVLLPLVSSQCVNLTTRTQLPPAYTNSFTRGVYYPDKVFRSSVLHSTQDLFLPFFSNVTWFHAIHVSGTNGTKRFDNPVLPFNDGVYFASTEKSNIIRGWIFGTTLDSKTQSLLIVNNATNVVIKVCEFQFCNDPFLGVYYHKNNKSWMESEFRVYSSANNCTFEYVSQPFLMDLEGKQGNFKNLREFVFKNIDGYFKIYSKHTPINLVRDLPQGFSALEPLVDLPIGINITRFQTLLALHRSYLTPGDSSSGWTAGAAAYYVGYLQPRTFLLKYNENGTITDAVDCALDPLSETKCTLKSFTVEKGIYQTSNFRVQPTESIVRFPNITNLCPFGEVFNATRFASVYAWNRKRISNCVADYSFLYNSASFSTFKCYGVSPTKLNDLCFTNVYADSFVIRGDEVRQIAPGQTGKIADYNYKLPDDFTGCVIAWNSNNLDSKVGGNYNYLYRLFRKSNLKPFERDISTEIYQAGSTPCNGVEGFNCYFPLQSYGFQPTNGVGYQPYRVVVLSFELLHAPATVCGPKKSTNLVKNKCVNFNFNGLTGTGVLTESNKKFLPFQQFGRDIADTTDAVRDPQTLEILDITPCSFGGVSVITPGTNTSNQVAVLYQDVNCTEVPVAIHADQLTPTWRVYSTGSNVFQTRAGCLIGAEHVNNSYECDIPIGAGICASYQTQTNSPRRARSVASQSIIAYTMSLGAENSVAYSNNSIAIPTNFTISVTTEILPVSMTKTSVDCTMYICGDSTECSNLLLQYGSFCTQLNRALTGIAVEQDKNTQEVFAQVKQIYKTPPIKDFGGFNFSQILPDPSKPSKRSFIEDLLFNKVTLADAGFIKQYGDCLGDIAARDLICAQKFNGLTVLPPLLTDEMIAQYTSALLAGTITSGWTFGAGAALQIPFAMQMAYRFNGIGVTQCVLYENQKLIANQFNSAIGKIQDSLSSTASALGKLQDVVNQNAQALNTLVKQLSSNFGAISSVLNDILSRLDKVEAEVQIDRLITGRLQSLQTYVTQQLIRAAEIRASANLAATKMSECVLGQSKRVDFCGKGYHLMSFPQSAPHGVVFLHVTYVPAQEKNFTTAPAICHDGKAHFPREGVFVSNGTHWFVTQRNFYEPQIITTDNTFVCGNCDVVIGIVNNTVYDPLQPELDSGGGGSDIDPYKEFGSSYQLLNFLPLDFFPDLNALVDTATALYEEELTGREHCSPHHTAIRQALVCWDELTKLIAWMSSNITSEQVRTIIVNHVNDTWGLKVRQSLWFHLSCLTFGQHTVQEFLVSFGVWIRTPAPYRPPNAPILSTLPEHTVIC

SEQ ID NO: 14064 - protein, 1301 aa, Artificial Sequence
  SARS-CoV-2/Australia/VIC01/2020__EPI_ISL_406844 spike protein (1-1147)(N914C_S1123C) WhcAg construct
MFVFLVLLPLVSSQCVNLTTRTQLPPAYTNSFTRGVYYPDKVFRSSVLHSTQDLFLPFFSNVTWFHAIHVSGTNGTKRFDNPVLPFNDGVYFASTEKSNIIRGWIFGTTLDSKTQSLLIVNNATNVVIKVCEFQFCNDPFLGVYYHKNNKSWMESEFRVYSSANNCTFEYVSQPFLMDLEGKQGNFKNLREFVFKNIDGYFKIYSKHTPINLVRDLPQGFSALEPLVDLPIGINITRFQTLLALHRRYLTPGDSSSGWTAGAAAYYVGYLQPRTFLLKYNENGTITDAVDCALDPLSETKCTLKSFTVEKGIYQTSNFRVQPTESIVRFPNITNLCPFGEVFNATRFASVYAWNRKRISNCVADYSVLYNSASFSTFKCYGVSPTKLNDLCFTNVYADSFVIRGDEVRQIAPGQTGKIADYNYKLPDDFTGCVIAWNSNNLDSKVGGNYNYLYRLFRKSNLKPFERDISTEIYQAGSTPCNGVEGFNCYFPLQSYGFQPTNGVGYQPYRVVVLSFELLHAPATVCGPKKSTNLVKNKCVNFNFNGLTGTGVLTESNKKFLPFQQFGRDIADTTDAVRDPQTLEILDITPCSFGGVSVITPGTNTSNQVAVLYQDVNCTEVPVAIHADQLTPTWRVYSTGSNVFQTRAGCLIGAEHVNNSYECDIPIGAGICASYQTQTNSPRRARSVASQSIIAYTMSLGAENSVAYSNNSIAIPTNFTISVTTEILPVSMTKTSVDCTMYICGDSTECSNLLLQYGSFCTQLNRALTGIAVEQDKNTQEVFAQVKQIYKTPPIKDFGGFNFSQILPDPSKPSKRSFIEDLLFNKVTLADAGFIKQYGDCLGDIAARDLICAQKFNGLTVLPPLLTDEMIAQYTSALLAGTITSGWTFGAGAALQIPFAMQMAYRFNGIGVTQCVLYENQKLIANQFNSAIGKIQDSLSSTASALGKLQDVVNQNAQALNTLVKQLSSNFGAISSVLNDILSRLDKVEAEVQIDRLITGRLQSLQTYVTQQLIRAAEIRASANLAATKMSECVLGQSKRVDFCGKGYHLMSFPQSAPHGVVFLHVTYVPAQEKNFTTAPAICHDGKAHFPREGVFVSNGTHWFVTQRNFYEPQIITTDNTFVCGNCDVVIGIVNNTVYDPLQPELDSGGGGSDIDPYKEFGSSYQLLNFLPLDFFPDLNALVDTATALYEEELTGREHCSPHHTAIRQALVCWDELTKLIAWMSSNITSEQVRTIIVNHVNDTWGLKVRQSLWFHLSCLTFGQHTVQEFLVSFGVWIRTPAPYRPPNAPILSTLPEHTVIC

SEQ ID NO: 14065 - protein, 1301 aa, Artificial Sequence
  SARS-CoV-2/Germany/BavPat1/2020__EPI_ISL_406862 spike protein (1-1147)(N914C_S1123C) WhcAg construct
MFVFLVLLPLVSSQCVNLTTRTQLPPAYTNSFTRGVYYPDKVFRSSVLHSTQDLFLPFFSNVTWFHAIHVSGTNGTKRFDNPVLPFNDGVYFASTEKSNIIRGWIFGTTLDSKTQSLLIVNNATNVVIKVCEFQFCNDPFLGVYYHKNNKSWMESEFRVYSSANNCTFEYVSQPFLMDLEGKQGNFKNLREFVFKNIDGYFKIYSKHTPINLVRDLPQGFSALEPLVDLPIGINITRFQTLLALHRSYLTPGDSSSGWTAGAAAYYVGYLQPRTFLLKYNENGTITDAVDCALDPLSETKCTLKSFTVEKGIYQTSNFRVQPTESIVRFPNITNLCPFGEVFNATRFASVYAWNRKRISNCVADYSVLYNSASFSTFKCYGVSPTKLNDLCFTNVYADSFVIRGDEVRQIAPGQTGKIADYNYKLPDDFTGCVIAWNSNNLDSKVGGNYNYLYRLFRKSNLKPFERDISTEIYQAGSTPCNGVEGFNCYFPLQSYGFQPTNGVGYQPYRVVVLSFELLHAPATVCGPKKSTNLVKNKCVNFNFNGLTGTGVLTESNKKFLPFQQFGRDIADTTDAVRDPQTLEILDITPCSFGGVSVITPGTNTSNQVAVLYQGVNCTEVPVAIHADQLTPTWRVYSTGSNVFQTRAGCLIGAEHVNNSYECDIPIGAGICASYQTQTNSPRRARSVASQSIIAYTMSLGAENSVAYSNNSIAIPTNFTISVTTEILPVSMTKTSVDCTMYICGDSTECSNLLLQYGSFCTQLNRALTGIAVEQDKNTQEVFAQVKQIYKTPPIKDFGGFNFSQILPDPSKPSKRSFIEDLLFNKVTLADAGFIKQYGDCLGDIAARDLICAQKFNGLTVLPPLLTDEMIAQYTSALLAGTITSGWTFGAGAALQIPFAMQMAYRFNGIGVTQCVLYENQKLIANQFNSAIGKIQDSLSSTASALGKLQDVVNQNAQALNTLVKQLSSNFGAISSVLNDILSRLDKVEAEVQIDRLITGRLQSLQTYVTQQLIRAAEIRASANLAATKMSECVLGQSKRVDFCGKGYHLMSFPQSAPHGVVFLHVTYVPAQEKNFTTAPAICHDGKAHFPREGVFVSNGTHWFVTQRNFYEPQIITTDNTFVCGNCDVVIGIVNNTVYDPLQPELDSGGGGSDIDPYKEFGSSYQLLNFLPLDFFPDLNALVDTATALYEEELTGREHCSPHHTAIRQALVCWDELTKLIAWMSSNITSEQVRTIIVNHVNDTWGLKVRQSLWFHLSCLTFGQHTVQEFLVSFGVWIRTPAPYRPPNAPILSTLPEHTVIC

SEQ ID NO: 14066 - protein, 1301 aa, Artificial Sequence
  SARS-CoV-2/Wuhan/HBCDC-HB-02/2020__EPI_ISL_412978 spike protein (1-1147)(N914C_S1123C) WhcAg construct
MFVFLVLLPLVSSQCVNLTTRTQLPPAYTNSFTRGVYYPDKVFRSSVLHSTQDLFLPFFSNVTWFHAIHVSGTNGTKRFDNPVLPFNDGVYFASTEKSNIIRGWIFGTTLDSKTQSLLIVNNATNVVIKVCEFQFCNDPFLGVYYHKNNKSWMESEFRVYSSANNCTFEYVSQPFLMDLEGKQGNFKNLREFVFKNIDGYFKIYSKHTPINLVRDLPQGFSALEPLVDLPIGINITRFQTLLALHRSYLTPGDSSSGWTAGAAAYYVGYLQPRTFLLKYNENGTITDAVDCALDPLSETKCTLKSFTVEKGIYQTSNFRVQPTESIVRFPNITNLCPFGEVFNATRFASVYAWNRKRISNCVADYSVLYNSASFSTFKCYGVSPTKLNDLCFTNVYADSFVIRGDEVRQIAPGQTGKIADYNYKLPDDFTGCVIAWNSNNLDSKVGGNYNYLYRLFRKSNLKPFERDISTEIYQAGSTPCNGVEGFNCYFPLQSYGFQPTNGVGYQPYRVVVLSFELLHAPATVCGPKKSTNLVKNKCVNFNFNGLTGTGVLTESNKKFLPFQQFGRDIADTTDAVRDPQTLEILDITPCSFGGVSVITPGTNTSNQVAVLYQDVNCTEVPVAIHADQLTPTWRVYSTGSNVFQTRAGCLIGAEHVNNSYECDIPIGAGICASYQTQTNSPRRARSVASQSIIAYTMSLGAENSVAYSNNSIAIPTNFTISVTTEILPVSMTKTSVDCTMYICGDSTECSNFLLQYGSFCTQLNRALTGIAVEQDKNTQEVFAQVKQIYKTPPIKDFGGFNFSQILPDPSKPSKRSFIEDLLFNKVTLADAGFIKQYGDCLGDIAARDLICAQKFNGLTVLPPLLTDEMIAQYTSALLAGTITSGWTFGAGAALQIPFAMQMAYRFNGIGVTQCVLYENQKLIANQFNSAIGKIQDSLSSTASALGKLQDVVNQNAQALNTLVKQLSSNFGAISSVLNDILSRLDKVEAEVQIDRLITGRLQSLQTYVTQQLIRAAEIRASANLAATKMSECVLGQSKRVDFCGKGYHLMSFPQSAPHGVVFLHVTYVPAQEKNFTTAPAICHDGKAHFPREGVFVSNGTHWFVTQRNFYEPQIITTDNTFVCGNCDVVIGIVNNTVYDPLQPELDSGGGGSDIDPYKEFGSSYQLLNFLPLDFFPDLNALVDTATALYEEELTGREHCSPHHTAIRQALVCWDELTKLIAWMSSNITSEQVRTIIVNHVNDTWGLKVRQSLWFHLSCLTFGQHTVQEFLVSFGVWIRTPAPYRPPNAPILSTLPEHTVIC

SEQ ID NO: 14067 - protein, 1301 aa, Artificial Sequence
  SARS-CoV-2/Australia/QLD02/2020__EPI_ISL_407896 spike protein (1-1147)(N914C_S1123C) WhcAg construct
MFVFLVLLPLVSSQCVNLTTRTQLPPAYTNSFTRGVYYPDKVFRSSVLHSTQDLFLPFFSNVTWFHAIHVSGTNGTKRFDNPVLPFNDGVYFASTEKSNIIRGWIFGTTLDSKTQSLLIVNNATNVVIKVCEFQFCNDPFLGVYYHKNNKSWMESEFRVYSSANNCTFEYVSQPFLMDLEGKQGNFKNLREFVFKNIDGYFKIYSKHTPINLVRDLPQGFSALEPLVDLPIGINITRFQTLLALHRSYLTPGDSSSGWTAGAAAYYVGYLQPRTFLLKYNENGTITDAVDCALDPLSETKCTLKSFTVEKGIYQTSNFRVQPTESIVRFPNITNLCPFGEVFNATRFASVYAWNRKRISNCVADYSVLYNSASFSTFKCYGVSPTKLNDLCFTNVYADSFVIRGDEVRQIAPGQTGKIADYNYKLPDDFTGCVIAWNSNNLDSKVGGNYNYLYRLFRKSNLKPFERDISTEIYQAGSTPCNGVEGFNCYFPLQSYGFQPTNGVGYQPYRVVVLSFELLHAPATVCGPKKSTNLVKNKCVNFNFNGLTGTGVLTESNKKFLPFQQFGRDIADTTDAVRDPQTLEILDITPCSFGGVSVITPGTNTSNQVAVLYQDVNCTEVPVAIHADQLTPTWRVYSTGSNVFQTRAGCLIGAEHVNNSYECDIPIGAGICASYQTQTNSPRRARSVASQSIIAYTMSLGAENSVAYSNNSIAIPTNFTISVTTEILPVSMTKTSVDCTMYICGDSTECSNLLLQYGSFCTQLNRALTGIAVEQDKNTQEVFAQVKQIYKTPPIKDFGGFNFSQILPDPSKPSKRSFIEDLLFNKVTLADAGFIKQYGDCLGDIAARDLICAQKFNGLTVLPPLLTDEMIAQYTSALLAGTITSGWTFGAGAALQIPFAMQMAYRFNGIGVTQCVLYENQKLIANQFNSAIGKIQDSLSSTASALGKLQDVVNQNAQALNTLVKQLSSNFGAISSVLNDILSRLDKVEAEVQIDRLITGRLQSLQTYVTQQLIRAAEIRASANLAATKMSECVLGQSKRVDFCGKGYHLMSFPQSAPHGVVFLHVTYVPAQEKNFTTAPAICHDGKAHFPREGVFVSNGTHWFVTQRNFYEPQIITTDNTFVCGNCDVVIGIVNNTVYDPLQLELDSGGGGSDIDPYKEFGSSYQLLNFLPLDFFPDLNALVDTATALYEEELTGREHCSPHHTAIRQALVCWDELTKLIAWMSSNITSEQVRTIIVNHVNDTWGLKVRQSLWFHLSCLTFGQHTVQEFLVSFGVWIRTPAPYRPPNAPILSTLPEHTVIC

SEQ ID NO: 14068 - protein, 1301 aa, Artificial Sequence
  SARS-CoV-2/India/1-31/2020__EPI_ISL_413523 spike protein (1-1147)(N914C_S1123C) WhcAg construct
MFVFLVLLPLVSSQCVNLTTRTQLPPAYTNSFTRGVYYPDKVFRSSVLHSTQDLFLPFFSNVTWFHAIHVSGTNGTKRFDNPVLPFNDGVYFASTEKSNIIRGWIFGTTLDSKTQSLLIVNNATNVVIKVCEFQFCNDPFLGVYYHKNNKSWMESEFRVYSSANNCTFEYVSQPFLMDLEGKQGNFKNLREFVFKNIDGYFKIYSKHTPINLVRDLPQGFSALEPLVDLPIGINITRFQTLLALHRSYLTPGDSSSGWTAGAAAYYVGYLQPRTFLLKYNENGTITDAVDCALDPLSETKCTLKSFTVEKGIYQTSNFRVQPTESIVRFPNITNLCPFGEVFNATRFASVYAWNRKRISNCVADYSVLYNSASFSTFKCYGVSPTKLNDLCFTNVYADSFVIRGDEVRQIAPGQTGKIADYNYKLPDDFTGCVIAWNSNNLDSKVGGNYNYLYRLFRKSNLKPFERDISTEIYQAGSTPCNGVEGFNCYFPLQSYGFQPTNGVGYQPYRVVVLSFELLHAPATVCGPKKSTNLVKNKCVNFNFNGLTGTGVLTESNKKFLPFQQFGRDIADTTDAVRDPQTLEILDITPCSFGGVSVITPGTNTSNQVAVLYQDVNCTEVPVAIHADQLTPTWRVYSTGSNVFQTRAGCLIGAEHVNNSYECDIPIGAGICASYQTQTNSPRRARSVASQSIIAYTMSLGAENSVAYSNNSIAIPTNFTISVTTEILPVSMTKTSVDCTMYICGDSTECSNLLLQYGSFCTQLNRALTGIAVEQDKNTQEVFAQVKQIYKTPPIKDFGGFNFSQILPDPSKPSKRSFIEDLLFNKVTLADAGFIKQYGDCLGDIAARDLICAQKFNGLTVLPPLLTDEMIAQYTSALLAGTITSGWTFGAGAALQIPFAMQMAYRFNGIGVTQCVLYENQKLIANQFNSVIGKIQDSLSSTASALGKLQDVVNQNAQALNTLVKQLSSNFGAISSVLNDILSRLDKVEAEVQIDRLITGRLQSLQTYVTQQLIRAAEIRASANLAATKMSECVLGQSKRVDFCGKGYHLMSFPQSAPHGVVFLHVTYVPAQEKNFTTAPAICHDGKAHFPREGVFVSNGTHWFVTQRNFYEPQIITTDNTFVCGNCDVVIGIVNNTVYDPLQPELDSGGGGSDIDPYKEFGSSYQLLNFLPLDFFPDLNALVDTATALYEEELTGREHCSPHHTAIRQALVCWDELTKLIAWMSSNITSEQVRTIIVNHVNDTWGLKVRQSLWFHLSCLTFGQHTVQEFLVSFGVWIRTPAPYRPPNAPILSTLPEHTVIC

SEQ ID NO: 14069 - protein, 1301 aa, Artificial Sequence
  SARS-CoV-2/Guangdong/GD2020087-P0008/2020__EPI_ISL_413863 spike protein (1-1147)(N914C_S1123C) WhcAg construct
MFVFLVLLPLVSSQCVNLTTRTQLPPAYTNSFTRGVYYPDKVFRSSVLHSTQDLFLPFFSNVTWFHAIHVSGTNGTKRFDNPVLPFNDGVYFASTEKSNIIRGWIFGTTLDSKTQSLLIVNNATNVVIKVCEFQFCNDPFLGVYYHKNNKSWMESEFRVYSSANNCTFEYVSQPFLMDLEGKQGNFKNLREFVFKNIDGYFKIYSKHTPINLVRDLPQGFSALEPLVDLPIGINITRFQTLLALHRSYLTPGDSSSGWTAGAAAYYVGYLQPRTFLLKYNENGTITDAVDCALDPLSETKCTLKSFTVEKGIYQTSNFRVQPTESIVRFPNITNLCPFGEVFNATRFASVYAWNRKRISNCVADYSVLYNSASFSTFKCYGVSPTKLNDLCFTNVYADSFVIRGDEVREIAPGQTGKIADYNYKLPDDFTGCVIAWNSNNLDSKVGGNYNYLYRLFRKSNLKPFERDISTEIYQAGSTPCNGVEGFNCYFPLQSYGFQPTNGVGYQPYRVVVLSFELLHAPATVCGPKKSTNLVKNKCVNFNFNGLTGTGVLTESNKKFLPFQQFGRDIADTTDAVRDPQTLEILDITPCSFGGVSVITPGTNTSNQVAVLYQDVNCTEVPVAIHADQLTPTWRVYSTGSNVFQTRAGCLIGAEHVNNSYECDIPIGAGICASYQTQTNSPRRARSVASQSIIAYTMSLGAENSVAYSNNSIAIPTNFTISVTTEILPVSMTKTSVDCTMYICGDSTECSNLLLQYGSFCTQLNRALTGIAVEQDKNTQEVFAQVKQIYKTPPIKDFGGFNFSQILPDPSKPSKRSFIEDLLFNKVTLADAGFIKQYGDCLGDIAARDLICAQKFNGLTVLPPLLTDEMIAQYTSALLAGTITSGWTFGAGAALQIPFAMQMAYRFNGIGVTQCVLYENQKLIANQFNSAIGKIQDSLSSTASALGKLQDVVNQNAQALNTLVKQLSSNFGAISSVLNDILSRLDKVEAEVQIDRLITGRLQSLQTYVTQQLIRAAEIRASANLAATKMSECVLGQSKRVDFCGKGYHLMSFPQSAPHGVVFLHVTYVPAQEKNFTTAPAICHDGKAHFPREGVFVSNGTHWFVTQRNFYEPQIITTDNTFVCGNCDVVIGIVNNTVYDPLQPELDSGGGGSDIDPYKEFGSSYQLLNFLPLDFFPDLNALVDTATALYEEELTGREHCSPHHTAIRQALVCWDELTKLIAWMSSNITSEQVRTIIVNHVNDTWGLKVRQSLWFHLSCLTFGQHTVQEFLVSFGVWIRTPAPYRPPNAPILSTLPEHTVIC

SEQ ID NO: 14070 - protein, 1301 aa, Artificial Sequence
  SARS-CoV-2/Sweden/01/2020__EPI_ISL_411951 spike protein (1-1147)(N914C_S1123C) WhcAg construct
MFVFLVLLPLVSSQCVNLTTRTQLPPAYTNSFTRGVYYPDKVFRSSVLHSTQDLFLPFFSNVTWFHAIHVSGTNGTKRFDNPVLPFNDGVYFASTEKSNIIRGWIFGTTLDSKTQSLLIVNNATNVVIKVCEFQFCNDPFLGVYYHKNNKSWMESEFRVYSSANNCTFEYVSQPFLMDLEGKQGNFKNLREFVFKNIDGYFKIYSKHTPINLVRDLPQGFSALEPLVDLPIGINITRFQTLLALHRSYLTPGDSSSGWTAGAAAYYVGYLQPRTFLLKYNENGTITDAVDCALDPLSETKCTLKSFTVEKGIYQTSNFRVQPTESIVRFPNITNLCPFGEVFNATRFASVYAWNRKRISNCVADYSVLYNSASFSTFKCYGVSPTKLNDLCFTNVYADSFVIRGDEVRQIAPGQTGKIADYNYKLPDDFTGCVIAWNSNNLDSKVGGNYNYLYRLFRKSNLKPFERDISTEIYQAGSTPCNGVEGFNCYFPLQSYGFQPTNGVGYQPYRVVVLSFELLHAPATVCGPKKSTNLVKNKCVNFNFNGLTGTGVLTESNKKFLPFQQFGRDIADTTDAVRDPQTLEILDITPCSFGGVSVITPGTNTSNQVAVLYQDVNCTEVPVAIHADQLTPTWRVYSTGSNVFQTRAGCLIGAEHVNNSYECDIPIGAGICASYQTQTNSPRRARSVASQSIIAYTMSLGAENSVAYSNNSIAIPTNFTISVTTEILPVSMTKTSVDCTMYICGDSTECSNLLLQYGSFCTQLNRALTGIAVEQDKNTQEVFAQVKQIYKTPPIKDCGGFNFSQILPDPSKPSKRSFIEDLLFNKVTLADAGFIKQYGDCLGDIAARDLICAQKFNGLTVLPPLLTDEMIAQYTSALLAGTITSGWTFGAGAALQIPFAMQMAYRFNGIGVTQCVLYENQKLIANQFNSAIGKIQDSLSSTASALGKLQDVVNQNAQALNTLVKQLSSNFGAISSVLNDILSRLDKVEAEVQIDRLITGRLQSLQTYVTQQLIRAAEIRASANLAATKMSECVLGQSKRVDFCGKGYHLMSFPQSAPHGVVFLHVTYVPAQEKNFTTAPAICHDGKAHFPREGVFVSNGTHWFVTQRNFYEPQIITTDNTFVCGNCDVVIGIVNNTVYDPLQPELDSGGGGSDIDPYKEFGSSYQLLNFLPLDFFPDLNALVDTATALYEEELTGREHCSPHHTAIRQALVCWDELTKLIAWMSSNITSEQVRTIIVNHVNDTWGLKVRQSLWFHLSCLTFGQHTVQEFLVSFGVWIRTPAPYRPPNAPILSTLPEHTVIC

SEQ ID NO: 14071 - protein, 1301 aa, Artificial Sequence
  SARS-CoV-2/Tianmen/HBCDC-HB-07/2020__EPI_ISL_412983 spike protein (1-1147)(N914C_S1123C) WhcAg construct
MFVFLVLLPLVSSQCVNLTTRTQLPPAYTNSFTRGVYYPDKVFRSSVLHSTQDLFLPFFSNVTWFHAIHVSGTNGTKRFDNPVLPFNDGVYFASTEKSNIIRGWIFGTTLDSKTQSLLIVNNATNVVIKVCEFQFCNDPFLGVYYHKNNKSWMESEFRVYSSANNCTFEYVSQPFLMDLEGKQGNFKNLREFVFKNIDGYFKIYSKHTPINLVRDLPQGFSALEPLVDLPIGINITRFQTLLALHRSYLTPGDSSSGWTAGAAAYYVGYLQPRTFLLKYNENGTITDAVDCALDPLSETKCTLKSFTVEKGIYQTSNFRVQPTESIVRFPNITNLCPFGEVFNATRFASVYAWNRKRISNCVADYSVLYNSASFSTFKCYGVSPTKLNDLCFTNVYADSFVIRGDEVRQIAPGQTGKIADYNYKLPDDFTGCVIAWNSNNLDSKVGGNYNYLYRLFRKSNLKPFERDISTEIYQAGSTPCNGVEGFNCYFPLQSYGFQPTNGVGYQPYRVVVLSFELLHAPATVCGPKKSTNLVKNKCVNFNFNGLTGTGVLTESNKKFLPFQQFGRDIADTTDAVRDPQTLEILDITPCSFGGVSVITPGTNTSNQVAVLYQDLNCTEVPVAIHADQLTPTWRVYSTGSNVFQTRAGCLIGAEHVNNSYECDIPIGAGICASYQTQTNSPRRARSVASQSIIAYTMSLGAENSVAYSNNSIAIPTNFTISVTTEILPVSMTKTSVDCTMYICGDSTECSNLLLQYGSFCTQLNRALTGIAVEQDKNTQEVFAQVKQIYKTPPIKDFGGFNFSQILPDPSKPSKRSFIEDLLFNKVTLADAGFIKQYGDCLGDIAARDLICAQKFNGLTVLPPLLTDEMIAQYTSALLAGTITSGWTFGAGAALQIPFAMQMAYRFNGIGVTQCVLYENQKLIANQFNSAIGKIQDSLSSTASALGKLQDVVNQNAQALNTLVKQLSSNFGAISSVLNDILSRLDKVEAEVQIDRLITGRLQSLQTYVTQQLIRAAEIRASANLAATKMSECVLGQSKRVDFCGKGYHLMSFPQSAPHGVVFLHVTYVPAQEKNFTTAPAICHDGKAHFPREGVFVSNGTHWFVTQRNFYEPQIITTDNTFVCGNCDVVIGIVNNTVYDPLQPELDSGGGGSDIDPYKEFGSSYQLLNFLPLDFFPDLNALVDTATALYEEELTGREHCSPHHTAIRQALVCWDELTKLIAWMSSNITSEQVRTIIVNHVNDTWGLKVRQSLWFHLSCLTFGQHTVQEFLVSFGVWIRTPAPYRPPNAPILSTLPEHTVIC

SEQ ID NO: 14072 - protein, 1301 aa, Artificial Sequence
  SARS-CoV-2/Hong Kong/case42_VM20002493/2020__EPI_ISL_414527 spike protein (1-1147)(N914C_S1123C) WhcAg construct
MFVFLVLLPLVSSQCVNLTTRTQLPPAYTNSFTRGVYYPDKVFRSSVLHSTQDLFLPFFSNVTWFHAIHVSGTNGTKRFDNPVLPFNDGVYFASTEKSNIIRGWIFGTTLDSKTQSLLIVNNATNVVIKVCEFQFCNDPFLGVYYHKNNKSWMESEFRVYSSANNCTFEYVSQPFLMDLEGKQGNFKNLREFVFKNIDGYFKIYSKHTPINLVRDLPQGFSALEPLVDLPIGINITRFQTLLALHRSYLTPGDSSSGWTAGAAAYYVGYLQPRTFLLKYNENGTITDAVDCALDPLSETKCTLKSFTVEKGIYQTSNFRVQPTESIVRFPNITNLCPFGEVFNATRFASVYAWNRKRISNCVADYSVLYNSASFSTFKCYGVSPTKLNDLCFTNVYADSFVIRGDEVRQIAPGQTGKIADYNYKLPDDFTGCVIAWNSNNLDSKVGGNYNYLYRLFRKSNLKPFERDISTEIYQAGSTPCNGVEGFNCYFPLQSYGFQPTNGVGYQPYRVVVLSFELLHAPATVCGPKKSTNLVKNKCVNFNFNGLTGTGVLTESNKKFLPFQQFGRDIADTTDAVRDPQTLEILDITPCSFGGVSVITPGTNTSNQVAVLYQDVNCTEVPVAIHADQLTPTWRVYSTGSNVFQTRAGCLIGAEHVNNSYECDIPIGAGICASYQTQTNSPRRARSVASQSIIAYTMSLGAENSVAYSNNSIAIPTNFAISVTTEILPVSMTKTSVDCTMYICGDSTECSNLLLQYGSFCTQLNRALTGIAVEQDKNTQEVFAQVKQIYKTPPIKDFGGFNFSQILPDPSKPSKRSFIEDLLFNKVTLADAGFIKQYGDCLGDIAARDLICAQKFNGLTVLPPLLTDEMIAQYTSALLAGTITSGWTFGAGAALQIPFAMQMAYRFNGIGVTQCVLYENQKLIANQFNSAIGKIQDSLSSTASALGKLQDVVNQNAQALNTLVKQLSSNFGAISSVLNDILSRLDKVEAEVQIDRLITGRLQSLQTYVTQQLIRAAEIRASANLAATKMSECVLGQSKRVDFCGKGYHLMSFPQSAPHGVVFLHVTYVPAQEKNFTTAPAICHDGKAHFPREGVFVSNGTHWFVTQRNFYEPQIITTDNTFVCGNCDVVIGIVNNTVYDPLQPELDSGGGGSDIDPYKEFGSSYQLLNFLPLDFFPDLNALVDTATALYEEELTGREHCSPHHTAIRQALVCWDELTKLIAWMSSNITSEQVRTIIVNHVNDTWGLKVRQSLWFHLSCLTFGQHTVQEFLVSFGVWIRTPAPYRPPNAPILSTLPEHTVIC

SEQ ID NO: 14073 - protein, 1301 aa, Artificial Sequence
  SARS-CoV-2/USA/CruiseA-23/2020__EPI_ISL_414482 spike protein (1-1147)(N914C_S1123C) WhcAg construct
MFVFLVLLPLVSSQCVNLTTRTQLPPAYTNSFTRGVYYPDKVFRSSVLHSTQDLFLPFFSNVTWFHAIHVSGTNGTKRFDNPVLPFNDGVYFASTEKSNIIRGWIFGTTLDSKTQSLLIVNNATNVVIKVCEFQFCNDPFLGVYYHKNNKSWMESEFRVYSSANNCTFEYVSQPFLMDLEVKQGNFKNLREFVFKNIDGYFKIYSKHTPINLVRDLPQGFSALEPLVDLPIGINITRFQTLLALHRSYLTPGDSSSGWTAGAAAYYVGYLQPRTFLLKYNENGTITDAVDCALDPLSETKCTLKSFTVEKGIYQTSNFRVQPTESIVRFPNITNLCPFGEVFNATRFASVYAWNRKRISNCVADYSVLYNSASFSTFKCYGVSPTKLNDLCFTNVYADSFVIRGDEVRQIAPGQTGKIADYNYKLPDDFTGCVIAWNSNNLDSKVGGNYNYLYRLFRKSNLKPFERDISTEIYQAGSTPCNGVEGFNCYFPLQSYGFQPTNGVGYQPYRVVVLSFELLHAPATVCGPKKSTNLVKNKCVNFNFNGLTGTGVLTESNKKFLPFQQFGRDIADTTDAVRDPQTLEILDITPCSFGGVSVITPGTNTSNQVAVLYQDVNCTEVPVAIHADQLTPTWRVYSTGSNVFQTRAGCLIGAEHVNNSYECDIPIGAGICASYQTQTNSPRRARSVASQSIIAYTMSLGAENSVAYSNNSIAIPTNFTISVTTEILPVSMTKTSVDCTMYICGDSTECSNLLLQYGSFCTQLNRALTGIAVEQDKNTQEVFAQVKQIYKTPPIKDFGGFNFSQILPDPSKPSKRSFIEDLLFNKVTLADAGFIKQYGDCLGDIAARDLICAQKFNGLTVLPPLLTDEMIAQYTSALLAGTITSGWTFGAGAALQIPFAMQMAYRFNGIGVTQCVLYENQKLIANQFNSAIGKIQDSLSSTASALGKLQDVVNQNAQALNTLVKQLSSNFGAISSVLNDILSRLDKVEAEVQIDRLITGRLQSLQTYVTQQLIRAAEIRASANLAATKMSECVLGQSKRVDFCGKGYHLMSFPQSAPHGVVFLHVTYVPAQEKNFTTAPAICHDGKAHFPREGVFVSNGTHWFVTQRNFYEPQIITTDNTFVCGNCDVVIGIVNNTVYDPLQPELDSGGGGSDIDPYKEFGSSYQLLNFLPLDFFPDLNALVDTATALYEEELTGREHCSPHHTAIRQALVCWDELTKLIAWMSSNITSEQVRTIIVNHVNDTWGLKVRQSLWFHLSCLTFGQHTVQEFLVSFGVWIRTPAPYRPPNAPILSTLPEHTVIC

SEQ ID NO: 14074 - protein, 1301 aa, Artificial Sequence
  SARS-CoV-2/Hong Kong/case85_VM20002868/2020__EPI_ISL_414519 spike protein (1-1147)(N914C_S1123C) WhcAg construct
MFVFLVLVPLVSSQCVNLTTRTQLPPAYTNSFTRGVYYPDKVFRSSVLHSTQDLFLPFFSNVTWFHAIHVSGTNGTKRFDNPVLPFNDGVYFASTEKSNIIRGWIFGTTLDSKTQSLLIVNNATNVVIKVCEFQFCNDPFLGVYYHKNNKSWMESEFRVYSSANNCTFEYVSQPFLMDLEGKQGNFKNLREFVFKNIDGYFKIYSKHTPINLVRDLPQGFSALEPLVDLPIGINITRFQTLLALHRSYLTPGDSSSGWTAGAAAYYVGYLQPRTFLLKYNENGTITDAVDCALDPLSETKCTLKSFTVEKGIYQTSNFRVQPTESIVRFPNITNLCPFGEVFNATRFASVYAWNRKRISNCVADYSVLYNSASFSTFKCYGVSPTKLNDLCFTNVYADSFVIRGDEVRQIAPGQTGKIADYNYKLPDDFTGCVIAWNSNNLDSKVGGNYNYLYRLFRKSNLKPFERDISTEIYQAGSTPCNGVEGFNCYFPLQSYGFQPTNGVGYQPYRVVVLSFELLHAPATVCGPKKSTNLVKNKCVNFNFNGLTGTGVLTESNKKFLPFQQFGRDIADTTDAVRDPQTLEILDITPCSFGGVSVITPGTNTSNQVAVLYQDVNCTEVPVAIHADQLTPTWRVYSTGSNVFQTRAGCLIGAEHVNNSYECDIPIGAGICASYQTQTNSPRRARSVASQSIIAYTMSLGAENSVAYSNNSIAIPTNFTISVTTEILPVSMTKTSVDCTMYICGDSTECSNLLLQYGSFCTQLNRALTGIAVEQDKNTQEVFAQVKQIYKTPPIKDFGGFNFSQILPDPSKPSKRSFIEDLLFNKVTLADAGFIKQYGDCLGDIAARDLICAQKFNGLTVLPPLLTDEMIAQYTSALLAGTITSGWTFGAGAALQIPFAMQMAYRFNGIGVTQCVLYENQKLIANQFNSAIGKIQDSLSSTASALGKLQDVVNQNAQALNTLVKQLSSNFGAISSVLNDILSRLDKVEAEVQIDRLITGRLQSLQTYVTQQLIRAAEIRASANLAATKMSECVLGQSKRVDFCGKGYHLMSFPQSAPHGVVFLHVTYVPAQEKNFTTAPAICHDGKAHFPREGVFVSNGTHWFVTQRNFYEPQIITTDNTFVCGNCDVVIGIVNNTVYDPLQPELDSGGGGSDIDPYKEFGSSYQLLNFLPLDFFPDLNALVDTATALYEEELTGREHCSPHHTAIRQALVCWDELTKLIAWMSSNITSEQVRTIIVNHVNDTWGLKVRQSLWFHLSCLTFGQHTVQEFLVSFGVWIRTPAPYRPPNAPILSTLPEHTVIC

SEQ ID NO: 14075 - protein, 1301 aa, Artificial Sequence; identical to SEQ ID NO: 14065
  SARS-CoV-2/England/200990660/2020__EPI_ISL_414523 spike protein (1-1147)(N914C_S1123C) WhcAg construct

SEQ ID NO: 14076 - protein, 1301 aa, Artificial Sequence
  SARS-CoV-2/Australia/NSW09/2020__EPI_ISL_413595 spike protein (1-1147)(N914C_S1123C) WhcAg construct
MFVFLVLLPLVSSQCVNLTTRTQLPPAYTNSFTRGVYYPDKVFRSSVLHSTQDLFLPFFSNVTWFHAIHVSGTNGTKRFDNPVLPFNDGVYFASTEKSNIIRGWIFGTTLDSKTQSLLIVNNATNVVIKVCEFQFCNDPFLGVYYHKNNKSWMESEFRVYSSANNCTFEYVSQPFLMDLEGKQGNFKNLREFVFKNIDGYFKIYSKHTPINLVRDLPQGFSALEPLVDLPIGINITRFQTLLALHRSYLTPGDSSSGWTAGAAAYYVGYLQPRTFLLKYNENGTITDAVDCALDPLSETKCTLKSFTVEKGIYQTSNFRVQPTESIVRFPNITNLCPFGEVFNATRFASVYAWNRKRISNCVADYSVLYNSASFSTFKCYGVSPTKLNDLCFTNVYADSFVIRGDEVRQIAPGQTGKIADYNYKLPDDFTGCVIAWNSNNLDSKVGGNYNYLYRLFRKSNLKPFERDISTEIYQAGSTPCNGVEGFNCYFPLQSYGFQPTNGVGYQPYRVVVLSFELLHAPATVCGPKKSTNLVKNKCVNFNFNGLTGTGVLTESNKKFLPFQQFGRDIADTTDAVRDPQTLEILDITPCSFGGVSVITPGTNTSNQVAVLYQDVNCTEVPVAIHADQLTPTWRVYSTGSNVFQTRAGCLIGAEHVNNSYECDIPIGAGICASYQTQTNSPRRARSVASQSIIAYTMSLGAENSVAYSNNSIAIPTNFTISVTTEILPVSMTKTSVDCTMYICGDSTECSNLLLQYGSFCTQLNRALTGIAVEQDKNTQEVFAQVKQIYKTPPIKDFGGFNFSQILPDPSKPSKRSFIEDLLFNKVTLADAGFIKQYGDCLGDIAARDLICAQKFNGLTVLPPLLTDEMIAQYTSALLAGTITSGWTFGAGAALQIPFAMQMAYRFNGIGVTQCVLYENQKLIANQFNSAIGKIQDSLSFTASALGKLQDVVNQNAQALNTLVKQLSSNFGAISSVLNDILSRLDKVEAEVQIDRLITGRLQSLQTYVTQQLIRAAEIRASANLAATKMSECVLGQSKRVDFCGKGYHLMSFPQSAPHGVVFLHVTYVPAQEKNFTTAPAICHDGKAHFPREGVFVSNGTHWFVTQRNFYEPQIITTDNTFVCGNCDVVIGIVNNTVYDPLQPELDSGGGGSDIDPYKEFGSSYQLLNFLPLDFFPDLNALVDTATALYEEELTGREHCSPHHTAIRQALVCWDELTKLIAWMSSNITSEQVRTIIVNHVNDTWGLKVRQSLWFHLSCLTFGQHTVQEFLVSFGVWIRTPAPYRPPNAPILSTLPEHTVIC

SEQ ID NO: 14077 - protein, 1301 aa, Artificial Sequence; identical to SEQ ID NO: 14057
  SARS-CoV-2/Australia/NSW10/2020__EPI_ISL_413596 spike protein (1-1147)(N914C_S1123C) WhcAg construct

SEQ ID NO: 14078 - protein, 1301 aa, Artificial Sequence
  SARS-CoV-2/Switzerland/1000477797/2020__EPI_ISL_413023 spike protein (1-1147)(N914C_S1123C) WhcAg construct
MFVFLVLLPLVSSQCVNLTTRTQLPPAYTNSFTRGVYYPDKVFRSSVLHSTQDLFLPFFSNVTWFHAIHVSGTNGTKRFDNPVLPFNDGVYFASTEKSNIIRGWIFGTTLDSKTQSLLIVNNATNVVIKVCEFQFCNDPFLGVYYHKNNKSWMESEFRVYSSANNCTFEYVSQPFLMDLEGKQGNFKNLREFVFKNIDGYFNIYSKHTPINLVRDLPQGFSALEPLVDLPIGINITRFQTLLALHRSYLTPGDSSSGWTAGAAAYYVGYLQPRTFLLKYNENGTITDAVDCALDPLSETKCTLKSFTVEKGIYQTSNFRVQPTESIVRFPNITNLCPFGEVFNATRFASVYAWNRKRISNCVADYSVLYNSASFSTFKCYGVSPTKLNDLCFTNVYADSFVIRGDEVRQIAPGQTGKIADYNYKLPDDFTGCVIAWNSNNLDSKVGGNYNYLYRLFRKSNLKPFERDISTEIYQAGSTPCNGVEGFNCYFPLQSYGFQPTNGVGYQPYRVVVLSFELLHAPATVCGPKKSTNLVKNKCVNFNFNGLTGTGVLTESNKKFLPFQQFGRDIADTTDAVRDPQTLEILDITPCSFGGVSVITPGTNTSNQVAVLYQGVNCTEVPVAIHADQLTPTWRVYSTGSNVFQTRAGCLIGAEHVNNSYECDIPIGAGICASYQTQTNSPRRARSVASQSIIAYTMSLGAENSVAYSNNSIAIPTNFTISVTTEILPVSMTKTSVDCTMYICGDSTECSNLLLQYGSFCTQLNRALTGIAVEQDKNTQEVFAQVKQIYKTPPIKDFGGFNFSQILPDPSKPSKRSFIEDLLFNKVTLADAGFIKQYGDCLGDIAARDLICAQKFNGLTVLPPLLTDEMIAQYTSALLAGTITSGWTFGAGAALQIPFAMQMAYRFNGIGVTQCVLYENQKLIANQFNSAIGKIQDSLSSTASALGKLQDVVNQNAQALNTLVKQLSSNFGAISSVLNDILSRLDKVEAEVQIDRLITGRLQSLQTYVTQQLIRAAEIRASANLAATKMSECVLGQSKRVDFCGKGYHLMSFPQSAPHGVVFLHVTYVPAQEKNFTTAPAICHDGKAHFPREGVFVSNGTHWFVTQRNFYEPQIITTDNTFVCGNCDVVIGIVNNTVYDPLQPELDSGGGGSDIDPYKEFGSSYQLLNFLPLDFFPDLNALVDTATALYEEELTGREHCSPHHTAIRQALVCWDELTKLIAWMSSNITSEQVRTIIVNHVNDTWGLKVRQSLWFHLSCLTFGQHTVQEFLVSFGVWIRTPAPYRPPNAPILSTLPEHTVIC

SEQ ID NO: 14079 - protein, 1301 aa, Artificial Sequence
  SARS-CoV-2/Belgium/BA-02291/2020__EPI_ISL_415159 spike protein (1-1147)(N914C_S1123C) WhcAg construct
MFVFLVLLPLVSSQCVNLTTRTQLPPAYTNSFTRGVYYPDKVFRSSVLHSTQDLFLPFFSNVTWFHAIHVSGTNGTKRFDNPVLPFNDGVYFASTEKSNIIRGWIFGTTLDSKTQSLLIVNNATNVVIKVCEFQFCNDPFLGVYYHKNNKSWMESEFRVYSSANNCTFEYVSQPFLMDLEGKQGNFKNLREFVFKNIDGYFKIYSKHTPINLVRDLPQGFSALEPLVDLPIGINITRFQTLLALHRSYLTPGDSSSGWTAGAAAYYVGYLQPRTFLLKYNENGTITDAVDCALDPLSETKCTLKSFTVEKGIYQTSNFRVQPTESIVRFPNITNLCPFGEVFNATRFASVYAWNRKRISNCVADYSVLYNSASFSTFKCYGVSPTKLNDLCFTNVYADSFVIRGDEVRQIAPGQTGKIADYNYKLPDDFTGCVIAWNSNNLDSKVGGNYNYLYRLFRRSNLKPFERDISTEIYQAGSTPCNGVEGFNCYFPLQSYGFQPTNGVGYQPYRVVVLSFELLPAPATVCGPKKSTNLVKNKCVNFNFNGLTGTGVLTESNKKFLPFQQFGRDIADTTDAVRDPQTLEILDITPCSFGGVSVITPGTNTSNQVAVLYQGVNCTEVPVAIHADQLTPTWRVYSTGSNVFQTRAGCLIGAEHVNNSYECDIPIGAGICASYQTQTNSPRRARSVASQSIIAYTMSLGAENSVAYSNNSIAIPTNFTISVTTEILPVSMTKTSVDCTMYICGDSTECSNLLLQYGSFCTQLNRALTGIAVEQDKNTQEVFAQVKQIYKTPPIKDFGGFNFSQILPDPSKPSKRSFIEDLLFNKVTLADAGFIKQYGDCLGDIAARDLICAQKFNGLTVLPPLLTDEMIAQYTSALLAGTITSGWTFGAGAALQIPFAMQMAYRFNGIGVTQCVLYENQKLIANQFNSAIGKIQDSLSSAAPALGKLQDVVNQNAQALNTLVKQLSSNFGAISSVLNDILSRLDKVEAEVQIDRLITGRLQSLQTYVTQQLIRAAEIRASANLAATKMSECVLGQSKRVDFCGKGYHLMSFPQSAPHGVVFLHVTYVPAQEKNFTTAPAICHDGKAHFPREGVFVSNGTHWFVTQRNFYEPQIITTDNTFVCGNCDVVIGIVNNTVYDPLQPELDSGGGGSDIDPYKEFGSSYQLLNFLPLDFFPDLNALVDTATALYEEELTGREHCSPHHTAIRQALVCWDELTKLIAWMSSNITSEQVRTIIVNHVNDTWGLKVRQSLWFHLSCLTFGQHTVQEFLVSFGVWIRTPAPYRPPNAPILSTLPEHTVIC

SEQ ID NO: 14080 - protein, 1301 aa, Artificial Sequence
  SARS-CoV-2/USA/WA8-UW5/2020__EPI_ISL_413486 spike protein (1-1147)(N914C_S1123C) WhcAg construct
MFVFLVLLPLVSSQCVNLTTRTQLPPAYTNSFTRGVYYPDKVFRSSVLHSTQDLFLPFFSNVTWFHAIHVSGTNGTKRFDNPVLPFNDGVYFASTEKSNIIRGWIFGTTLDSKTQSLLIVNNATNVVIKVCEFQFCNDPFLGVYYHKNNKSWMESEFRVYSSANNCTFEYVSQPFLMDLEGKQGNFKNLREFVFKNIDGYFKIYSKHTPINLVRDLPQGFSALEPLVDLPIGINITRFQTLLALHRSYLTPGDSSSGWTAGAAAYYVGYLQPRTFLLKYNENGTITDAVDCALDPLSETKCTLKSFTVEKGIYQTSNFRVQPTESIVRFPNITNLCPFGEVFNATRFASVYAWNRKRISNCVADYSVLYNSASFSTFKCYGVSPTKLNDLCFTNVYADSFVIRGDEVRQIAPGQTGKIADYNYKLPDDFTGCVIAWNSNNLDSKVGGNYNYLYRLFRKSNLKPFERDISTEIYQAGSTPCNGVEGFNCYFPLQSYGFQPTNGVGYQPYRVVVLSFELLHAPATVCGPKKSTNLVKNKCVNFNFNGLTGTGVLTESNKKFLPFQQFGRDIADTTDAVRDPQTLEILDITPCSFGGVSVITPGTNTSNQVAVLYQDVNCTEVPVAIHADQLTPTWRVYSTGSNVFQTRAGCLIGAEYVNNSYECDIPIGAGICASYQTQTNSPRRARSVASQSIIAYTMSLGAENSVAYSNNSIAIPTNFTISVTTEILPVSMTKTSVDCTMYICGDSTECSNLLLQYGSFCTQLNRALTGIAVEQDKNTQEVFAQVKQIYKTPPIKDFGGFNFSQILPDPSKPSKRSFIEDLLFNKVTLADAGFIKQYGDCLGDIAARDLICAQKFNGLTVLPPLLTDEMIAQYTSALLAGTITSGWTFGAGAALQIPFAMQMAYRFNGIGVTQCVLYENQKLIANQFNSAIGKIQDSLSSTASALGKLQDVVNQNAQALNTLVKQLSSNFGAISSVLNDILSRLDKVEAEVQIDRLITGRLQSLQTYVTQQLIRAAEIRASANLAATKMSECVLGQSKRVDFCGKGYHLMSFPQSAPHGVVFLHVTYVPAQEKNFTTAPAICHDGKAHFPREGVFVSNGTHWFVTQRNFYEPQIITTDNTFVCGNCDVVIGIVNNTVYDPLQPELDSGGGGSDIDPYKEFGSSYQLLNFLPLDFFPDLNALVDTATALYEEELTGREHCSPHHTAIRQALVCWDELTKLIAWMSSNITSEQVRTIIVNHVNDTWGLKVRQSLWFHLSCLTFGQHTVQEFLVSFGVWIRTPAPYRPPNAPILSTLPEHTVIC

SEQ ID NO: 14081 - protein, 1301 aa, Artificial Sequence
  SARS-CoV-2/England/20102000506/2020__EPI_ISL_415147 spike protein (1-1147)(N914C_S1123C) WhcAg construct
MFVFLVLLPLVSSQCVNLTTRTQLPPAYTNSFTRGVYYPDKVFRSSVLHSTQDLFLPFFSNVTWFHAIHVSGTNGTKRFDNPVLPFNDGVYFASTEKSNIIRGWIFGTTLDSKTQSLLIVNNATNVVIKVCEFQFCNDPFLGVYYHKNNKSWMESEFRVYSSANNCTFEYVSQPFLMDLEGKQGNFKNLREFVFKNIDGYFKIYSKHTPINLVRDLPQGFSALEPLVDLPIGINITRFQTLLALHRSYLTPGDSSSGWTAGAAAYYVGYLQPRTFLLKYNENGTITDAVDCALDPLSETKCTLKSFTVEKGIYQTSNFRVQPTESIVRFPNITNLCPFGEVFNATRFASVYAWNRKRISNCVADYSVLYNSASFSTFKCYGVSPTKLNDLCFTNVYADSFVIRGDEVRQIAPGQTGKIADYNYKLPDDFTGCVIAWNSNNLDSKVGGNYNYLYRLFRKSNLKPFERDISTEIYQAGSTPCNGVEGFNCYFPLQSYGFQPTNGVGYQPYRVVVLSFELLHAPATVCGPKKSTNLVKNKCVNFNFNGLTGTGVLTESNKKFLPFQQFGRDIADTTDAVRDPQTLEILDITPCSFGGVSVITPGTNTSNQVAVLYQGVNCTEVPVAIHADQLTPTWRVYSTGSNVFQTRAGCLIGAEHVNNSYECDIPIGAGICASYQTQTNSPRRARSVASQSIIAYTMSLGAENSVAYSNNSIAIPTNFTISVTTEILPVSMTKTSVDCTMYICGDSTECSNLLLQYGSFCTQLNRALTGIAVEQDKNTQEVFAQVKQIYKTPPIKDFGGFNFSQILPDPSKPSKRSFIEDLLFNKVTLADAGFIKQYGYCLGDIAARDLICAQKFNGLTVLPPLLTDEMIAQYTSALLAGTITSGWTFGAGAALQIPFAMQMAYRFNGIGVTQCVLYENQKLIANQFNSAIGKIQDSLSSTASALGKLQDVVNQNAQALNTLVKQLSSNFGAISSVLNDILSRLDKVEAEVQIDRLITGRLQSLQTYVTQQLIRAAEIRASANLAATKMSECVLGQSKRVDFCGKGYHLMSFPQSAPHGVVFLHVTYVPAQEKNFTTAPAICHDGKAHFPREGVFVSNGTHWFVTQRNFYEPQIITTDNTFVCGNCDVVIGIVNNTVYDPLQPELDSGGGGSDIDPYKEFGSSYQLLNFLPLDFFPDLNALVDTATALYEEELTGREHCSPHHTAIRQALVCWDELTKLIAWMSSNITSEQVRTIIVNHVNDTWGLKVRQSLWFHLSCLTFGQHTVQEFLVSFGVWIRTPAPYRPPNAPILSTLPEHTVIC

SEQ ID NO: 14082 - protein, 1301 aa, Artificial Sequence
  SARS-CoV-2/Belgium/VAG-03013/2020__EPI_ISL_415155 spike protein (1-1147)(N914C_S1123C) WhcAg construct
MFVFLVLLPLVSSQCVNLTTRTQLPPAYTNSFTRGVYYPDKVFRSSVLHSTQDLFLPFFSNVTWFHAIHVSGTNGTKRFDNPVLPFNDGVYFASTEKSNIIRGWIFGTTLDSKTQSLLIVNNATNVVIKVCEFQFCNDPFLGVYYHKNNKSWMESEFRVYSSANNCTFEYVSQPFLMDLEGKQGNFKNLREFVFKNIDGYFKIYSKHTPINLVRDLPQGFSALEPLVDLPIGINITRFQTLLALHRSYLTPGDSSSGWTAGAAAYYVGYLQPRTFLLKYNENGTITDAVDCALDPLSETKCTLKSFTVEKGIYQTSNFRVQPTESIVRFPNITNLCPFGEVFNATRFASVYAWNRKRISNCVADYSVLYNSASFSTFKCYGVSPTKLNDLCFTNVYADSFVIRGDEVRQIAPGQTGKIADYNYKLPDDFTGCVIAWNSNNLDSKVGGNYNYLYRLFRKSNLKPFERDISTEIYQAGSTPCNGVEGFNCYFPLQSYGFQPTNGVGYQPYRVVVLSFELLHAPATVCGPKKSTNLVKNKCVNFNFNGLTGTGVLTESNKKFLPFQQFGRDIADTTDAVRDPQTLEILDITPCSFGGVSVITPGTNTSNQVAVLYQGVNCTEVPVAIHADQLTPTWRVYSTGSNVFQTRAGCLIGAEHVNNSYECDIPIGAGICASYQTQTNSPRRARSVASQSIIAYTMSLGAENSVAYSNNSIAIPTNFTISVTTEILPVSMTKTSVDCTMYICGDSTECSNLLLQYGSFCTQLNRALTGIAVEQDKNTQEVFAQVKQIYKTPPIKDFGGFNFSQILPDPSKPSKRSFIEDLLFNKVTLADAGFIKQYGDCLGDIAARDLICAQKFNGLTVLPPLLTDEMIAQYTSALLAGTITSGWTFGAGAALQIPFAMQMAYRFNGIGVTQCVLYENQKLIANQFNSAIGKIQDSLSSTATALGKLQDVVNQNAQALNTLVKQLSSNFGAISSVLNDILSRLDKVEAEVQIDRLITGRLQSLQTYVTQQLIRAAEIRASANLAATKMSECVLGQSKRVDFCGKGYHLMSFPQSAPHGVVFLHVTYVPAQEKNFTTAPAICHDGKAHFPREGVFVSNGTHWFVTQRNFYEPQIITTDNTFVCGNCDVVIGIVNNTVYDPLQPELDSGGGGSDIDPYKEFGSSYQLLNFLPLDFFPDLNALVDTATALYEEELTGREHCSPHHTAIRQALVCWDELTKLIAWMSSNITSEQVRTIIVNHVNDTWGLKVRQSLWFHLSCLTFGQHTVQEFLVSFGVWIRTPAPYRPPNAPILSTLPEHTVIC

SEQ ID NO: 14083 - protein, 1301 aa, Artificial Sequence
  SARS-CoV-2/Belgium/BC-03016/2020__EPI_ISL_415157 spike protein (1-1147)(N914C_S1123C) WhcAg construct
MFVFLVLLPLVSSQCVNLTTRTQLPPAYTNSFTRGVYYPDKVFRSSVLHSTQDLFLPFFSNVTWFHAIHVSGTNGTKRFDNPVLPFNDGVYFASTEKSNIIRGWIFGTTLDSKTQSLLIVNNATNVVIKVCEFQFCNDPFLGVYYHKNNKSWMESEFRVYSSANNCTFEYVSQPFLMDLEGKQGNFKNLREFVFKNIDGYFKIYSKHTPINLVRDLPQGFSALEPLVDLPIGINITRFQTLLALHRSYLTPGDSSSGWTAGAAAYYVGYLQPRTFLLKYNENGTITDAVDCALDPLSETKCTLKSFTVEKGIYQTSNFRVQPTESIVRFPNITNLCPFGEVFNATRFASVYAWNRKRISNCVADYSVLYNSASFSTFKCYGVSPTKLNDLCFTNVYADSFVIRGDEVRQIAPGQTGKIADYNYKLPDDFTGCVIAWNSNNLDSKVGGNYNYLYRLFRKSNLKPFERDISTEIYQAGSTPCNGVEGFNCYFPLQSYGFQPTNGVGYQPYRVVVLSFELLHAPATVCGPKKSTNLVKNKCVNFNFNGLTGTGVLTESNKKFLPFQQFGRDIADTTDAVRDPQTLEILDITPCSFGGVSVITPGTNTSNQVAVLYQGVNCTEVPVAIHADQLTPTWRVYSTGSNVFQTRAGCLIGAEHVNNSYECDIPIGAGICASYQTQTNSPRRARSVASQSIIAYTMSLGAENSVAYSNNSIAIPTNFTISVTTEILPVSMTKTSVDCTMYICGDSTECSNLLLQYGSFCTQLNRALTGIAVEQDKNTQEVFAQVKQIYKTPPIKDFGGFNFSQILPDPSKPSKRSFIEDLLFNKVTLADAGFIKQYGDCLGDIAARDLICAQKFNGLTVLPPLLTDEMIAQYTSALLAGTITSGWTFGAGAALQIPFAMQMAYRFNGIGVTQCVLYENQKLIANQFNSAIGKIQDSLSSTAPALGKLQDVVNQNAQALNTLVKQLSSNFGAISSVLNDILSRLDKVEAEVQIDRLITGRLQSLQTYVTQQLIRAAEIRASANLAATKMSECVLGQSKRVDFCGKGYHLMSFPQSAPHGVVFLHVTYVPAQEKNFTTAPAICHDGKAHFPREGVFVSNGTHWFVTQRNFYEPQIITTDNTFVCGNCDVVIGIVNNTVYDPLQPELDSGGGGSDIDPYKEFGSSYQLLNFLPLDFFPDLNALVDTATALYEEELTGREHCSPHHTAIRQALVCWDELTKLIAWMSSNITSEQVRTIIVNHVNDTWGLKVRQSLWFHLSCLTFGQHTVQEFLVSFGVWIRTPAPYRPPNAPILSTLPEHTVIC

SEQ ID NO: 14084 - protein, 1301 aa, Artificial Sequence
  SARS-CoV-2/Germany/BavPat3/2020__EPI_ISL_414521 spike protein (1-1147)(N914C_S1123C) WhcAg construct
MFVFLVLLPLVSSQCVNLTTRTQLPPAYTNSFTRGVYYPDKVFRSSVLHSTQDLFLPFFSNVTWFHAIHVSGTNGTKRFDNPVLPFNDGVYFASTEKSNIIRGWIFGTTLDSKTQSLLIVNNATNVVIKVCEFQFCNDPFLGVYYHKNNKSWMESEFRVYSSANNCTFEYVSQPFLMDLEGKQGNFKNLREFVFKNIDGYFKIYSKHTPINLVRDLPQGFSALEPLVDLPIGINITRFQTLLALHRSYLTPGDSSSGWTAGAAAYYVGYLQPRTFLLKYNENGTITDAVDCALDPLSETKCTLKSFTVEKGIYQTSNFRVQPTESIVRFPNITNLCPFGEVFNATRFASVYAWNRKRISNCVADYSVLYNSASFSTFKCYGVSPTKLNDLCFTNVYADSFVIRGDEVRQIAPGQTGKIADYNYKLPDDFTGCVIAWNSNNLDSKVGGNYNYLYRLFRKSNLKPFERDISTEIYQAGSTPCNGVEGFNCYFPLQSYGFQPTNGVGYQPYRVVVLSFELLHAPATVCGPKKSTNLVKNKCVNFNFNGLTGTGVLTESNKKFLPFQQFGRDIADTTDAVRDPQTLEILDITPCSFGGVSVITPGTNTSNQVAVLYQDVNCTEVPVAIHADQLTPTWRVYSTGSNVFQTRAGCLIGAEHVNNSYECDIPIGAGICASYQTQTNSPRRARSVASQSIIAYTMSLGAENSVAYSNNSIAIPTNFTISVTTEILPVSMTKTSVDCTMYICGDSTECSNLLLQYGSFCTQLNRALTGIAVEQDKNTQQVFAQVKQIYKTPPIKDFGGFNFSQILPDPSKPSKRSFIEDLLFNKVTLADAGFIKQYGDCLGDIAARDLICAQKFNGLTVLPPLLTDEMIAQYTSALLAGTITSGWTFGAGAALQIPFAMQMAYRFNGIGVTQCVLYENQKLIANQFNSAIGKIQDSLSSTASALGKLQDVVNQNAQALNTLVKQLSSNFGAISSVLNDILSRLDKVEAEVQIDRLITGRLQSLQTYVTQQLIRAAEIRASANLAATKMSECVLGQSKRVDFCGKGYHLMSFPQSAPHGVVFLHVTYVPAQEKNFTTAPAICHDGKAHFPREGVFVSNGTHWFVTQRNFYEPQIITTDNTFVCGNCDVVIGIVNNTVYDPLQPELDSGGGGSDIDPYKEFGSSYQLLNFLPLDFFPDLNALVDTATALYEEELTGREHCSPHHTAIRQALVCWDELTKLIAWMSSNITSEQVRTIIVNHVNDTWGLKVRQSLWFHLSCLTFGQHTVQEFLVSFGVWIRTPAPYRPPNAPILSTLPEHTVIC

SEQ ID NO: 14085 - protein, 1301 aa, Artificial Sequence
  SARS-CoV-2/France/HF1805/2020__EPI_ISL_414628 spike protein (1-1147)(N914C_S1123C) WhcAg construct
MFVFLVLLPLVSSQCVNLTTRTQLPPAYTNSFTRGVYYPDKVFRSSVLHSTQDLFLPFFSNVTWFHAIHVSGTNGTKRFDNPVLPFNDGVYFASTEKSNIIRGWIFGTTLDSKTQSLLIVNNATNVVIKVCEFQFCNDPFLGVYYHKNNKSWMESEFRVYSSANNCTFEYVSQPFLMDLEGKQGNFKNLREFVFKNIDGYFKIYSKHTPINLVRDLPQGFSALEPLVDLPIGINITRFQTLLALHRSYLTPGDSSSGWTAGAAAYYVGYLQPRTFLLKYNENGTITDAVDCALDPLSETKCTLKSFTVEKGIYQTSNFRVQPTESIVRFPNITNLCPFGEVFNATRFASVYAWNRKRISNCVADYSVLYNSASFSTFKCYGVSPTKLNDLCFTNVYADSFVIRGDEVRQIAPGQTGKIADYNYKLPDDFTGCVIAWNSNNLDSKVGGNYNYLYRLFRKSNLKPFERDISTEIYQAGSTPCNGVEGFNCYFPLQSYGFQPTNGVGYQPYRVVVLSFELLHAPATVCGPKKSTNLVKNKCVNFNFNGLTGTGVLTESNKKFLPFQQFGRDIADTTDAVRDPQTLEILDITPCSFGGVSVITPGTNTSNQVAVLYQGVNCTEVPVAIHADQLTPTWRVYSTGSNVFQTRAGCLIGAEHVNNSYECDIPIGAGICASYQTQTNSPRRARSVASQSIIAYTMSLGAENSVAYSNNSIAIPTNFTISVTTEILPVSMTKTSVDCTMYICGDSTECSNLLLQYGSFCTQLNRALTGIAVEQDKNTQEVFAQVKQIYKTPPIKDFGGFNFSQILPDPSKPSKRSFIEDLLFNKVTLADAGFIKQYGDCLGDIAARDLICAQKFNGLTVLPPLLTDEMIAQYTSALLAGTITSGWTFGAGAALQIPFAMQMAYRFNGIGVTQCVLYENQKLIANQFNSAIGKIQDSLSSTASALGKLQDVVNQNAQALNTLVKQLSSNFGAISSVLNDILSRLDKVEAEVQIDRLITGRLQSLQTYVTQQLIRAAEIRASANLAATKMSECVLGQSKRVDFCGKGYHLMSFPQSAPHGVVFLHVTYVPAQEKNFTTAPAICHDGKAHFPREGVFVSNGTHWFVTQRNFYEPQIITTDNTFVCGNCDVVIGVVNNTVYDPLQPELDSGGGGSDIDPYKEFGSSYQLLNFLPLDFFPDLNALVDTATALYEEELTGREHCSPHHTAIRQALVCWDELTKLIAWMSSNITSEQVRTIIVNHVNDTWGLKVRQSLWFHLSCLTFGQHTVQEFLVSFGVWIRTPAPYRPPNAPILSTLPEHTVIC

SEQ ID NO: 14086 - protein, 1301 aa, Artificial Sequence
  SARS-CoV-2/Netherlands/ZuidHolland_9/2020__EPI_ISL_414445 spike protein (1-1147)(N914C_S1123C) WhcAg construct
MFVFLVLLPLVSSQCVNLTTRTQLPPAYTNSFTRGVYYPDKVFRSSVLHSTQDLFLPFFSNVTWFHAIHVSGTNGTKRFDNPVLPFNDGVYFASTEKSNIIRGWIFGTTLDSKTQSLLIVNNATNVVIKVCEFQFCNDPFLGVYYHKNNKSWMESEFRVYSSANNCTFEYVSQPFLMDLEGKQGNFKNLREFVFKNIDGYFKIYSKHTPINLVRDLPQGFSALEPLVDLPIGINITRFQTLLALHRSYLTPGDSSSGWTAGAAAYYVGYLQPRTFLLKYNENGTITDAVDCALDPLSETKCTLKSFTVEKGIYQTSNFRVQPTESIVRFPNITNLCPFGEVFNATRFASVYAWNRKRISNCVADYSVLYNSASFSTFKCYGVSPTKLNDLCFTNVYADSFVIRGDEVRQIAPGQTGKIADYNYKLPDDFTGCVIAWNSNNLDSKVGGNYNYLYRLFRKSNLKPFERDISTEIYQAGSTPCNGVEGFNCYFPLQSYGFQPTNGVGYQPYRVVVLSFELLHAPATVCGPKKSTNLVKNKCVNFNFNGLTGTGVLTESNKKFLPFQQFGRDIADTTDAVRDPQTLEILDITPCSFGGVSVITPGTNTSNQVAVLYQGVNCTEVPVAIHADQLTPTWRVYSTGSNVFQTRAGCLIGAEHVNNSYECDIPIGAGICASYQTQTNSPRRARSVASQSIIAYTMSLGAENSVAYSNNSIAIPTNFTISVTTEILPVSMTKTSVDCTMYICGDSTECSNLLLQYGSFCTQLNRALTGIAVEQDKNTQEVFAQVKQIYKTPPIKDFGGFNFSQILPDPSKPSKRSFIEDLLFNKVTLADAGFIKQYGDCLGDIAARDLICVQKFNGLTVLPPLLTDEMIAQYTSALLAGTITSGWTFGAGAALQIPFAMQMAYRFNGIGVTQCVLYENQKLIANQFNSAIGKIQDSLSSTASALGKLQDVVNQNAQALNTLVKQLSSNFGAISSVLNDILSRLDKVEAEVQIDRLITGRLQSLQTYVTQQLIRAAEIRASANLAATKMSECVLGQSKRVDFCGKGYHLMSFPQSAPHGVVFLHVTYVPAQEKNFTTAPAICHDGKAHFPREGVFVSNGTHWFVTQRNFYEPQIITTDNTFVCGNCDVVIGIVNNTVYDPLQPELDSGGGGSDIDPYKEFGSSYQLLNFLPLDFFPDLNALVDTATALYEEELTGREHCSPHHTAIRQALVCWDELTKLIAWMSSNITSEQVRTIIVNHVNDTWGLKVRQSLWFHLSCLTFGQHTVQEFLVSFGVWIRTPAPYRPPNAPILSTLPEHTVIC

SEQ ID NO: 14087 - protein, 1301 aa, Artificial Sequence
  SARS-CoV-2/Finland/FIN03032020A/2020__EPI_ISL_413602 spike protein (1-1147)(N914C_S1123C) WhcAg construct
MFVFLVLLPLVSSQCVNLTTRTQLPPAYTNSFTRGVYYPDKVFRSSVLHSTQDLFLPFFSNVTWFHAIHVSGTNGTKRFDNPVLPFNDGVYFASTEKSNIIRGWIFGTTLDSKTQSLLIVNNATNVVIKVCEFQFCNDPFLGVYYHKNNKSWMESEFRVYSSANNCTFEYVSQPFLMDLEGKQGNFKNLREFVFKNIDGYFKIYSKHTPINLVRDLPQGFSALEPLVDLPIGINITRFQTLLALHRSYLTPGDSSSGWTAGAAAYYVGYLQPRTFLLKYNENGTITDAVDCALDPLSETKCTLKSFTVEKGIYQTSNFRVQPTESIVRFPNITNLCPFGEVFNATRFASVYAWNRKRISNCVADYSVLYNSASFSTFKCYGVSPTKLNDLCFTNVYADSFVIRGDEVRQIAPGQTGKIADYNYKLPDDFTGCVISWNSNNLDSKVGGNYNYLYRLFRKSNLKPFERDISTEIYQAGSTPCNGVEGFNCYFPLQSYGFQPTNGVGYQPYRVVVLSFELLHAPATVCGPKKSTNLVKNKCVNFNFNGLTGTGVLTESNKKFLPFQQFGRDIADTTDAVRDPQTLEILDITPCSFGGVSVITPGTNTSNQVAVLYQGVNCTEVPVAIHADQLTPTWRVYSTGSNVFQTRAGCLIGAEHVNNSYECDIPIGAGICASYQTQTNSPRRARSVASQSIIAYTMSLGAENSVAYSNNSIAIPTNFTISVTTEILPVSMTKTSVDCTMYICGDSTECSNLLLQYGSFCTQLNRALTGIAVEQDKNTQEVFAQVKQIYKTPPIKDFGGFNFSQILPDPSKPSKRSFIEDLLFNKVTLADAGFIKQYGDCLGDIAARDLICAQKFNGLTVLPPLLTDEMIAQYTSALLAGTITSGWTFGAGAALQIPFAMQMAYRFNGIGVTQCVLYENQKLIANQFNSAIGKIQDSLSSTASALGKLQDVVNQNAQALNTLVKQLSSNFGAISSVLNDILSRLDKVEAEVQIDRLITGRLQSLQTYVTQQLIRAAEIRASANLAATKMSECVLGQSKRVDFCGKGYHLMSFPQSAPHGVVFLHVTYVPAQEKNFTTAPAICHDGKAHFPREGVFVSNGTHWFVTQRNFYEPQIITTDNTFVCGNCDVVIGIVNNTVYDPLQPELDSGGGGSDIDPYKEFGSSYQLLNFLPLDFFPDLNALVDTATALYEEELTGREHCSPHHTAIRQALVCWDELTKLIAWMSSNITSEQVRTIIVNHVNDTWGLKVRQSLWFHLSCLTFGQHTVQEFLVSFGVWIRTPAPYRPPNAPILSTLPEHTVIC

SEQ ID NO: 14088 - protein, 1301 aa, Artificial Sequence
  SARS-CoV-2/France/GE1977/2020__EPI_ISL_414632 spike protein (1-1147)(N914C_S1123C) WhcAg construct
MFVFLVLLPLVSSQCVNLTTRTQLPPAYTNSFTRGVYYPDKVFRSSVLHSTQDLFLPFFSNVTWFHAIHVSGTNGTKRFDNPVLPFNDGVYFASTEKSNIIRGWIFGTTLDSKTQSLLIVNNATNVVIKVCEFQFCNDPFLGVYYHKNNKSWMESEFRVYSSANNCTFEYVSQPFLMDLEGKQGNFKNLREFVFKNIDGYFKIYSKHTPINLVRDLPQGFSALEPLVDLPIGINITRFQTLLALHRSYLTPGDSSSGWTAGAAAYYVGYLQPRTFLLKYNENGTITDAVDCALDPLSETKCTLKSFTVEKGIYQTSNFRVQPTESIVRFPNITNLCPFGEVFNATRFASVYAWNRKRISNCVADYSVLYNSASFSTFKCYGVSPTKLNDLCFTNVYADSFVIRGDEVRQIAPGQTGKIADYNYKLPDDFTGCVIAWNSNNLDSKVGGNYNYLYRLFRKSNLKPFERDISTEIYQAGSTPCNGVEGFNCYFPLQSYGFQPTNGVGYQPYRVVVLSFELLHAPATVCGPKKSTNLVKNKCVNFNFNGLTGTGVLTESNKKFLPFQQFGRDIADTTDAVRDPQTLEILDITPCSFGGVSVITPGTNTSNQVAVLYQGVNCTEVPVAIHADQLTPTWRVYSTGSNVFQTRAGCLIGAEHVNNSYECDIPIGAGICASYQTQTNSPRRARSVASQSIIAYTMSLGAENSVAYSNNSIAIPTNFTISVTTEILPVSMTKTSVDCTMYICGDSTECSNLLLQYGSFCTQLNRALTGIAVEQDKNTQEVFAQVKQIYKTPPIKDFGGFNFSQILPDPSKPSKRSFIEDLLFNKVTLADAGFIKQYGDCLGDIAARDLICAQKFNGLTVLPPLLTDEMIAQYTSALLAGTITSGWTFGAGAALQIPFAMQMAYRFNGIGVTQCVLYENQKLIANQFNSAIGKIQDSLFSTASALGKLQDVVNQNAQALNTLVKQLSSNFGAISSVLNDILSRLDKVEAEVQIDRLITGRLQSLQTYVTQQLIRAAEIRASANLAATKMSECVLGQSKRVDFCGKGYHLMSFPQSAPHGVVFLHVTYVPAQEKNFTTAPAICHDGKAHFPREGVFVSNGTHWFVTQRNFYEPQIITTDNTFVCGNCDVVIGIVNNTVYDPLQPELDSGGGGSDIDPYKEFGSSYQLLNFLPLDFFPDLNALVDTATALYEEELTGREHCSPHHTAIRQALVCWDELTKLIAWMSSNITSEQVRTIIVNHVNDTWGLKVRQSLWFHLSCLTFGQHTVQEFLVSFGVWIRTPAPYRPPNAPILSTLPEHTVIC

SEQ ID NO: 14089 - protein, 1301 aa, Artificial Sequence
  SARS-CoV-2/Finland/FIN-313/2020__EPI_ISL_414641 spike protein (1-1147)(N914C_S1123C) WhcAg construct
MFVFLVLLPLVSSQCVNLTTRTQLPPAYTNSFTRGVYYPDKVFRSSVLHSTQDLFLPFFSNVTWFHAIHVSGTNGTKRFDNPVLPFNDGVYFASTEKSNIIRGWIFGTTLDSKTQSLLIVNNATNVVIKVCEFQFCNDPFLGVYYHKNNKSWMESEFRVYSSANNCTFEYVSQPFLMDLEGKQGNFKNLREFVFKNIDGYFKIYSKHTPINLVRDLPQGFSALEPLVDLPIGINITRFKTLLALHRSYLTPGDSSSGWTAGAAAYYVGYLQPRTFLLKYNENGTITDAVDCALDPLSETKCTLKSFTVEKGIYQTSNFRVQPTESIVRFPNITNLCPFGEVFNATRFASVYAWNRKRISNCVADYSVLYNSASFSTFKCYGVSPTKLNDLCFTNVYADSFVIRGDEVRQIAPGQTGKIADYNYKLPDDFTGCVIAWNSNNLDSKVGGNYNYLYRLFRKSNLKPFERDISTEIYQAGSTPCNGVEGFNCYFPLQSYGFQPTNGVGYQPYRVVVLSFELLHAPATVCGPKKSTNLVKNKCVNFNFNGLTGTGVLTESNKKFLPFQQFGRDIADTTDAVRDPQTLEILDITPCSFGGVSVITPGTNTSNQVAVLYQGVNCTEVPVAIHADQLTPTWRVYSTGSNVFQTRAGCLIGAEHVNNSYECDIPIGAGICASYQTQTNSPRRARSVASQSIIAYTMSLGAENSVAYSNNSIAIPTNFTISVTTEILPVSMTKTSVDCTMYICGDSTECSNLLLQYGSFCTQLNRALTGIAVEQDKNTQEVFAQVKQIYKTPPIKDFGGFNFSQILPDPSKPSKRSFIEDLLFNKVTLADAGFIKQYGDCLGDIAARDLICAQKFNGLTVLPPLLTDEMIAQYTSALLAGTITSGWTFGAGAALQIPFAMQMAYRFNGIGVTQCVLYENQKLIANQFNSAIGKIQDSLSSTASALGKLQDVVNQNAQALNTLVKQLSSNFGAISSVLNDILSRLDKVEAEVQIDRLITGRLQSLQTYVTQQLIRAAEIRASANLAATKMSECVLGQSKRVDFCGKGYHLMSFPQSAPHGVVFLHVTYVPAQEKNFTTAPAICHDGKAHFPREGVFVSNGTHWFVTQRNFYEPQIITTDNTFVCGNCDVVIGIVNNTVYDPLQPELDSGGGGSDIDPYKEFGSSYQLLNFLPLDFFPDLNALVDTATALYEEELTGREHCSPHHTAIRQALVCWDELTKLIAWMSSNITSEQVRTIIVNHVNDTWGLKVRQSLWFHLSCLTFGQHTVQEFLVSFGVWIRTPAPYRPPNAPILSTLPEHTVIC

SEQ ID NO: 14090 - protein, 1301 aa, Artificial Sequence
  SARS-CoV-2/Netherlands/ZuidHolland_2/2020__EPI_ISL_414556 spike protein (1-1147)(N914C_S1123C) WhcAg construct
MFVFLVLLPLVSSQCVNLTTRTQLPPAYTNSFTRGVYYPDKVFRSSVLHSTQDLFLPFFSNVTWFHAIHVSGTNGTKRFDNPVLPFNDGVYFASTEKSNIIRGWIFGTTLDSKTQSLLIVNNATNVVIKVCEFQFCNDPFLGVYYHKNNKSWMESEFRVYSSANNCTFEYVSQPFLMDLEGKQGNFKNLREFVFKNIDGYFKIYSKHTPINLVRDLPQGFSALEPLVDLPIGINITRFQTLLALHRSYLTPGDSSSGWTAGAAAYYVGYLQPRTFLLKYNENGTITDAVDCALDPLSETKCTLKSFTVEKGIYQTSNFRVQPTESIVRFPNITNLCPFGEVFNATRFASVYAWNRKRISNCVADYSVLYNSASFSTFKCYGVSPTKLNDLCFTNVYADSFVIRGDEVRQIAPGQTGKIADYNYKLPDDFTGCVIAWNSNNLDSKVGGNYNYLYRLFRKSNLKPFERDISTEIYQAGSTPCNGVEGFNCYFPLQSYGFQPTNGVGYQPYRVVVLSFELLHAPATVCGPKKSTNLVKNKCVNFNFNGLTGTGVLTESNKKFLPFQQFGRDIADTTDAVRDPQTLEILDITPCSFGGVSVITPGTNTSNQVAVLYQGVNCTEVPVAIHADQLTPTWRVYSTGSNVFQTRAGCLIGAEHVNNSYECDIPIGAGICASYQTQTNSPRRARSVASQSIIAYTMSLGAENSVAYSNNSIAIPTNFTISVTTEILPVSMTKTSVDCTMYICGDSTECSNLLLQYGSFCTQLNRALTGIALEQDKNTQEVFAQVKQIYKTPPIKDFGGFNFSQILPDPSKPSKRSFIEDLLFNKVTLADAGFIKQYGDCLGDIAARDLICAQKFNGLTVLPPLLTDEMIAQYTSALLAGTITSGWTFGAGAALQIPFAMQMAYRFNGIGVTQCVLYENQKLIANQFNSAIGKIQDSLSSTASALGKLQDVVNQNAQALNTLVKQLSSNFGAISSVLNDILSRLDKVEAEVQIDRLITGRLQSLQTYVTQQLIRAAEIRASANLAATKMSECVLGQSKRVDFCGKGYHLMSFPQSAPHGVVFLHVTYVPAQEKNFTTAPAICHDGKAHFPREGVFVSNGTHWFVTQRNFYEPQIITTDNTFVCGNCDVVIGIVNNTVYDPLQPELDSGGGGSDIDPYKEFGSSYQLLNFLPLDFFPDLNALVDTATALYEEELTGREHCSPHHTAIRQALVCWDELTKLIAWMSSNITSEQVRTIIVNHVNDTWGLKVRQSLWFHLSCLTFGQHTVQEFLVSFGVWIRTPAPYRPPNAPILSTLPEHTVIC

SEQ ID NO: 14091 - protein, 1301 aa, Artificial Sequence
  SARS-CoV-2/USA/WA-UW31/2020__EPI_ISL_414618 spike protein (1-1147)(N914C_S1123C) WhcAg construct
MFVFLVLLPLVSSQCVNLTTRTQLPPAYTNSFTRGVYYPDKVFRSSVLHSTQDLFLPFFSNVTWFHAIHVSGTNGTKRFDNPVLPFNDGVYFASTEKSNIIRGWIFGTTLDSKTQSLLIVNNATNVVIKVCEFQFCNDPFLGVYYHKNNKSWMESEFRVYSSANNCTFEYVSQPFLMDLEGKQGNFKNLREFVFKNIDGYFKIYSKHTPINLVRDLPQGFSALEPLVDLPIGINITRFQTLLALHRSYLTPGDSSSGWTAGAAAYYVGYLQPRTFLLKYNENGTITDAVDCALDPLSETKCTLKSFTVEKGIYQTSNFRVQPTESIVRFPNITNLCPFGEVFNATRFASVYAWNRKRISNCVADYSVLYNSASFSTFKCYGVSPTKLNDLCFTNVYADSFVIRGDEVRQIAPGQTGKIADYNYKLPDDFTGCVIAWNSNNLDSKVGGNYNYLYRLFRKSNLKPFERDISTEIYQAGSTPCNGAEGFNCYFPLQSYGFQPTNGVGYQPYRVVVLSFELLHAPATVCGPKKSTNLVKNKCVNFNFNGLTGTGVLTESNKKFLPFQQFGRDIADTTDAVRDPQTLEILDITPCSFGGVSVITPGTNTSNQVAVLYQDVNCTEVPVAIHADQLTPTWRVYSTGSNVFQTRAGCLIGAEHVNNSYECDIPIGAGICASYQTQTNSPRRARSVASQSIIAYTMSLGAENSVAYSNNSIAIPTNFTISVTTEILPVSMTKTSVDCTMYICGDSTECSNLLLQYGSFCTQLNRALTGIAVEQDKNTQEVFAQVKQIYKTPPIKDFGGFNFSQILPDPSKPSKRSFIEDLLFNKVTLADAGFIKQYGDCLGDIAARDLICAQKFNGLTVLPPLLTDEMIAQYTSALLAGTITSGWTFGAGAALQIPFAMQMAYRFNGIGVTQCVLYENQKLIANQFNSAIGKIQDSLSSTASALGKLQDVVNQNAQALNTLVKQLSSNFGAISSVLNDILSRLDKVEAEVQIDRLITGRLQSLQTYVTQQLIRAAEIRASANLAATKMSECVLGQSKRVDFCGKGYHLMSFPQSAPHGVVFLHVTYVPAQEKNFTTAPAICHDGKAHFPREGVFVSNGTHWFVTQRNFYEPQIITTDNTFVCGNCDVVIGIVNNTVYDPLQPELDSGGGGSDIDPYKEFGSSYQLLNFLPLDFFPDLNALVDTATALYEEELTGREHCSPHHTAIRQALVCWDELTKLIAWMSSNITSEQVRTIIVNHVNDTWGLKVRQSLWFHLSCLTFGQHTVQEFLVSFGVWIRTPAPYRPPNAPILSTLPEHTVIC

SEQ ID NO: 14092 - protein, 1301 aa, Artificial Sequence
  SARS-CoV-2/South Korea/SNU01/2020__EPI_ISL_411929 spike protein (1-1147)(N914C_S1123C) WhcAg construct
MFVFLVLLPLVSSQCVNLTTRTQLPPAYTNSFTRGVYYPDKVFRSSVLHSTQDLFLPFFSNVTWFHAIHVSGTNGTKRFDNPVLPFNDGVYFASTEKSNIIRGWIFGTTLDSKTQSLLIVNNATNVVIKVCEFQFCNDPFLGVYYHKNNKSWMESEFRVYSSANNCTFEYVSQPFLMDLEGKQGNFKNLREFVFKNIDGYFKIYSKHTPINLVRDLPQGFWALEPLVDLPIGINITRFQTLLALHRSYLTPGDSSSGWTAGAAAYYVGYLQPRTFLLKYNENGTITDAVDCALDPLSETKCTLKSFTVEKGIYQTSNFRVQPTESIVRFPNITNLCPFGEVFNATRFASVYAWNRKRISNCVADYSVLYNSASFSTFKCYGVSPTKLNDLCFTNVYADSFVIRGDEVRQIAPGQTGKIADYNYKLPDDFTGCVIAWNSNNLDSKVGGNYNYLYRLFRKSNLKPFERDISTEIYQAGSTPCNGVEGFNCYFPLQSYGFQPTNGVGYQPYRVVVLSFELLHAPATVCGPKKSTNLVKNKCVNFNFNGLTGTGVLTESNKKFLPFQQFGRDIADTTDAVRDPQTLEILDITPCSFGGVSVITPGTNTSNQVAVLYQDVNCTEVPVAIHADQLTPTWRVYSTGSNVFQTRAGCLIGAEHVNNSYECDIPIGAGICASYQTQTNSPRRARSVASQSIIAYTMSLGAENSVAYSNNSIAIPTNFTISVTTEILPVSMTKTSVDCTMYICGDSTECSNLLLQYGSFCTQLNRALTGIAVEQDKNTQEVFAQVKQIYKTPPIKDFGGFNFSQILPDPSKPSKRSFIEDLLFNKVTLADAGFIKQYGDCLGDIAARDLICAQKFNGLTVLPPLLTDEMIAQYTSALLAGTITSGWTFGAGAALQIPFAMQMAYRFNGIGVTQCVLYENQKLIANQFNSAIGKIQDSLSSTASALGKLQDVVNQNAQALNTLVKQLSSNFGAISSVLNDILSRLDKVEAEVQIDRLITGRLQSLQTYVTQQLIRAAEIRASANLAATKMSECVLGQSKRVDFCGKGYHLMSFPQSAPHGVVFLHVTYVPAQEKNFTTAPAICHDGKAHFPREGVFVSNGTHWFVTQRNFYEPQIITTDNTFVCGNCDVVIGIVNNTVYDPLQPELDSGGGGSDIDPYKEFGSSYQLLNFLPLDFFPDLNALVDTATALYEEELTGREHCSPHHTAIRQALVCWDELTKLIAWMSSNITSEQVRTIIVNHVNDTWGLKVRQSLWFHLSCLTFGQHTVQEFLVSFGVWIRTPAPYRPPNAPILSTLPEHTVIC

SEQ ID NO: 14093 - protein, 1301 aa, Artificial Sequence
  SARS-CoV-2/China/WF0004/2020__EPI_ISL_413694 spike protein (1-1147)(N914C_S1123C) WhcAg construct
MFVFLVLLPLVSSQCVNLTTRTQLPPAYTNSFTRGVYYPDKVFRSSVLHSTQDLFLPFFSNVTWFHAIHVSGTNGTKRFDNPVLPFNDGVYFASTEKSNIIRGWIFGTTLDSKTQSLLIVNNATNVVIKVCEFQFCNDPFLGVYYHKNNKSWTESEFRVYSSANNCTFEYVSQPFLMDLEGKQGNFKNLREFVFKNIDGYFKIYSKHTPINLVRDLPQGFSALEPLVDLPIGINITRFQTLLALHRSYLTPGDSSSGWTAGAAAYYVGYLQPRTFLLKYNENGTITDAVDCALDPLSETKCTLKSFTVEKGIYQTSNFRVQPTESIVRFPNITNLCPFGEVFNATRFASVYAWNRKRISNCVADYSVLYNSASFSTFKCYGVSPTKLNDLCFTNVYADSFVIRGDEVRQIAPGQTGKIADYNYKLPDDFTGCVIAWNSNNLDSKVGGNYNYLYRLFRKSNLKPFERDISTEIYQAGSTPCNGVEGFNCYFPLQSYGFQPTNGVGYQPYRVVVLSFELLHAPATVCGPKKSTNLVKNKCVNFNFNGLTGTGVLTESNKKFLPFQQFGRDIADTTDAVRDPQTLEILDITPCSFGGVSVITPGTNTSNQVAVLYQDVNCTEVPVAIHADQLTPTWRVYSTGSNVFQTRAGCLIGAEHVNNSYECDIPIGAGICASYQTQTNSPRRARSVASQSIIAYTMSLGAENSVAYSNNSIAIPTNFTISVTTEILPVSMTKTSVDCTMYICGDSTECSNLLLQYGSFCTQLNRALTGIAVEQDKNTQEVFAQVKQIYKTPPIKDFGGFNFSQILPDPSKPSKRSFIEDLLFNKVTLADAGFIKQYGDCLGDIAARDLICAQKFNGLTVLPPLLTDEMIAQYTSALLAGTITSGWTFGAGAALQIPFAMQMAYRFNGIGVTQCVLYENQKLIANQFNSAIGKIQDSLSSTASALGKLQDVVNQNAQALNTLVKQLSSNFGAISSVLNDILSRLDKVEAEVQIDRLITGRLQSLQTYVTQQLIRAAEIRASANLAATKMSECVLGQSKRFDFCGKGYHLMSFPQSAPHGVVFLHVTYVPAQEKNFTTAPAICHDGKAHFPREGVFVSNGTHWFVTQRNFYEPQIITTDNTFVCGNCDVVIGIVNNTVYDPLQPELDSGGGGSDIDPYKEFGSSYQLLNFLPLDFFPDLNALVDTATALYEEELTGREHCSPHHTAIRQALVCWDELTKLIAWMSSNITSEQVRTIIVNHVNDTWGLKVRQSLWFHLSCLTFGQHTVQEFLVSFGVWIRTPAPYRPPNAPILSTLPEHTVIC

SEQ ID NO: 14094 - protein, 1301 aa, Artificial Sequence
  SARS-CoV-2/China/WF0028/2020__EPI_ISL_413791 spike protein (1-1147)(N914C_S1123C) WhcAg construct
MFVFLVLLPLVSSQCVNLTTRTQLPPAYTNSFTRGVYYPDKVFRSSVLHSTQDLFLPFFSNVTWFHAIHVSGTNGTKRFDNPVLPFNDGVYFASTEKSNIIRGWIFGTTLDSKTQSLLIVNNATNVVIKVCEFQFCNDPFLGVYYHKNNKSWMESEFRVYSSANNCTFEYVSQPFLMDLEGKQGNFKNLREFVFKNIDGYFKIYSKHTPINLVRDLPQGFSALEPLVDLPIGINITRFQTLLALHRSYLTPGDSSSGWTAGAAAYYVGYLQPRTFLLKYNENGTITDAVDCALDPLSETKCTLKSFTVEKGIYQTSNFRVQPTESIVRFPNITNLCPFGEVFNATRFASVYAWNRKRISNCVADYSVLYNSASFSTFKCYGVSPTKLNDLCFTNVYADSFVIRGDEVRQIAPGQTGKIADYNYKLPDDFTGCVIAWNSNNLDSKVGGNYNYLYRLFRKSNLKPFERDISTEIYQAGSTPCNGVEGFNCYFPLQSYGFQPTNGVGYQPYRVVVLSFELLHAPATVCGPKKSTNLVKNKCVNFNFNGLTGTGVLTESNKKFLPFQQFGRDIADTTDAVRDPQTLEILDITPCSFGGVSVITPGTNTSNQVAVLYQDVNCTEVPVAIHADQLTPTWRVYSTGSNVFQTRAGCLIGAEHVNNSYECDIPIGAGICASYQTQTNSPRRARSVASQSIIAYTMSLGAENSVAYSNNSIAIPTNFTISVTTEILPVSMTKTSVDCTMYICGDSTECSNLLLQYGSFCTQLNRALTGIAVEQDKNTQEVFAQVKQIYKTPPIKDFGGFNFSQILPDPSKPSKRSFIEDLLFNKVTLADAGFIKQYGDCLGDIAARDLICAQKFNGLTVLPPLLTDEMIAQYTSALLAGTITSGWTFGAGAALQIPFAMQMAYRFNGIGVTQCVLYENQKLIANQFNSAIGKIQDSLSSTASALGKLQDVVNQNAQALNTLVKQLSSNFGAISSVLNDILSRLDKVEAEVQIDRLITGRLQSLQTYVTQQLIRAAEIRASANLAATKMSECVLGQSKRVDFCGKGYHLMSFPQSAPHGVVFLHVTYVPAQEKNFTTAPAICHDGKAHFPREGVFVSNGTHWFVTQRNFYEPQIITTDNTFVCGNCDVVIGIVNNTVYDPLQPELESGGGGSDIDPYKEFGSSYQLLNFLPLDFFPDLNALVDTATALYEEELTGREHCSPHHTAIRQALVCWDELTKLIAWMSSNITSEQVRTIIVNHVNDTWGLKVRQSLWFHLSCLTFGQHTVQEFLVSFGVWIRTPAPYRPPNAPILSTLPEHTVIC

SEQ ID NO: 14095 - protein, 1301 aa, Artificial Sequence
  SARS-CoV-2/2019-nCoV/USA-CruiseA-18/2020__MT159716.1 spike protein (1-1147)(N914C_S1123C) WhcAg construct
MFVFLVLLPLVSSQCVNLTTRTQLPPAYTNSFTRGVYYPDKVFRSSVLHSTQDLFLPFFSNVTWFHAIHVSGTNGTKRFDNPVLPFNDGVYFASTEKSNIIRGWIFGTTLDSKTQSLLIVNNATNVVIKVCEFQFCNDPFLGVYYHKNNKSWMESELRVYSSANNCTFEYVSQPFLMDLEGKQGNFKNLREFVFKNIDGYFKIYSKHTPINLVRDLPQGFSALEPLVDLPIGINITRFQTLLALHRSYLTPGDSSSGWTAGAAAYYVGYLQPRTFLLKYNENGTITDAVDCALDPLSETKCTLKSFTVEKGIYQTSNFRVQPTESIVRFPNITNLCPFGEVFNATRFASVYAWNRKRISNCVADYSVLYNSASFSTFKCYGVSPTKLNDLCFTNVYADSFVIRGDEVRQIAPGQTGKIADYNYKLPDDFTGCVIAWNSNNLDSKVGGNYNYLYRLFRKSNLKPFERDISTEIYQAGSTPCNGVEGFNCYFPLQSYGFQPTNGVGYQPYRVVVLSFELLHAPATVCGPKKSTNLVKNKCVNFNFNGLTGTGVLTESNKKFLPFQQFGRDIADTTDAVRDPQTLEILDITPCSFGGVSVITPGTNTSNQVAVLYQDVNCTEVPVAIHADQLTPTWRVYSTGSNVFQTRAGCLIGAEHVNNSYECDIPIGAGICASYQTQTNSPRRARSVASQSIIAYTMSLGAENSVAYSNNSIAIPTNFTISVTTEILPVSMTKTSVDCTMYICGDSTECSNLLLQYGSFCTQLNRALTGIAVEQDKNTQEVFAQVKQIYKTPPIKDFGGFNFSQILPDPSKPSKRSFIEDLLFNKVTLADAGFIKQYGDCLGDIAARDLICAQKFNGLTVLPPLLTDEMIAQYTSALLAGTITSGWTFGAGAALQIPFAMQMAYRFNGIGVTQCVLYENQKLIANQFNSAIGKIQDSLSSTASALGKLQDVVNQNAQALNTLVKQLSSNFGAISSVLNDILSRLDKVEAEVQIDRLITGRLQSLQTYVTQQLIRAAEIRASANLAATKMSECVLGQSKRVDFCGKGYHLMSFPQSAPHGVVFLHVTYVPAQEKNFTTAPAICHDGKAHFPREGVFVSNGTHWFVTQRNFYEPQIITTDNTFVCGNCDVVIGIVNNTVYDPLQPELDSGGGGSDIDPYKEFGSSYQLLNFLPLDFFPDLNALVDTATALYEEELTGREHCSPHHTAIRQALVCWDELTKLIAWMSSNITSEQVRTIIVNHVNDTWGLKVRQSLWFHLSCLTFGQHTVQEFLVSFGVWIRTPAPYRPPNAPILSTLPEHTVIC

SEQ ID NO: 14096 - protein, 1301 aa, Artificial Sequence
  SARS-CoV-2/SARS-CoV-2/Yunnan-01/human/2020/CHN__MT049951.1 spike protein (1-1147)(N914C_S1123C) WhcAg construct
MFVFLVLLPLVSSQCVNLTTRTQLPPANTNSFTRGVYYPDKVFRSSVLHSTQDLFLPFFSNVTWFHAIHVSGTNGTKRFDNPVLPFNDGVYFASTEKSNIIRGWIFGTTLDSKTQSLLIVNNATNVVIKVCEFQFCNDPFLGVYYHKNNKSWMESEFRVYSSANNCTFEYVSQPFLMDLEGKQGNFKNLREFVFKNIDGYFKIYSKHTPINLVRDLPQGFSALEPLVDLPIGINITRFQTLLALHRSYLTPGDSSSGWTAGAAAYYVGYLQPRTFLLKYNENGTITDAVDCALDPLSETKCTLKSFTVEKGIYQTSNFRVQPTESIVRFPNITNLCPFGEVFNATRFASVYAWNRKRISNCVADYSVLYNSASFSTFKCYGVSPTKLNDLCFTNVYADSFVIRGDEVRQIAPGQTGKIADYNYKLPDDFTGCVIAWNSNNLDSKVGGNYNYLYRLFRKSNLKPFERDISTEIYQAGSTPCNGVEGFNCYFPLQSYGFQPTNGVGYQPYRVVVLSFELLHAPATVCGPKKSTNLVKNKCVNFNFNGLTGTGVLTESNKKFLPFQQFGRDIADTTDAVRDPQTLEILDITPCSFGGVSVITPGTNTSNQVAVLYQDVNCTEVPVAIHADQLTPTWRVYSTGSNVFQTRAGCLIGAEHVNNSYECDIPIGAGICASYQTQTNSPRRARSVASQSIIAYTMSLGAENSVAYSNNSIAIPTNFTISVTTEILPVSMTKTSVDCTMYICGDSTECSNLLLQYGSFCTQLNRALTGIAVEQDKNTQEVFAQVKQIYKTPPIKDFGGFNFSQILPDPSKPSKRSFIEDLLFNKVTLADAGFIKQYGDCLGDIAARDLICAQKFNGLTVLPPLLTDEMIAQYTSALLAGTITSGWTFGAGAALQIPFAMQMAYRFNGIGVTQCVLYENQKLIANQFNSAIGKIQDSLSSTASALGKLQDVVNQNAQALNTLVKQLSSNFGAISSVLNDILSRLDKVEAEVQIDRLITGRLQSLQTYVTQQLIRAAEIRASANLAATKMSECVLGQSKRVDFCGKGYHLMSFPQSAPHGVVFLHVTYVPAQEKNFTTAPAICHDGKAHFPREGVFVSNGTHWFVTQRNFYEPQIITTDNTFVCGNCDVVIGIVNNTVYDPLQPELDSGGGGSDIDPYKEFGSSYQLLNFLPLDFFPDLNALVDTATALYEEELTGREHCSPHHTAIRQALVCWDELTKLIAWMSSNITSEQVRTIIVNHVNDTWGLKVRQSLWFHLSCLTFGQHTVQEFLVSFGVWIRTPAPYRPPNAPILSTLPEHTVIC

SEQ ID NO: 14097 - protein, 1301 aa, Artificial Sequence
  SARS-CoV-2/USA/WA-UW292/2020__EPI_ISL_418077 spike protein (1-1147)(N914C_S1123C) WhcAg construct
MFVFLVLLPLVSSQCVNLTTRTQLPPAYTNSFTRGVYYPDKVFRSSVLHSTQDLFLPFFSNVTWFHAIHVSGTNGTKRFDNPVLPFNDGVYFASTEKSNIIRGWIFGTTLDSKTQSLLIVNNATNVVIKVCEFQFCNDPFLGVYYHKNNKSWMESEFRVYSSANNCTFEYVSQPFLMDLEGKQGNFKNLREFVFKNIDGYFKIYSKHTPINLVRDLPQGFSALEPLVDLPIGINITRFQTLLALHRSYLTPGDSSSGWTAGAAAYYVGYLQPRTFLLKYNENGTITDAVDCALDPLSETKCTLKSFTVEKGIYQTSNFRVQPTESIVRFPNITNLCPFGEVFNATRFASVYAWNRKRISNCVADYSVLYNSASFSTFKCYGVSPTKLNDLCFTNVYADSFVIRGDEVRQIAPGQTGKIADYNYKLPDDFTGCVIAWNSNNLDSKVGGNYNYLYRLFRKSNLKPFERDISTEIYQASSTPCNGVEGFNCYFPLQSYGFQPTNGVGYQPYRVVVLSFELLHAPATVCGPKKSTNLVKNKCVNFNFNGLTGTGVLTESNKKFLPFQQFGRDIADTTDAVRDPQTLEILDITPCSFGGVSVITPGTNTSNQVAVLYQDVNCTEVPVAIHADQLTPTWRVYSTGSNVFQTRAGCLIGAEHVNNSYECDIPIGAGICASYQTQTNSPRRARSVASQSIIAYTMSLGAENSVAYSNNSIAIPTNFTISVTTEILPVSMTKTSVDCTMYICGDSTECSNLLLQYGSFCTQLNRALTGIAVEQDKNTQEVFAQVKQIYKTPPIKDFGGFNFSQILPDPSKPSKRSFIEDLLFNKVTLADAGFIKQYGDCLGDIAARDLICAQKFNGLTVLPPLLTDEMIAQYTSALLAGTITSGWTFGAGAALQIPFAMQMAYRFNGIGVTQCVLYENQKLIANQFNSAIGKIQDSLSSTASALGKLQDVVNQNAQALNTLVKQLSSNFGAISSVLNDILSRLDKVEAEVQIDRLITGRLQSLQTYVTQQLIRAAEIRASANLAATKMSECVLGQSKRVDFCGKGYHLMSFPQSAPHGVVFLHVTYVPAQEKNFTTAPAICHDGKAHFPREGVFVSNGTHWFVTQRNFYEPQIITTDNTFVCGNCDVVIGIVNNTVYDPLQPELDSGGGGSDIDPYKEFGSSYQLLNFLPLDFFPDLNALVDTATALYEEELTGREHCSPHHTAIRQALVCWDELTKLIAWMSSNITSEQVRTIIVNHVNDTWGLKVRQSLWFHLSCLTFGQHTVQEFLVSFGVWIRTPAPYRPPNAPILSTLPEHTVIC

SEQ ID NO: 14098 - protein, 1301 aa, Artificial Sequence
  SARS-CoV-2/Iceland/192/2020__EPI_ISL_417819 spike protein (1-1147)(N914C_S1123C) WhcAg construct
MFVFFVLLPLVSSQCVNLTTRTQLPPAYTNSFTRGVYYPDKVFRSSVLHSTQDLFLPFFSNVTWFHAIHVSGTNGTKRFDNPVLPFNDGVYFASTEKSNIIRGWIFGTTLDSKTQSLLIVNNATNVVIKVCEFQFCNDPFLGVYYHKNNKSWMESEFRVYSSANNCTFEYVSQPFLMDLEGKQGNFKNLREFVFKNIDGYFKIYSKHTPINLVRDLPQGFSALEPLVDLPIGINITRFQTLLALHRSYLTPGDSSSGWTAGAAAYYVGYLQPRTFLLKYNENGTITDAVDCALDPLSETKCTLKSFTVEKGIYQTSNFRVQPTESIVRFPNITNLCPFGEVFNATRFASVYAWNRKRISNCVADYSVLYNSASFSTFKCYGVSPTKLNDLCFTNVYADSFVIRGDEVRQIAPGQTGKIADYNYKLPDDFTGCVIAWNSNNLDSKVGGNYNYLYRLFRKSNLKPFERDISTEIYQAGSTPCNGVEGFNCYFPLQSYGFQPTNGVGYQPYRVVVLSFELLHAPATVCGPKKSTNLVKNKCVNFNFNGLTGTGVLTESNKKFLPFQQFGRDIADTTDAVRDPQTLEILDITPCSFGGVSVITPGTNTSNQVAVLYQGVNCTEVPVAIHADQLTPTWRVYSTGSNVFQTRAGCLIGAEHVNNSYECDIPIGAGICASYQTQTNSPRRARSVASQSIIAYTMSLGAENSVAYSNNSIAIPTNFTISVTTEILPVSMTKTSVDCTMYICGDSTECSNLLLQYGSFCTQLNRALTGIAVEQDKNTQEVFAQVKQIYKTPPIKDFGGFNFSQILPDPSKPSKRSFIEDLLFNKVTLADAGFIKQYGDCLGDIAARDLICAQKFNGLTVLPPLLTDEMIAQYTSALLAGTITSGWTFGAGAALQIPFAMQMAYRFNGIGVTQCVLYENQKLIANQFNSAIGKIQDSLSSTASALGKLQDVVNQNAQALNTLVKQLSSNFGAISSVLNDILSRLDKVEAEVQIDRLITGRLQSLQTYVTQQLIRAAEIRASANLAATKMSECVLGQSKRVDFCGKGYHLMSFPQSAPHGVVFLHVTYVPAQEKNFTTAPAICHDGKAHFPREGVFVSNGTHWFVTQRNFYEPQIITTDNTFVCGNCDVVIGIVNNTVYDPLQPELDSGGGGSDIDPYKEFGSSYQLLNFLPLDFFPDLNALVDTATALYEEELTGREHCSPHHTAIRQALVCWDELTKLIAWMSSNITSEQVRTIIVNHVNDTWGLKVRQSLWFHLSCLTFGQHTVQEFLVSFGVWIRTPAPYRPPNAPILSTLPEHTVIC

SEQ ID NO: 14099 - protein, 1301 aa, Artificial Sequence
  SARS-CoV-2/Belgium/ULG-6939/2020__EPI_ISL_417020 spike protein (1-1147)(N914C_S1123C) WhcAg construct
MFVFLVLLPLVSSQCVNLTTRTQLPPAYTNSFTRGVYYPDKVFRSSVLHSTQDLFLPFFSNVTWFHAIHVSGTNGTKRFDNPVLPFNDGVYFASTEKSNIIRGWIFGTTLDSKTQSLLIVNNATNVVIKVCEFQFCNDPFLGVYYHKNNKSWMESEFRVYSSANNCTFEYVSQPFLMDLEGKQGNFKNLREFVFKNIDGYFKIYSKHTPINLVRDLPQGFSALEPLVDLPIGINITRFQTLLALHRSYLTPGDSSSGWTAGAAAYYVGYLQPRTFLLKYNENGTITDAVDCALDPLSETKCTLKSFTVEKGIYQTSNFRVQPTESIVRFPNITNLCPFGEVFNATRFASVYAWNRKRISNCVADYSVLYNSASFSTFKCYGVSPTKLNDLCFTNVYADSFVIRGDEVRQIAPGQTGKIADYNYKLPDDFTGCVIAWNSNNLDSKVGGNYNYLYRLFRKSNLKPFERDISTEIYQAGSTPCNGVEGFNCYFPLQSYGFQPTNGVGYQPYRVVVLSFELLHAPATVCGPKKSTNLVKNKCVNFNFNGLTGTGVLTESNKKFLPFQQFGRDIADTTDAVRDPQTLEILDITPCSFGGVSVITPGTNTSNQVAVLYQGVNCTEVPVAIHADQLTPTWRVYSTGSNVFQTRAGCLIGAEHVNNSYECDIPIGAGICASYQTQTNSPRRARSVASQSIIAYTMSLGAENSVVYSNNSIAIPTNFTISVTTEILPVSMTKTSVDCTMYICGDSTECSNLLLQYGSFCTQLNRALTGIAVEQDKNTQEVFAQVKQIYKTPPIKDFGGFNFSQILPDPSKPSKRSFIEDLLFNKVTLADAGFIKQYGDCLGDIAARDLICAQKFNGLTVLPPLLTDEMIAQYTSALLAGTITSGWTFGAGAALQIPFAMQMAYRFNGIGVTQCVLYENQKLIANQFNSAIGKIQDSLSSTASALGKLQDVVNQNAQALNTLVKQLSSNFGAISSVLNDILSRLDKVEAEVQIDRLITGRLQSLQTYVTQQLIRAAEIRASANLAATKMSECVLGQSKRVDFCGKGYHLMSFPQSAPHGVVFLHVTYVPAQEKNFTTAPAICHDGKAHFPREGVFVSNGTHWFVTQRNFYEPQIITTDNTFVCGNCDVVIGIVNNTVYDPLQPELDSGGGGSDIDPYKEFGSSYQLLNFLPLDFFPDLNALVDTATALYEEELTGREHCSPHHTAIRQALVCWDELTKLIAWMSSNITSEQVRTIIVNHVNDTWGLKVRQSLWFHLSCLTFGQHTVQEFLVSFGVWIRTPAPYRPPNAPILSTLPEHTVIC

SEQ ID NO: 14100 - protein, 1301 aa, Artificial Sequence
  SARS-CoV-2/France/HF2496/2020__EPI_ISL_418231 spike protein (1-1147)(N914C_S1123C) WhcAg construct
MFVFLVLLPLVSSQCVNLTTRTQLPPAYTNSFTRGVYYPDKVFRSSVLHSTQDLFLPFFSNVTWFHAIHVSGTNGTKRFDNPVLPFNDGVYFASTEKSNIIRGWIFGTTLDSKTQSLLIVNNATNVVIKVCEFQFCNDPFLGVYYHKNNKSWMESEFRVYSSANNCTFEYVSQPFLMDLEGKQGNFKNLREFVFKNIDGYFKIYSKHTPINLVRDLPQGFSALEPLVDLPIGINITRFQTLLALHRSYLTPGDSSSGWTAGAAAYYVGYLQPRTFLLKYNENGTITDAVDCALDPLSETKCTLKSFTVEKGIYQTSNFRVQPTESIVRFPNITNLCPFGEVFNATRFASVYAWNRKRISNCVADYSVLYNSASFSTFKCYGVSPTKLNDLCFTNVYADSFVIRGDEVRQIAPGQTGKIADYNYKLPDDFTGCVIAWNSNNLDSKVGGNYNYLYRLFRKSNLKPFERDISTEIYQAGSTPCNGVEGFNCYFPLQSYGFQPTNGVGYQPYRVVVLSFELLHAPATVCGPKKSTNLVKNKCVNFNFNGLTGTGVLTESNKKFLPFQQFGRDIADTTDAVRDPQTLEILDITPCSFGGVSVITPGTNTSNQVAVLYQGVNCTEVPVAIHADQLTPTWRVYSTGSNVFQTRAGCLIGAEHVNNSYECDIPIGAGICASYQTQTNSPRRARSVASQSIIAYTMSLGAENSVAYSNNSIAIPTNFTISVTTEILPVSMTKTSVDCTMYICGDSTECSNLLLQYGSFCTQLNRALTGIAVEQDKNTQEVFAQVKQIYKTPPIKDFGGFNFSQILPDPSKPSKRSFIEDLLFNKVTLADAGFIKQYGDCLGDIVARDLICAQKFNGLTVLPPLLTDEMIAQYTSALLAGTITSGWTFGAGAALQIPFAMQMAYRFNGIGVTQCVLYENQKLIANQFNSAIGKIQDSLSSTASALGKLQDVVNQNAQALNTLVKQLSSNFGAISSVLNDILSRLDKVEAEVQIDRLITGRLQSLQTYVTQQLIRAAEIRASANLAATKMSECVLGQSKRVDFCGKGYHLMSFPQSAPHGVVFLHVTYVPAQEKNFTTAPAICHDGKAHFPREGVFVSNGTHWFVTQRNFYEPQIITTDNTFVCGNCDVVIGIVNNTVYDPLQPELDSGGGGSDIDPYKEFGSSYQLLNFLPLDFFPDLNALVDTATALYEEELTGREHCSPHHTAIRQALVCWDELTKLIAWMSSNITSEQVRTIIVNHVNDTWGLKVRQSLWFHLSCLTFGQHTVQEFLVSFGVWIRTPAPYRPPNAPILSTLPEHTVIC

SEQ ID NO: 14101 - protein, 1301 aa, Artificial Sequence
  SARS-CoV-2/USA/WA-UW291/2020__EPI_ISL_418076 spike protein (1-1147)(N914C_S1123C) WhcAg construct
MFVFLVLLPLVSSQCVNLTTRTQLPPAYTNSFTRGVYYPDKVFRSSVLHSTQDLFLPFFSNVTWFHAIHVSGTNGTKRFDNPVLPFNDGVYFASTEKSNIIRGWIFGTTLDSKTQSLLIVNNATNVVIKVCEFQFCNDPFLGVYYHKNNKSWMESEFRVYSSANNCTFEYVSQPFLMDLEGKQGNFKNLREFVFKNIDGYFKIYSKHTPINLVRDLPQGFSALEPLVDLPIGINITRFQTLLALHRSYLTPGDSSSGWTAGAAAYYVGYLQPRTFLLKYNENGTITDAVDCALDPLSETKCTLKSFTVEKGIYQTSNFRVQPTESIVRFPNITNLCPFGEVFNATRFASVYAWNRKRISNCVADYSVLYNSASFSTFKCYGVSPTKLNDLCFTNVYADSFVIRGDEVRQIAPGQTGKIADYNYKLPDDFTGCVIAWNSNNLDSKVGGNYNYLYRLFRKSNLKPFERDISTEIYQAGSTPCNGVEGFNCYFPLQSYGFQPTNGVGYQPYRVVVLSFELLHAPATVCGPKKSTNLVKNKCVNFNFNGLTGTGVLTESNKKFLPFQQFGRDIADTTDAVRDPQTLEILDITPCSFGGVSVITPGTNTSNQVAVLYQGVNCTEVPVAIHADQLTPTWRVYSTGSNVFQTRAGCLIGAEHVNNSYECDIPIGAGICASYQTQTNSPRRARSVASQSIIAYTMSLGAENSVAYSNNSIAIPTNFTISVTTEILPVSMTKTSVDCTMYICGDSTECSNLLLQYGSFCTQLNRALTGIAVEQDKNTQEVFAQVKQIYKTPPIKDFGGFNFSQILPDPSKPSKRSFIEDLLFNKVTLADAGFIKQYGDCLGDIAARDLICAQKFNGLTVLPPLLTDEMIAQYTSALLAGTITSGWTFGAGAALQIPFAMQMAYRFNGIGVTQCVLYENQKLIANQFNSAIGKIQYSLSSTASALGKLQDVVNQNAQALNTLVKQLSSNFGAISSVLNDILSRLDKVEAEVQIDRLITGRLQSLQTYVTQQLIRAAEIRASANLAATKMSECVLGQSKRVDFCGKGYHLMSFPQSAPHGVVFLHVTYVPAQEKNFTTAPAICHDGKAHFPREGVFVSNGTHWFVTQRNFYEPQIITTDNTFVCGNCDVVIGIVNNTVYDPLQPELDSGGGGSDIDPYKEFGSSYQLLNFLPLDFFPDLNALVDTATALYEEELTGREHCSPHHTAIRQALVCWDELTKLIAWMSSNITSEQVRTIIVNHVNDTWGLKVRQSLWFHLSCLTFGQHTVQEFLVSFGVWIRTPAPYRPPNAPILSTLPEHTVIC

SEQ ID NO: 14102 - protein, 1301 aa, Artificial Sequence; identical to SEQ ID NO: 14065
  SARS-CoV-2/Portugal/PT0034/2020__EPI_ISL_418019 spike protein (1-1147)(N914C_S1123C) WhcAg construct

SEQ ID NO: 14103 - protein, 1301 aa, Artificial Sequence; identical to SEQ ID NO: 14057
  SARS-CoV-2/Iceland/202/2020__EPI_ISL_417750 spike protein (1-1147)(N914C_S1123C) WhcAg construct

SEQ ID NO: 14104 - protein, 1301 aa, Artificial Sequence
  SARS-CoV-2/USA/WA-UW261/2020__EPI_ISL_418046 spike protein (1-1147)(N914C_S1123C) WhcAg construct
MFVFLVLLPLVSSQCVNLTTRTQLPPAYTNSFTRGVYYPDKVFRSSVLHSTQDLFLPFFSNVTWFHAIHVSGTNGTKRFDNPVLPFNDGVYFASTEKSNIIRGWIFGTTLDSKTQSLLIVNNATNVVIKVCEFQFCNDPFLGVYYHKNNKSWMESEFRVYSSANNCTFEYVSQPFLMDLEGKQGNFKNLREFVFKNIDGYFKIYSKHTPINLVRDLPQGFSALEPLVDLPIGINITRFQTLLALHRSYLTPGDSSSGWTAGAAAYYVGYLQPRTFLLKYNENGTITDAVDCALDPLSETKCTLKSFTVEKGIYQTSNFRVQPTESIVRFPNITNLCPFGEVFNATRFTSVYAWNRKRISNCVADYSVLYNSASFSTFKCYGVSPTKLNDLCFTNVYADSFVIRGDEVRQIAPGQTGKIADYNYKLPDDFTGCVIAWNSNNLDSKVGGNYNYLYRLFRKSNLKPFERDISTEIYQAGSTPCNGVEGFNCYFPLQSYGFQPTNGVGYQPYRVVVLSFELLHAPATVCGPKKSTNLVKNKCVNFNFNGLTGTGVLTESNKKFLPFQQFGRDIADTTDAVRDPQTLEILDITPCSFGGVSVITPGTNTSNQVAVLYQDVNCTEVPVAIHADQLTPTWRVYSTGSNVFQTRAGCLIGAEHVNNSYECDIPIGAGICASYQTQTNSPRRARSVASQSIIAYTMSLGAENSVAYSNNSIAIPTNFTISVTTEILPVSMTKTSVDCTMYICGDSTECSNLLLQYGSFCTQLNRALTGIAVEQDKNTQEVFAQVKQIYKTPPIKDFGGFNFSQILPDPSKPSKRSFIEDLLFNKVTLADAGFIKQYGDCLGDIAARDLICAQKFNGLTVLPPLLTDEMIAQYTSALLAGTITSGWTFGAGAALQIPFAMQMAYRFNGIGVTQCVLYENQKLIANQFNSAIGKIQDSLSSTASALGKLQDVVNQNAQALNTLVKQLSSNFGAISSVLNDILSRLDKVEAEVQIDRLITGRLQSLQTYVTQQLIRAAEIRASANLAATKMSECVLGQSKRVDFCGKGYHLMSFPQSAPHGVVFLHVTYVPAQEKNFTTAPAICHDGKAHFPREGVFVSNGTHWFVTQRNFYEPQIITTDNTFVCGNCDVVIGIVNNTVYDPLQPELDSGGGGSDIDPYKEFGSSYQLLNFLPLDFFPDLNALVDTATALYEEELTGREHCSPHHTAIRQALVCWDELTKLIAWMSSNITSEQVRTIIVNHVNDTWGLKVRQSLWFHLSCLTFGQHTVQEFLVSFGVWIRTPAPYRPPNAPILSTLPEHTVIC

SEQ ID NO: 14105 - protein, 1301 aa, Artificial Sequence
  SARS-CoV-2/Portugal/PT0035/2020__EPI_ISL_418020 spike protein (1-1147)(N914C_S1123C) WhcAg construct
MFVFLVLLPLVSSQCVNLTTRTQLPPAYTNSFTRGVYYPDKVFRSSVLHSTQDLFLPFFSNVTWFHAIHVSGTNGTKRFDNPVLPFNDGVYFASTEKSNIIRGWIFGTTLDSKTQSLLIVNNATNVVIKVCEFQFCNDPFLGVYYHKNNKSWMESEFRVYSSANNCTFEYVSQPFLMDLEGKQGNFKNLREFVFKNIDGYFKIYSKHTPINLVRDLPQGFSALEPLVDLPIGINITRFQTLLALHRSYLTPGDSSSGWTAGAAAYYVGYLQPRTFLLKYNENGTITDAVDCALDPLSETKCTLKSFTVEKGIYQTSNFRVQPTESIVRFPNITNLCPFGEVFNATRFASVYAWNRKRISNCVADYSVLYNSASFSTFKCYGVSPTKLNDLCFTNVYADSFVIRGDEVRQIAPGQTGKIADYNYKLPDDFTGCVIAWNSNNLDSKVGGNYNYLYRLFRKSNLKPFERDISTEIYQAGSTPCNGVEGFNCYFPLQSYGFQPTNGVGYQPYRVVVLSFELLHAPATVCGPKKSTNLVKNKCVNFNFNGLTGTGVLTESNKKFLPFQQFGRDIADTTDAVRDPQTLEILDITPCSFGGVSVITPGTNTSNQVAVLYQDVNCTEVPVAIHADQLTPTWRVYSTGSNVFQTRAGCLIGAEHVNNSYECDIPIGAGICASYQTQTNSPRRARSVASQSIIAYTMSLGAENSVAYSNNSIAIPTNFTISVTTEILPVSMTKTSVDCTMYICGDSTECSNLLLQYGSFCTQLNRALTGIAVEQDKNTQEVFAQVKQIYKTPPIKDFGGFNFSQILPDPSKPSKRSFIEDLLFNKVTLADAGFIKQYGDCLGDISARDLICAQKFNGLTVLPPLLTDEMIAQYTSALLAGTITSGWTFGAGAALQIPFAMQMAYRFNGIGVTQCVLYENQKLIANQFNSAIGKIQDSLSSTASALGKLQDVVNQNAQALNTLVKQLSSNFGAISSVLNDILSRLDKVEAEVQIDRLITGRLQSLQTYVTQQLIRAAEIRASANLAATKMSECVLGQSKRVDFCGKGYHLMSFPQSAPHGVVFLHVTYVPAQEKNFTTAPAICHDGKAHFPREGVFVSNGTHWFVTQRNFYEPQIITTDNTFVCGNCDVVIGIVNNTVYDPLQPELDSGGGGSDIDPYKEFGSSYQLLNFLPLDFFPDLNALVDTATALYEEELTGREHCSPHHTAIRQALVCWDELTKLIAWMSSNITSEQVRTIIVNHVNDTWGLKVRQSLWFHLSCLTFGQHTVQEFLVSFGVWIRTPAPYRPPNAPILSTLPEHTVIC

SEQ ID NO: 14106 - protein, 1301 aa, Artificial Sequence
  SARS-CoV-2/USA/NY-NYUMC7/2020__EPI_ISL_418192 spike protein (1-1147)(N914C_S1123C) WhcAg construct
MFVFLVLLPLVSSQCVNLTTRTQLPPAYTNSFTRGVYYPDKVFRSSVLHSTQDLFLPFFSNVTWFHAIHVSGTNGTKRFDNPVLPFNDGVYFASTEKSNIIRGWIFGTTLDSKTQSLLIVNNATNVVIKVCEFQFCNDPFLGVYHHKNNKSWMESEFRVYSSANNCTFEYVSQPFLMDLEGKQGNFKNLREFVFKNIDGYFKIYSKHTPINLVRDLPQGFSALEPLVDLPIGINITRFQTLLALHRSYLTPGDSSSGWTAGAAAYYVGYLQPRTFLLKYNENGTITDAVDCALDPLSETKCTLKSFTVEKGIYQTSNFRVQPTESIVRFPNITNLCPFGEVFNATRFASVYAWNRKRISNCVADYSVLYNSASFSTFKCYGVSPTKLNDLCFTNVYADSFVIRGDEVRQIAPGQTGKIADYNYKLPDDFTGCVIAWNSNNLDSKVGGNYNYLYRLFRKSNLKPFERDISTEIYQAGSTPCNGVEGFNCYFPLQSYGFQPTNGVGYQPYRVVVLSFELLHAPATVCGPKKSTNLVKNKCVNFNFNGLTGTGVLTESNKKFLPFQQFGRDIADTTDAVRDPQTLEILDITPCSFGGVSVITPGTNTSNQVAVLYQGVNCTEVPVAIHADQLTPTWRVYSTGSNVFQTRAGCLIGAEHVNNSYECDIPIGAGICASYQTQTNSPRRARSVASQSIIAYTMSLGAENSVAYSNNSIAIPTNFTISVTTEILPVSMTKTSVDCTMYICGDSTECSNLLLQYGSFCTQLNRALTGIAVEQDKNTQEVFAQVKQIYKTPPIKDFGGFNFSQILPDPSKPSKRSFIEDLLFNKVTLADAGFIKQYGDCLGDIAARDLICAQKFNGLTVLPPLLTDEMIAQYTSALLAGTITSGWTFGAGAALQIPFAMQMAYRFNGIGVTQCVLYENQKLIANQFNSAIGKIQDSLSSTASALGKLQDVVNQNAQALNTLVKQLSSNFGAISSVLNDILSRLDKVEAEVQIDRLITGRLQSLQTYVTQQLIRAAEIRASANLAATKMSECVLGQSKRVDFCGKGYHLMSFPQSAPHGVVFLHVTYVPAQEKNFTTAPAICHDGKAHFPREGVFVSNGTHWFVTQRNFYEPQIITTDNTFVCGNCDVVIGIVNNTVYDPLQPELDSGGGGSDIDPYKEFGSSYQLLNFLPLDFFPDLNALVDTATALYEEELTGREHCSPHHTAIRQALVCWDELTKLIAWMSSNITSEQVRTIIVNHVNDTWGLKVRQSLWFHLSCLTFGQHTVQEFLVSFGVWIRTPAPYRPPNAPILSTLPEHTVIC

SEQ ID NO: 14107 - protein, 1301 aa, Artificial Sequence
  SARS-CoV-2/Iceland/189/2020__EPI_ISL_417709 spike protein (1-1147)(N914C_S1123C) WhcAg construct
MFVFLVLLPLVSSQCVNLTTRTQLPPAYTNSFTRGVYYPDKVFRSSVLHSTQDLFLPFFSNVTWFHAIHVSGTNGTKRFDNPVLPFNDGVYFASTEKSNIIRGWIFGTTLDSKTQSLLIVNNATNVVIKVCEFQFCNDPFLGVYYHKNNKSWMESEFRVYSSANNCTFEYVSQPFLMDLEGKQGNFKNLREFVFKNIDGYFKIYSKHTPINLVRDLPQGFSALEPLVDLPIGINITRFQTLLALHRSYLTPGDSSSGWTAGAAAYYVGYLQPRTFLLKYNENGTITDAVDCALDPLSETKCTLKSFTVEKGIYQTSNFRVQPTESIVRFPNITNLCPFGEVFNATRFASVYAWNRKRISNCVADYSVLYNSASFSTFKCYGVSPTKLNDLCFTNVYADSFVIRGDEVRQIAPGQTGKIADYNYKLPDDFTGCVIAWNSNNLDSKVGGNYNYLYRLFRKSNLKPFERDISTEIYQAGSTPCNGVEGFNCYFPLQSYGFQPTNGVGYQPYRVVVLSFELLHAPATVCGPKKSTNLVKNKCVNFNFNGLTGTGVLTESNKKFLPFQQFGRDIADTTDAVRDPQTLEILDITPCSFGGVSVITPGTNTSNQVAVLYQGVNCTEVPVAIHADQLTPTWRVYSTGSNVFQTRAGCLIGAEHVNNSYECDIPIGAGICASYQTQTNSPRRARSVASQSIIAYTMSLGAENSVAYSNNSIAIPTNFTISVTTEILPVSMTKTSVDCTMYICGDSTECSNLLLQYGSFCTQLNRALTGIAVEQDKNTQEVFAQVKQIYKTPPIKDFGGFNFSQILPDPSKPSKRSFIEDLLFNKVTLADAGFTKQYGDCLGDIAARDLICAQKFNGLTVLPPLLTDEMIAQYTSALLAGTITSGWTFGAGAALQIPFAMQMAYRFNGIGVTQCVLYENQKLIANQFNSAIGKIQDSLSSTASALGKLQDVVNQNAQALNTLVKQLSSNFGAISSVLNDILSRLDKVEAEVQIDRLITGRLQSLQTYVTQQLIRAAEIRASANLAATKMSECVLGQSKRVDFCGKGYHLMSFPQSAPHGVVFLHVTYVPAQEKNFTTAPAICHDGKAHFPREGVFVSNGTHWFVTQRNFYEPQIITTDNTFVCGNCDVVIGIVNNTVYDPLQPELDSGGGGSDIDPYKEFGSSYQLLNFLPLDFFPDLNALVDTATALYEEELTGREHCSPHHTAIRQALVCWDELTKLIAWMSSNITSEQVRTIIVNHVNDTWGLKVRQSLWFHLSCLTFGQHTVQEFLVSFGVWIRTPAPYRPPNAPILSTLPEHTVIC

SEQ ID NO: 14108 - protein, 1301 aa, Artificial Sequence
  SARS-CoV-2/Australia/NSW56/2020__EPI_ISL_417408 spike protein (1-1147)(N914C_S1123C) WhcAg construct
MFVFLVLLPLVSSQCVNLTTRTQLPPAYTNSFTRGVYYPDKVFRSSVLHSTQDLFLPFFSNVTWFHAIHVSGTNGTKRFDNPVLPFNDGVYFASTEKSNIIRGWIFGTTLDSKTQSLLIVNNATNVVIKVCEFQFCNDPFLGVYYHKNNKSWMESEFRVYSSANNCTFEYVSQPFLMDLEGKQGNFKNLREFVFKNIDGYFKIYSKHTPINLVRDLPQGFSALEPLVDLPIGINITRFQTLLALHRSYLTPGDSSSGWTAGAAAYYVGYLQPRTFLLKYNENGTITDAVDCALDPLSETKCTLKSFTVEKGIYQTSNFRVQPTESIVRFPNITNLCPFGEVFNATRFASVYAWNRKRISNCVADYSVLYNSASFSTFKCYGVSPTKLNDLCFTNVYADSFVIRGDEVRQIAPGQTGKIADYNYKLPDDFTGCVIAWNSNNLDSKVGGNYNYLYRLFRKSNLKPFERDISTEIYQAGSTPCNGVEGFNCYFPLQSYGFQPTNGVGYQPYRVVVLSFELLHAPATVCGPKKSTNLVKNKCVNFNFNGLTGTGVLTESNKKFLPFQQFGRDIADTTDAVRDPQTLEILDITPCSFGGVSVITPGTNTSNQVAVLYQDVNCTEVPVAIHADQLTPTWRVYSTGSNVFQTRAGCLIGAEHVNNSYECDIPIGAGICASYQTQTNSPRRARSVASQSIIAYTMSLGAENSVAYSNNSIAIPTNFTISVTTEILPVSMTKTSVDCTMYICGDSTECSNLLLQYGSFCTQLNRALTGIAVEQDKNTQEVFAQVKQIYKTPPIKDFGGFNFSQILPDSSKPSKRSFIEDLLFNKVTLADAGFIKQYGDCLGDIAARDLICAQKFNGLTVLPPLLTDEMIAQYTSALLAGTITSGWTFGAGAALQIPFAMQMAYRFNGIGVTQCVLYENQKLIANQFNSAIGKIQDSLSSTASALGKLQDVVNQNAQALNTLVKQLSSNFGAISSVLNDILSRLDKVEAEVQIDRLITGRLQSLQTYVTQQLIRAAEIRASANLAATKMSECVLGQSKRVDFCGKGYHLMSFPQSAPHGVVFLHVTYVPAQEKNFTTAPAICHDGKAHFPREGVFVSNGTHWFVTQRNFYEPQIITTDNTFVCGNCDVVIGIVNNTVYDPLQPELDSGGGGSDIDPYKEFGSSYQLLNFLPLDFFPDLNALVDTATALYEEELTGREHCSPHHTAIRQALVCWDELTKLIAWMSSNITSEQVRTIIVNHVNDTWGLKVRQSLWFHLSCLTFGQHTVQEFLVSFGVWIRTPAPYRPPNAPILSTLPEHTVIC

SEQ ID NO: 14109 - protein, 1301 aa, Artificial Sequence
  SARS-CoV-2/Iceland/280/2020__EPI_ISL_417608 spike protein (1-1147)(N914C_S1123C) WhcAg construct
MFVFLVLLPLVSSQCVNLTTRTQLPPAYTNSFTRGVYYPDKVFRSSVLHSTQDLFLPFFSNVTWFHAIHVSGTNGTKRFDNPVLPFNDGVYFASTEKSNIIRGWIFGTTLDSKTQSLLIVNNATNVVIKVCEFQFCNDPFLGVYYHKNNKSWMESEFRVYSSANNCTFEYVSQPFLMDLEGKQGNFKNLREFVFKNIDGYFKIYSKHTPINLVRDLPQGFSALEPLVDLPIGINITRFQTLLALHRSYLTPGDSSSGWTAGAAAYYVGYLQPRTFLLKYNENGTITDAVDCALDPLSETKCTLKSFTVEKGIYQTSNFRVQPTESIVRFPNITNLCPFGEVFNATRFASVYAWNRKRISNCVADYSVLYNSASFSTFKCYGVSPTKLNDLCFTNVYADSFVIRGDEVRQIAPGQTGKIADYNYKLPDDFTGCVIAWNSNNLDSKVGGNYNYLYRLFRKSNLKPFERDISTEIYQAGSTPCNGVEGFNCYFPLQSYGFQPTNGVGYQPYRVVVLSFELLHAPATVCGPKKSTNLVKNKCVNFNFNGLTGTGVLTESNKKFLPFQQFGRDIADTTDAVRDPQTLEILDITPCSFGGVSVITPGTNTSNQVAVLYQGVNCTEVPVAIHADQLTPTWRVYSTGSNVFQTRAGCLIGAEHVNNSYECDIPIGAGICASYHTQTNSPRRARSVASQSIIAYTMSLGAENSVAYSNNSIAIPTNFTISVTTEILPVSMTKTSVDCTMYICGDSTECSNLLLQYGSFCTQLNRALTGIAVEQDKNTQEVFAQVKQIYKTPPIKDFGGFNFSQILPDPSKPSKRSFIEDLLFNKVTLADAGFIKQYGDCLGDIAARDLICAQKFNGLTVLPPLLTDEMIAQYTSALLAGTITSGWTFGAGAALQIPFAMQMAYRFNGIGVTQCVLYENQKLIANQFNSAIGKIQDSLSSTASALGKLQDVVNQNAQALNTLVKQLSSNFGAISSVLNDILSRLDKVEAEVQIDRLITGRLQSLQTYVTQQLIRAAEIRASANLAATKMSECVLGQSKRVDFCGKGYHLMSFPQSAPHGVVFLHVTYVPAQEKNFTTAPAICHDGKAHFPREGVFVSNGTHWFVTQRNFYEPQIITTDNTFVCGNCDVVIGIVNNTVYDPLQPELDSGGGGSDIDPYKEFGSSYQLLNFLPLDFFPDLNALVDTATALYEEELTGREHCSPHHTAIRQALVCWDELTKLIAWMSSNITSEQVRTIIVNHVNDTWGLKVRQSLWFHLSCLTFGQHTVQEFLVSFGVWIRTPAPYRPPNAPILSTLPEHTVIC

SEQ ID NO: 14110 - protein, 1301 aa, Artificial Sequence; identical to SEQ ID NO: 14065
  SARS-CoV-2/Iceland/247/2020__EPI_ISL_417575 spike protein (1-1147)(N914C_S1123C) WhcAg construct

SEQ ID NO: 14111 - protein, 1301 aa, Artificial Sequence
  SARS-CoV-2/Iceland/238/2020__EPI_ISL_417566 spike protein (1-1147)(N914C_S1123C) WhcAg construct
MFVFLVLLPLVSSQCVNLTTRTQLPPAYTNSFTRGVYYPDKVFRSSVLHSTQDLFLPFFSNVTWFHAIHVSGTNGTKRFDNPVLPFNDGVYFASTEKSNIIRGWIFGTTLDSKTQSLLIVNNATNVVIKVCEFQFCNDPFLGVYYHKNNKSWMESEFRVYSSANNCTFEYVSQPFLMDLEGKQGNFKNLREFVFKNIDGYFKIYSKHTPINLVRDLPQGFSALEPLVDLPIGINITRFQTLLALHRSYLTPGDSSSGWTAGAAAYYVGYLQPRTFLLKYNENGTITDAVDCALDPLSETKCTLKSFTVEKGIYQTSNFRVQPTESIVRFPNITNLCPFGEVFNATRFASVYAWNRKRISNCVADYSVLYNSASFSTFKCYGVSPTKLNDLCFTNVYADSFVIRGDEVRQIAPGQTGKIADYNYKLPDDFTGCVIAWNSNNLDSKVGGNYNYLYRLFRKSNLKPFERDISTEIYQAGSTPCNGVEGFNCYFPLQSYGFQPTNGVGYQPYRVVVLSFELLHAPATVCGPKKSTNLVKNKCVNFNFNGLTGTGVLTESNKKFLPFQQFGRDIADTTDAVRDPQTLEILDITPCSFGGVSVITPGTNTSNQVAVLYQGVNCTEVPVAIHADQLTPTWRVYSTGSNVFQTRAGCLIGAEHVNNSYECDIPIGAGICASYQTQTNSPRRARSVASQSIIAYTMSLGAENSVAYSNNSIAIPTNFTISVTTEILPVSMTKTSVDCTMYICGDSTECSNLLLQYGSFCTQLNRALTGIAVEQDKNTQEVFAQVKQIYKTPPIKDFGGFNFSQILPDPSKPSKRSFIEDLLFNKVTLADVGFIKQYGDCLGDIAARDLICAQKFNGLTVLPPLLTDEMIAQYTSALLAGTITSGWTFGAGAALQIPFAMQMAYRFNGIGVTQCVLYENQKLIANQFNSAIGKIQDSLSSTASALGKLQDVVNQNAQALNTLVKQLSSNFGAISSVLNDILSRLDKVEAEVQIDRLITGRLQSLQTYVTQQLIRAAEIRASANLAATKMSECVLGQSKRVDFCGKGYHLMSFPQSAPHGVVFLHVTYVPAQEKNFTTAPAICHDGKAHFPREGVFVSNGTHWFVTQRNFYEPQIITTDNTFVCGNCDVVIGIVNNTVYDPLQPELDSGGGGSDIDPYKEFGSSYQLLNFLPLDFFPDLNALVDTATALYEEELTGREHCSPHHTAIRQALVCWDELTKLIAWMSSNITSEQVRTIIVNHVNDTWGLKVRQSLWFHLSCLTFGQHTVQEFLVSFGVWIRTPAPYRPPNAPILSTLPEHTVIC

SEQ ID NO: 14112 - protein, 1301 aa, Artificial Sequence
  SARS-CoV-2/Greece/16/2020__EPI_ISL_418265 spike protein (1-1147)(N914C_S1123C) WhcAg construct
MFVFLVLLPLVSSQCVNLTTRTQLPPAYTNSFTRGVYYPDKVFRSSVLHSTQDLFLPFFSNVTWFHAIHVSGTNGTKRFDNPVLPFNDGVYFASTEKSNIIRGWIFGTTLDSKTQSLLIVNNATNVVIKVCEFQFCNDPFLGVYYHKNNKSWMESEFRVYSSANNCTFEYVSQPFLMDLEGKQGNFKNLREFVFKNVDGYFKIYSKHTPINLVRDLPQGFSALEPLVDLPIGINITRFQTLLALHRSYLTPGDSSSGWTAGAAAYYVGYLQPRTFLLKYNENGTITDAVDCALDPLSETKCTLKSFTVEKGIYQTSNFRVQPTESIVRFPNITNLCPFGEVFNATRFASVYAWNRKRISNCVADYSVLYNSASFSTFKCYGVSPTKLNDLCFTNVYADSFVIRGDEVRQIAPGQTGKIADYNYKLPDDFTGCVIAWNSNNLDSKVGGNYNYLYRLFRKSNLKPFERDISTEIYQAGSTPCNGVEGFNCYFPLQSYGFQPTNGVGYQPYRVVVLSFELLHAPATVCGPKKSTNLVKNKCVNFNFNGLTGTGVLTESNKKFLPFQQFGRDIADTTDAVRDPQTLEILDITPCSFGGVSVITPGTNTSNQVAVLYQDVNCTEVPVAIHADQLTPTWRVYSTGSNVFQTRAGCLIGAEHVNNSYECDIPIGAGICASYQTQTNSPRRARSVASQSIIAYTMSLGAENSVAYSNNSIAIPTNFTISVTTEILPVSMTKTSVDCTMYICGDSTECSNLLLQYGSFCTQLNRALTGIAVEQDKNTQEVFAQVKQIYKTPPIKDFGGFNFSQILPDPSKPSKRSFIEDLLFNKVTLADAGFIKQYGDCLGDIAARDLICAQKFNGLTVLPPLLTDEMIAQYTSALLAGTITSGWTFGAGAALQIPFAMQMAYRFNGIGVTQCVLYENQKLIANQFNSAIGKIQDSLSSTASALGKLQDVVNQNAQALNTLVKQLSSNFGAISSVLNDILSRLDKVEAEVQIDRLITGRLQSLQTYVTQQLIRAAEIRASANLAATKMSECVLGQSKRVDFCGKGYHLMSFPQSAPHGVVFLHVTYVPAQEKNFTTAPAICHDGKAHFPREGVFVSNGTHWFVTQRNFYEPQIITTDNTFVCGNCDVVIGIVNNTVYDPLQPELDSGGGGSDIDPYKEFGSSYQLLNFLPLDFFPDLNALVDTATALYEEELTGREHCSPHHTAIRQALVCWDELTKLIAWMSSNITSEQVRTIIVNHVNDTWGLKVRQSLWFHLSCLTFGQHTVQEFLVSFGVWIRTPAPYRPPNAPILSTLPEHTVIC

SEQ ID NO: 14113 - protein, 1301 aa, Artificial Sequence
  SARS-CoV-2/Iceland/319/2020__EPI_ISL_417648 spike protein (1-1147)(N914C_S1123C) WhcAg construct
MFVFLVLLPLVSSQCVNLTTRTQLPPAYTNSFTRGVYYPDKVFRSSVLHSTQDLFLPFFSNVTWFHAIHVSGTNGTKRFDNPVLPFNDGVYFASTEKSNIIRGWIFGTTLDSKTQSLLIVNNATNVVIKVCEFQFCNDPFLGVYYHKNNKSWMESEFRVYSSANNCTFEYVSQPFLIDLEGKQGNFKNLREFVFKNIDGYFKIYSKHTPINLVRDLPQGFSALEPLVDLPIGINITRFQTLLALHRSYLTPGDSSSGWTAGAAAYYVGYLQPRTFLLKYNENGTITDAVDCALDPLSETKCTLKSFTVEKGIYQTSNFRVQPTESIVRFPNITNLCPFGEVFNATRFASVYAWNRKRISNCVADYSVLYNSASFSTFKCYGVSPTKLNDLCFTNVYADSFVIRGDEVRQIAPGQTGKIADYNYKLPDDFTGCVIAWNSNNLDSKVGGNYNYLYRLFRKSNLKPFERDISTEIYQAGSTPCNGVEGFNCYFPLQSYGFQPTNGVGYQPYRVVVLSFELLHAPATVCGPKKSTNLVKNKCVNFNFNGLTGTGVLTESNKKFLPFQQFGRDIADTTDAVRDPQTLEILDITPCSFGGVSVITPGTNTSNQVAVLYQGVNCTEVPVAIHADQLTPTWRVYSTGSNVFQTRAGCLIGAEHVNNSYECDIPIGAGICASYQTQTNSPRRARSVASQSIIAYTMSLGAENSVAYSNNSIAIPTNFTISVTTEILPVSMTKTSVDCTMYICGDSTECSNLLLQYGSFCTQLNRALTGIAVEQDKNTQEVFAQVKQIYKTPPIKDFGGFNFSQILPDPSKPSKRSFIEDLLFNKVTLADAGFIKQYGDCLGDIAARDLICAQKFNGLTVLPPLLTDEMIAQYTSALLAGTITSGWTFGAGAALQIPFAMQMAYRFNGIGVTQCVLYENQKLIANQFNSAIGKIQDSLSSTASALGKLQDVVNQNAQALNTLVKQLSSNFGAISSVLNDILSRLDKVEAEVQIDRLITGRLQSLQTYVTQQLIRAAEIRASANLAATKMSECVLGQSKRVDFCGKGYHLMSFPQSAPHGVVFLHVTYVPAQEKNFTTAPAICHDGKAHFPREGVFVSNGTHWFVTQRNFYEPQIITTDNTFVCGNCDVVIGIVNNTVYDPLQPELDSGGGGSDIDPYKEFGSSYQLLNFLPLDFFPDLNALVDTATALYEEELTGREHCSPHHTAIRQALVCWDELTKLIAWMSSNITSEQVRTIIVNHVNDTWGLKVRQSLWFHLSCLTFGQHTVQEFLVSFGVWIRTPAPYRPPNAPILSTLPEHTVIC

SEQ ID NO: 14114 - protein, 1301 aa, Artificial Sequence
  SARS-CoV-2/Congo/94/2020__EPI_ISL_417947 spike protein (1-1147)(N914C_S1123C) WhcAg construct
MFVFLVLLPLVSSQCVNLTTRTQLPPAYTNSFTRGVYYPDKVFRSSVLHSTQDLFLPFFSNVTWFHAIHVSGTNGTKRFDNPVLPFNDGVYFASTEKSNIIRGWIFGTTLDSKTQSLLIVNNATNVVIKVCEFQFCNDPFLGVYYHKNNKSWMESEFRVYSSANNCTFEYVSQPFLMDLEGKQGNFKNLREFVFKNIDGYFKIYSKHTPINLVRDLPQGFSALEPLVDLPIGINITRFQTLLALHRSYLTPGDSSSGWTAGAAAYYVGYLQPRTFLLKYNENGTITDAVDCALDPLSETKCTLKSFTVEKGIYQTSNFRVQPTESIVRFPNITNLCPFGEVFNATRFASVYAWNRKRISNCVADYSVLYNSASFSTFKCYGVSPTKLNDLCFTNVYADSFVIRGDEVRQIAPGQTGKIADYNYKLPDDFTGCVIAWNSNNLDSKVGGNYNYLYRLFRKSNLKPFERDISTEIYQAGSTPCNGVEGFNCYFPLQSYGFQPTNGVGYQPYRVVVLSFELLHAPATVCGPKKSTNLVKNKCVNFNFNGLTGTGVLTESNKKFLPFQQFGRDIADTTDAVRDPQTLEILDITPCSFGGVSVITPGTNTSNQVAVLYQGVNCTEVPVAIHADQLTPTWRVYSTGSNVFQTRAGCLIGAEHVNNSYECDIPIGAGICASYQTQTNSPRRARSVASQSIIAYTMSLGAENSVAYSNNSIAIPTNFTISVTTEILPVSMTKTSVDCTMYICGDSTECSNLLLQYGSFCTQLNRALTGIAVEQDKNTQEVFAQVKQIYKTPPIKDFGGFNFSQILPDPSKPSKRSFIEDILFNKVTLADAGFIKQYGDCLGDIAARDLICAQKFNGLTVLPPLLTDEMIAQYTSALLAGTITSGWTFGAGAALQIPFAMQMAYRFNGIGVTQCVLYENQKLIANQFNSAIGKIQDSLSSTASALGKLQDVVNQNAQALNTLVKQLSSNFGAISSVLNDILSRLDKVEAEVQIDRLITGRLQSLQTYVTQQLIRAAEIRASANLAATKMSECVLGQSKRVDFCGKGYHLMSFPQSAPHGVVFLHVTYVPAQEKNFTTAPAICHDGKAHFPREGVFVSNGTHWFVTQRNFYEPQIITTDNTFVCGNCDVVIGIVNNTVYDPLQPELDSGGGGSDIDPYKEFGSSYQLLNFLPLDFFPDLNALVDTATALYEEELTGREHCSPHHTAIRQALVCWDELTKLIAWMSSNITSEQVRTIIVNHVNDTWGLKVRQSLWFHLSCLTFGQHTVQEFLVSFGVWIRTPAPYRPPNAPILSTLPEHTVIC

SEQ ID NO: 14115 - protein, 1301 aa, Artificial Sequence
  SARS-CoV-2/Congo/158/2020__EPI_ISL_417950 spike protein (1-1147)(N914C_S1123C) WhcAg construct
MFVFLVLLPLVSSQCVNLTTRTQLPPAYTNSFTRGVYYPDKVFRSSVLHSTQDLFLPFFSNVTWFHAIHVSGTNGTKRFDNPVLPFNDGVYFASTEKSNIIRGWIFGTTLDSKTQSLLIVNNATNVVIKVCEFQFCNDPFLGVYYHKNNKSWMESEFRVYSSANNCTFEYVSQPFLMDLEGKQGNFKNLREFVFKNIDGYFKIYSKHTPINLVRDLPQGFSALEPLVDLPIGINITRFQTLLALHRSYLTPGDSSSGWTAGAAAYYVGYLQPRTFLLKYNENGTITDAVDCALDPLSETKCTLKSFTVEKGIYQTSNFRVQPTESIVRFPNITNLCPFGEVFNATRFASVYAWNRKRISNCVADYSVLYNSASFSTFKCYGVSPTKLNDLCFTNVYADSFVIRGDEVRQIAPGQTGKIADYNYKLPDDFTGCVIAWNSNNLDSKVGGNYNYLYRLFRKSNLKPFERDISTEIYQAGSTPCNGVEGFNCYFPLQSYGFQPTNGVGYQPYRVVVLSFELLHAPATVCGPKKSTNLVKNKCVNFNFNGLTGTGVLTESNKKFLPFQQFGRDIADTTDAVRDPQTLEILDITPCSFGGVSVITPGTNTSNQVAVLYQDVNCTEVPVAIHADQLTPTWRVYSTGSNVFQTRAGCLIGAEHVNNSYECDIPIGAGICASYQTQTNSPRRARSVASQSIIAYTMSLGAENSVAYSNNSIAIPTNFTISVTTEILPVSMTKTSVDCTMYICGDSTECSNLLLQYGSFCTQLNRALTGIAVEQDKNTQEVFAQVKQIYKTPPIKDFGGFNFSQILPDPSKPSKRSFIEDLLFNKVTLADAGFIKQYGDCLGDIAARDLICAQKFNGLTVLPPLLTDEMIAQYTSALLAGTITSGWTFGAGAALQIPFAMQMAYRFNGIGVTQCVLYENQKLIANQFNSAIGKIQDSLSSTASALGKLQDVVNQNAQALNTLVKQLSSNFGAISSVLNDILSRLDKVEAEVQIDRLITGRLQSLQTYVTQQLIRAAEIRASANLAATKMSECVLGQSKRVDFCGKGYHLMSFPQSAPHGVVFLHVTYVPAQEKNFTTAPAICHDGKAHFPREGVFVSNGTHWFVTQRNFYEPQIITTDNTFLCGNCDVVIGIVNNTVYDPLQPELDSGGGGSDIDPYKEFGSSYQLLNFLPLDFFPDLNALVDTATALYEEELTGREHCSPHHTAIRQALVCWDELTKLIAWMSSNITSEQVRTIIVNHVNDTWGLKVRQSLWFHLSCLTFGQHTVQEFLVSFGVWIRTPAPYRPPNAPILSTLPEHTVIC

SEQ ID NO: 14116 - protein, 1301 aa, Artificial Sequence
  SARS-CoV-2/USA/UT-00034/2020__EPI_ISL_417977 spike protein (1-1147)(N914C_S1123C) WhcAg construct
MFVFLVLLPLVSSQCVNLTTRTQLPPAYTNSFTRGVYYPDKVFRSSVLHSTQDLFLPFFSNVTWFHAIHVSGTNGTKRFDNPVLPFNDGVYFASTEKSNIIRGWIFGTTLDSKTQSLLIVNNATNVVIKVCEFQFCNDPFLGVYYYKNNKSWMESEFRVYSSANNCTFEYVSQPFLMDLEGKQGNFKNLREFVFKNIDGYFKIYSKHTPINLVRDLPQGFSALEPLVDLPIGINITRFQTLLALHRSYLTPGDSSSGWTAGAAAYYVGYLQPRTFLLKYNENGTITDAVDCALDPLSETKCTLKSFTVEKGIYQTSNFRVQPTESIVRFPNITNLCPFGEVFNATRFASVYAWNRKRISNCVADYSVLYNSASFSTFKCYGVSPTKLNDLCFTNVYADSFVIRGDEVRQIAPGQTGKIADYNYKLPDDFTGCVIAWNSNNLDSKVGGNYNYLYRLFRKSNLKPFERDISTEIYQAGSTPCNGVEGFNCYFPLQSYGFQPTNGVGYQPYRVVVLSFELLHAPATVCGPKKSTNLVKNKCVNFNFNGLTGTGVLTESNKKFLPFQQFGRDIADTTDAVRDPQTLEILDITPCSFGGVSVITPGTNTSNQVAVLYQGVNCTEVPVAIHADQLTPTWRVYSTGSNVFQTRAGCLIGAEHVNNSYECDIPIGAGICASYQTQTNSPRRARSVASQSIIAYTMSLGAENSVAYSNNSIAIPTNFTISVTTEILPVSMTKTSVDCTMYICGDSTECSNLLLQYGSFCTQLNRALTGIAVEQDKNTQEVFAQVKQIYKTPPIKDFGGFNFSQILPDPSKPSKRSFIEDLLFNKVTLADAGFIKQYGDCLGDIAARDLICAQKFNGLTVLPPLLTDEMIAQYTSALLAGTITSGWTFGAGAALQIPFAMQMAYRFNGIGVTQCVLYENQKLIANQFNSAIGKIQDSLSSTASALGKLQDVVNQNAQALNTLVKQLSSNFGAISSVLNDILSRLDKVEAEVQIDRLITGRLQSLQTYVTQQLIRAAEIRASANLAATKMSECVLGQSKRVDFCGKGYHLMSFPQSAPHGVVFLHVTYVPAQEKNFTTAPAICHDGKAHFPREGVFVSNGTHWFVTQRNFYEPQIITTDNTFVCGNCDVVIGIVNNTVYDPLQPELDSGGGGSDIDPYKEFGSSYQLLNFLPLDFFPDLNALVDTATALYEEELTGREHCSPHHTAIRQALVCWDELTKLIAWMSSNITSEQVRTIIVNHVNDTWGLKVRQSLWFHLSCLTFGQHTVQEFLVSFGVWIRTPAPYRPPNAPILSTLPEHTVIC

SEQ ID NO: 14117 - protein, 1301 aa, Artificial Sequence
  SARS-CoV-2/USA/UT-00033/2020__EPI_ISL_417976 spike protein (1-1147)(N914C_S1123C) WhcAg construct
MFVFLVLLPLVSSQCVNLTTRTQLPPAYTNSFTRGVYYPDKVFRSSVLHSTQDLFLPFFSNVTWFHAIHVSGTNGTKRFDNPVLPFNDGVYFASTEKSNIIRGWIFGTTLDSKTQSLLIVNNATNVVIKVCEFQFCNDPFLGVYYHKNNKSWMESEFRVYSSANNCTFEYVSQPFLMDLEGKQGNFKNLREFVFKNIDGYFKIYSKHTPINLVRDLPQGFSALEPLVDLPIGINITRFQTLLALHRSYLTPGDSSSGLTAGAAAYYVGYLQPRTFLLKYNENGTITDAVDCALDPLSETKCTLKSFTVEKGIYQTSNFRVQPTESIVRFPNITNLCPFGEVFNATRFASVYAWNRKRISNCVADYSVLYNSASFSTFKCYGVSPTKLNDLCFTNVYADSFVIRGDEVRQIAPGQTGKIADYNYKLPDDFTGCVIAWNSNNLDSKVGGNYNYLYRLFRKSNLKPFERDISTEIYQAGSTPCNGVEGFNCYFPLQSYGFQPTNGVGYQPYRVVVLSFELLHAPATVCGPKKSTNLVKNKCVNFNFNGLTGTGVLTESNKKFLPFQQFGRDIADTTDAVRDPQTLEILDITPCSFGGVSVITPGTNTSNQVAVLYQGVNCTEVPVAIHADQLTPTWRVYSTGSNVFQTRAGCLIGAEHVNNSYECDIPIGAGICASYQTQTNSPRRARSVASQSIIAYTMSLGAENSVAYSNNSIAIPTNFTISVTTEILPVSMTKTSVDCTMYICGDSTECSNLLLQYGSFCTQLNRALTGIAVEQDKNTQEVFAQVKQIYKTPPIKDFGGFNFSQILPDPSKPSKRSFIEDLLFNKVTLADAGFIKQYGDCLGDIAARDLICAQKFNGLTVLPPLLTDEMIAQYTSALLAGTITSGWTFGAGAALQIPFAMQMAYRFNGIGVTQCVLYENQKLIANQFNSAIGKIQDSLSSTASALGKLQDVVNQNAQALNTLVKQLSSNFGAISSVLNDILSRLDKVEAEVQIDRLITGRLQSLQTYVTQQLIRAAEIRASANLAATKMSECVLGQSKRVDFCGKGYHLMSFPQSAPHGVVFLHVTYVPAQEKNFTTAPAICHDGKAHFPREGVFVSNGTHWFVTQRNFYEPQIITTDNTFVCGNCDVVIGIVNNTVYDPLQPELDSGGGGSDIDPYKEFGSSYQLLNFLPLDFFPDLNALVDTATALYEEELTGREHCSPHHTAIRQALVCWDELTKLIAWMSSNITSEQVRTIIVNHVNDTWGLKVRQSLWFHLSCLTFGQHTVQEFLVSFGVWIRTPAPYRPPNAPILSTLPEHTVIC

SEQ ID NO: 14118 - protein, 1301 aa, Artificial Sequence
  SARS-CoV-2/USA/WI-13/2020__EPI_ISL_417516 spike protein (1-1147)(N914C_S1123C) WhcAg construct
MFVFLVLLPLVSSQCVNLTTRTQLPPAYTNSFTRGVYYPDKVFRSSVLHSTQDLFLPFFSNVTWFHAIHVSGTNGTKRFDNPVLPFNDGVYFASTEKSNIIRGWIFGTTLDSKTQSLLIVNNATNVVIKVCEFQFCNDPFLGVYYHKNNKSWMESEFRVYSSANNCTFEYVSQPFLMDLEGKQGNFKNLREFVFKNIDGYFKIYSKHTPINLVRDLPQGFSALEPLVDLPIGINITRFQTLLALHRSYLTPGDSSSGWTAGAAAYYVGYLQPRTFLLKYNENGTITDAVDCALDPLSETKCTLKSFTVEKGIYQTSNFRVLPTESIVRFPNITNLCPFGEVFNATRFASVYAWNRKRISNCVADYSVLYNSASFSTFKCYGVSPTKLNDLCFTNVYADSFVIRGDEVRQIAPGQTGKIADYNYKLPDDFTGCVIAWNSNNLDSKVGGNYNYLYRLFRKSNLKPFERDISTEIYQAGSTPCNGVEGFNCYFPLQSYGFQPTNGVGYQPYRVVVLSFELLHAPATVCGPKKSTNLVKNKCVNFNFNGLTGTGVLTESNKKFLPFQQFGRDIADTTDAVRDPQTLEILDITPCSFGGVSVITPGTNTSNQVAVLYQGVNCTEVPVAIHADQLTPTWRVYSTGSNVFQTRAGCLIGAEHVNNSYECDIPIGAGICASYQTQTNSPRRARSVASQSIIAYTMSLGAENSVAYSNNSIAIPTNFTISVTTEILPVSMTKTSVDCTMYICGDSTECSNLLLQYGSFCTQLNRALTGIAVEQDKNTQEVFAQVKQIYKTPPIKDFGGFNFSQILPDPSKPSKRSFIEDLLFNKVTLADAGFIKQYGDCLGDIAARDLICAQKFNGLTVLPPLLTDEMIAQYTSALLAGTITSGWTFGAGAALQIPFAMQMAYRFNGIGVTQCVLYENQKLIANQFNSAIGKIQDSLSSTASALGKLQDVVNQNAQALNTLVKQLSSNFGAISSVLNDILSRLDKVEAEVQIDRLITGRLQSLQTYVTQQLIRAAEIRASANLAATKMSECVLGQSKRVDFCGKGYHLMSFPQSAPHGVVFLHVTYVPAQEKNFTTAPAICHDGKAHFPREGVFVSNGTHWFVTQRNFYEPQIITTDNTFVCGNCDVVIGIVNNTVYDPLQPELDSGGGGSDIDPYKEFGSSYQLLNFLPLDFFPDLNALVDTATALYEEELTGREHCSPHHTAIRQALVCWDELTKLIAWMSSNITSEQVRTIIVNHVNDTWGLKVRQSLWFHLSCLTFGQHTVQEFLVSFGVWIRTPAPYRPPNAPILSTLPEHTVIC

SEQ ID NO: 14119 - protein, 1300 aa, Artificial Sequence
  SARS-CoV-2/India/1-27/2020__EPI_ISL_413522 spike protein (1-1146)(N913C_S1122C) WhcAg construct
MFVFLVLLPLVSSQCVNLTTRTQLPPAYTNSFTRGVYYPDKVFRSSVLHSTQDLFLPFFSNVTWFHAIHVSGTNGTKRFDNPVLPFNDGVYFASTEKSNIIRGWIFGTTLDSKTQSLLIVNNATNVVIKVCEFQFCNDPFLGVYHKNNKSWMESEFRVYSSANNCTFEYVSQPFLMDLEGKQGNFKNLREFVFKNIDGYFKIYSKHTPINLVRDLPQGFSALEPLVDLPIGINITRFQTLLALHRSYLTPGDSSSGWTAGAAAYYVGYLQPRTFLLKYNENGTITDAVDCALDPLSETKCTLKSFTVEKGIYQTSNFRVQPTESIVRFPNITNLCPFGEVFNATRFASVYAWNRKRISNCVADYSVLYNSASFSTFKCYGVSPTKLNDLCFTNVYADSFVIRGDEVIQIAPGQTGKIADYNYKLPDDFTGCVIAWNSNNLDSKVGGNYNYLYRLFRKSNLKPFERDISTEIYQAGSTPCNGVEGFNCYFPLQSYGFQPTNGVGYQPYRVVVLSFELLHAPATVCGPKKSTNLVKNKCVNFNFNGLTGTGVLTESNKKFLPFQQFGRDIADTTDAVRDPQTLEILDITPCSFGGVSVITPGTNTSNQVAVLYQDVNCTEVPVAIHADQLTPTWRVYSTGSNVFQTRAGCLIGAEHVNNSYECDIPIGAGICASYQTQTNSPRRARSVASQSIIAYTMSLGAENSVAYSNNSIAIPTNFTISVTTEILPVSMTKTSVDCTMYICGDSTECSNLLLQYGSFCTQLNRALTGIAVEQDKNTQEVFAQVKQIYKTPPIKDFGGFNFSQILPDPSKPSKRSFIEDLLFNKVTLADAGFIKQYGDCLGDIAARDLICAQKFNGLTVLPPLLTDEMIAQYTSALLAGTITSGWTFGAGAALQIPFAMQMAYRFNGIGVTQCVLYENQKLIANQFNSAIGKIQDSLSSTASALGKLQDVVNQNAQALNTLVKQLSSNFGAISSVLNDILSRLDKVEAEVQIDRLITGRLQSLQTYVTQQLIRAAEIRASANLAATKMSECVLGQSKRVDFCGKGYHLMSFPQSAPHGVVFLHVTYVPAQEKNFTTAPAICHDGKAHFPREGVFVSNGTHWFVTQRNFYEPQIITTDNTFVCGNCDVVIGIVNNTVYDPLQPELDSGGGGSDIDPYKEFGSSYQLLNFLPLDFFPDLNALVDTATALYEEELTGREHCSPHHTAIRQALVCWDELTKLIAWMSSNITSEQVRTIIVNHVNDTWGLKVRQSLWFHLSCLTFGQHTVQEFLVSFGVWIRTPAPYRPPNAPILSTLPEHTVIC

SEQ ID NO: 14120 - protein, 1295 aa, Artificial Sequence
  SARS-CoV-2/pangolin/Guangxi/P4L/2017__EPI_ISL_410538 spike protein (1-1141)(N908C_S1117C) WhcAg construct
MFVFLFVLPLVSSQCVNLTTRTGIPPGYTNSSTRGVYYPDKVFRSSILHLTQDLFLPFFSNVTWFNTINYQGGFKKFDNPVLPFNDGVYFASTEKSNIIRGWIFGTTLDARTQSLLIVNNATNVVIKVCEFQFCTDPFLGVYYHNNNKTWVENEFRVYSSANNCTFEYISQPFLMDLEGKQGNFKNLREFVFKNVDGYFKIYSKHTPIDLVRDLPRGFAALEPLVDLPIGINITRFQTLLALHRSYLTPGNLESGWTTGAAAYYVGYLQQRTFLLSYNQNGTITDAVDCSLDPLSETKCTLKSLTVEKGIYQTSNFRVQPTISIVRFPNITNLCPFGEVFNASKFASVYAWNRKRISNCVADYSVLYNSTSFSTFKCYGVSPTKLNDLCFTNVYADSFVVKGDEVRQIAPGQTGVIADYNYKLPDDFTGCVIAWNSVKQDALTGGNYGYLYRLFRKSKLKPFERDISTEIYQAGSTPCNGQVGLNCYYPLERYGFHPTTGVNYQPFRVVVLSFELLNGPATVCGPKLSTTLVKDKCVNFNFNGLTGTGVLTTSKKQFLPFQQFGRDISDTTDAVRDPQTLEILDITPCSFGGVSVITPGTNTSNQVAVLYQDVNCTEVPMAIHAEQLTPAWRVYSAGANVFQTRAGCLVGAEHVNNSYECDIPVGAGICASYHSMSSLRSVNQRSIIAYTMSLGAENSVAYSNNSIAIPTNFTISVTTEILPVSMTKTSVDCTMYICGDSIECSNLLLQYGSFCTQLNRALTGIAVEQDKNTQEVFAQVKQIYKTPPIKDFGGFNFSQILPDPSKPSKRSFIEDLLFNKVTLADAGFIKQYGDCLGDIAARDLICAQKFNGLTVLPPLLTDEMIAQYTSALLAGTITSGWTFGAGAALQIPFAMQMAYRFNGIGVTQCVLYENQKLIANQFNSAIGKIQDSLSSTASALGKLQDVVNQNAQALNTLVKQLSSNFGAISSVLNDILSRLDKVEAEVQIDRLITGRLQSLQTYVTQQLIRAAEIRASANLAATKMSECVLGQSKRVDFCGKGYHLMSFPQSAPHGVVFLHVTYVPAQEKNFTTAPAICHEGKAHFPREGVFVSNGTHWFITQRNFYEPQIITTDNTFVCGSCDVVIGIVNNTVYDPLQPELDSGGGGSDIDPYKEFGSSYQLLNFLPLDFFPDLNALVDTATALYEEELTGREHCSPHHTAIRQALVCWDELTKLIAWMSSNITSEQVRTIIVNHVNDTWGLKVRQSLWFHLSCLTFGQHTVQEFLVSFGVWIRTPAPYRPPNAPILSTLPEHTVIC

SEQ ID NO: 14121 - protein, 1295 aa, Artificial Sequence
  SARS-CoV-2/pangolin/Guangxi/P5L/2017__EPI_ISL_410540 spike protein (1-1141)(N908C_S1117C) WhcAg construct
MFVFLFVLPLVSSQCVNLTTRTGIPPGYTNSSTRGVYYPDKVFRSSILHLTQDLFLPFFSNVTWFNTINYQGGFKKFDNPVLPFNDGVYFASTEKSNIIRGWIFGTTLDARTQSLLIVNNATNVVIKVCEFQFCTDPFLGVYYHNNNKTWVENEFRVYSSANNCTFEYISQPFLMDLEGKQGNFKNLREFVFKNVDGYFKIYSKHTPIDLVRDLPRGFAALEPLVDLPIGINITRFQTLLALHRSYLTPGKLESGWTTGAAAYYVGYLQQRTFLLSYNQNGTITDAVDCSLDPLSETKCTLKSLTVEKGIYQTSNFRVQPTISIVRFPNITNLCPFGEVFNASKFASVYAWNRKRISNCVADYSVLYNSTSFSTFKCYGVSPTKLNDLCFTNVYADSFVVKGDEVRQIAPGQTGVIADYNYKLPDDFTGCVIAWNSVKQDALTGGNYGYLYRLFRKSKLKPFERDISTEIYQAGSTPCNGQVGLNCYYPLERYGFHPTTGVNYQPFRVVVLSFELLNGPATVCGPKLSTTLVKDKCVNFNFNGLTGTGVLTTSKKQFLPFQQFGRDISDTTDAVRDPQTLEILDITPCSFGGVSVITPGTNTSNQVAVLYQDVNCTEVPMAIHAEQLTPAWRVYSAGANVFQTRAGCLVGAEHVNNSYECDIPVGAGICASYHSMSSFRSVNQRSIIAYTMSLGAENSVAYSNNSIAIPTNFTISVTTEILPVSMTKTSVDCTMYICGDSIECSNLLLQYGSFCTQLNRALTGIAVEQDKNTQEVFAQVKQIYKTPPIKDFGGFNFSQILPDPSKPSKRSFIEDLLFNKVTLADAGFIKQYGDCLGDIAARDLICAQKFNGLTVLPPLLTDEMIAQYTSALLAGTITSGWTFGAGAALQIPFAMQMAYRFNGIGVTQCVLYENQKLIANQFNSAIGKIQDSLSSTASALGKLQDVVNQNAQALNTLVKQLSSNFGAISSVLNDILSRLDKVEAEVQIDRLITGRLQSLQTYVTQQLIRAAEIRASANLAATKMSECVLGQSKRVDFCGKGYHLMSFPQSAPHGVVFLHVTYVPAQEKNFTTAPAICHEGKAHFPREGVFVSNGTHWFITQRNFYEPQIITTDNTFVCGSCDVVIGIVNNTVYDPLQPELDSGGGGSDIDPYKEFGSSYQLLNFLPLDFFPDLNALVDTATALYEEELTGREHCSPHHTAIRQALVCWDELTKLIAWMSSNITSEQVRTIIVNHVNDTWGLKVRQSLWFHLSCLTFGQHTVQEFLVSFGVWIRTPAPYRPPNAPILSTLPEHTVIC

SEQ ID NO: 14122 - protein, 1295 aa, Artificial Sequence
  SARS-CoV-2/pangolin/Guangxi/P5E/2017__EPI_ISL_410541 spike protein (1-1141)(N908C_S1117C) WhcAg construct
MFVFLFVLPLVSSQCVNLTTRTGIPPGYTNSSTRGVYYPDKVFRSSILHLTQDLFLPFFSNVTWFNTITYQGGSKKFDNPVLPFNDGVYFASTEKSNIIRGWIFGTTLDARTQSLLIVNNATNVVIKVCEFQFCTDPFLGVYYHNNNKTWVENEFRVYSSANNCTFEYISQPFLMDLEGKQGNFKNLREFVFKNVDGYFKIYSKHTPIDLVRDLPRGFAALEPLVDLPIGINITRFQTLLALHRSYLTPGKLESGWTTGAAAYYVGYLQQRTFLLSYNQNGTITDAVDCSLDPLSETKCTLKSLTVEKGIYQTSNFRVQPTISIVRFPNITNLCPFGEVFNASKFASVYAWNRKRISNCVADYSVLYNSTSFSTFKCYGVSPTKLNDLCFTNVYADSFVVKGDEVRQIAPGQTGVIADYNYKLPDDFTGCVIAWNSVKQDALTGDNYGYLYRLFRKSKLKPFERDISTEIYQAGSTPCNGQVGLNCYYPLERYGFHPTTGVNYQPFRVVVLSFELLNGPATVCGPKLSTTLVKDKCVNFNFNGLTGTGVLTTSKKQFLPFQQFGRDISDTTDAVRDPQTLEILDITPCSFGGVSVITPGTNTSNQVAVLYQDVNCTEVPMAIHAEQLTPAWRVYSAGANVFQTRAGCLVGAEHVNNSYECDIPVGAGICASYHSMSSFRSVNQRSIIAYTMSLGAENSVAYSNNSIAIPTNFTISVTTEILPVSMTKTSVDCTMYICGDSIECSNLLLQYGSFCTQLNRALTGIAVEQDKNTQEVFAQVKQIYKTPPIKDFGGFNFSQILPDPSKPSKRSFIEDLLFNKVTLADAGFIKQYGDCLGDIAARDLICAQKFNGLTVLPPLLTDEMIAQYTSALLAGTITSGWTFGAGAALQIPFAMQMAYRFNGIGVTQCVLYENQKLIANQFNSAIGKIQDSLSSTASALGKLQDVVNQNAQALNTLVKQLSSNFGAISSVLNDILSRLDKVEAEVQIDRLITGRLQSLQTYVTQQLIRAAEIRASANLAATKMSECVLGQSKRVDFCGKGYHLMSFPQSAPHGVVFLHVTYVPAQEKNFTTAPAICHEGKAHFPREGVFVSNGTHWFITQRNFYEPQIITTDNTFVCGSCDVVIGIVNNTVYDPLQPELDSGGGGSDIDPYKEFGSSYQLLNFLPLDFFPDLNALVDTATALYEEELTGREHCSPHHTAIRQALVCWDELTKLIAWMSSNITSEQVRTIIVNHVNDTWGLKVRQSLWFHLSCLTFGQHTVQEFLVSFGVWIRTPAPYRPPNAPILSTLPEHTVIC

SEQ ID NO: 14123 - protein, 1293 aa, Artificial Sequence
  SARS-CoV-2/pangolin/Guangxi/P1E/2017__EPI_ISL_410539 spike protein (1-1139)(N906C_S1115C) WhcAg construct
MFVFLFVLPLVSSQCVNLTTRTGIQPGYTNSSTRGVYYPDKVFRSSILHLTQDLFLPFFSNVTWFNTINYQGGFKKFDNPVLPFNDGVYFASTEKSNIIRGWIFGTTLDARTQSLLIVNNATNVVIKVCEFQFCTDPFLGVYYHNNNKTWVENEFRVYSSANNCTFEYISQPFLMDLEGKQGNFKNLREFVFKNVDGYFKIYSKHTPIDLVRDLPRGFAALEPLVDLPIGINITRFQTLLALHRSYLTPGKLESGWTTGAAAYYVGYLQQRTFLLSYNQNGTITDAVDCSLDPLSETKCTLKSLTVEKGIYQTSNFRVQPTISIVRFPNITNLCPFGEVFNASKFASVYAWNRKRISNCVADYSVLYNSTSFSTFKCYGVSPTKLNDLCFTNVYADSFVVKGDEVRQIAPGQTGVIADYNYKLPDDFTGCVIAWNSVKQDALTGGNYLYRLFRKSKLKPFERDISTEIYQAGSTPCNGQVGLNCYYPLERYGFHPTTGVNYQPFRVVVLSFELLNGPATVCGPKLSTTLVKDKCVNFNFNGLTGTGVLTTSKKQFLPFQQFGRDISDTTDAVRDPQTLEILDITPCSFGGVSVITPGTNTSNQVAVLYQDVNCTEVPMAIHAEQLTPAWRVYSAGANVFQTRAGCLVGAEHVNNSYECDIPVGAGICASYHSMSSLRSVNQRSIIAYTMSLGAENSVAYSNNSIAIPTNFTISVTTEILPVSMTKTSVDCTMYICGDSIECSNLLLQYGSFCTQLNRALTGIAVEQDKNTQEVFAQVKQIYKTPPIKDFGGFNFSQILPDPSKPSKRSFIEDLLFNKVTLADAGFIKQYGDCLGDIAARDLICAQKFNGLTVLPPLLTDEMIAQYTSALLAGTITSGWTFGAGAALQIPFAMQMAYRFNGIGVTQCVLYENQKLIANQFNSAIGKIQDSLSSTASALGKLQDVVNQNAQALNTLVKQLSSNFGAISSVLNDILSRLDKVEAEVQIDRLITGRLQSLQTYVTQQLIRAAEIRASANLAATKMSECVLGQSKRVDFCGKGYHLMSFPQSAPHGVVFLHVTYVPAQEKNFTTAPAICHEGKAHFPREGVFVSNGTHWFITQRNFYEPQIITTDNTFVCGSCDVVIGIVNNTVYDPLQPELDSGGGGSDIDPYKEFGSSYQLLNFLPLDFFPDLNALVDTATALYEEELTGREHCSPHHTAIRQALVCWDELTKLIAWMSSNITSEQVRTIIVNHVNDTWGLKVRQSLWFHLSCLTFGQHTVQEFLVSFGVWIRTPAPYRPPNAPILSTLPEHTVIC

SEQ ID NO: 14124 - RNA, 3822 nt, Artificial Sequence
  SARS-CoV-2/Wuhan/WIV05/2019__EPI_ISL_402128 spike protein CDS gc (1-1273)(N914C_S1123C)
auguucguguuccugguccuccugccccuggugagcucccagugcgugaaccucaccacccgcacgcagcugccgcccgccuacaccaacagcuucacccggggcgucuacuaccccgacaagguguuccgcuccagcgugcugcacuccacccaggaccucuuccugcccuucuucagcaacgucacgugguuccacgccauccacguguccgggaccaacggcaccaagcgguucgacaacccggugcugcccuucaacgacggggucuacuucgcgagcaccgagaaguccaacaucauccgcggcuggaucuucgggacgacccucgacagcaagacccagucccugcugaucgugaacaacgccaccaacguggucaucaaggugugcgaguuccaguucugcaacgaccccuuccucggcguguacuaccacaagaacaacaagagcuggauggaguccgaguuccgggucuacagcuccgccaacaacugcacguucgaguacgugagccagcccuuccugauggaccuggagggcaagcaggggaacuucaagaaccuccgcgaguucguguucaagaacaucgacggcuacuucaagaucuacuccaagcacaccccgaucaaccugguccgggaccugccccagggguucagcgcccucgagccccugguggaccugcccaucggcaucaacaucacccgcuuccagacccuccuggcccugcaccgguccuaccucacgccgggggacagcagcuccggcuggaccgcgggcgccgccgccuacuacgugggguaccugcagccccgcaccuuccugcucaaguacaacgagaacggcaccaucacggacgcggucgacugcgcccuggacccccugagcgagaccaagugcacccucaaguccuucaccguggagaaggggaucuaccagacgagcaacuuccgggugcagcccaccgaguccaucguccgcuucccgaacaucaccaaccugugccccuucggcgagguguucaacgccacccgguucgccagcgucuacgccuggaaccgcaagcggaucuccaacugcguggcggacuacagcgugcuguacaacuccgccagcuucuccacguucaagugcuacggcgucagccccaccaagcucaacgaccugugcuucaccaacguguacgccgacuccuucgugauccgcggggacgagguccggcagaucgcccccggccagaccgggaagaucgccgacuacaacuacaagcugccggacgacuucacgggcugcgugaucgcguggaacagcaacaaccucgacuccaaggucgggggcaacuacaacuaccuguaccgccuguuccgcaagagcaaccucaagcccuucgagcgggacaucuccaccgagaucuaccaggccggcagcacccccugcaacgggguggagggcuucaacugcuacuucccccugcaguccuacggguuccagccgaccaacggcgugggguaccagcccuaccggguggucgugcugagcuucgagcuccugcacgcccccgccacggugugcggccccaagaaguccaccaaccuggucaagaacaagugcgugaacuucaacuucaacggccucaccgggaccggcgugcugaccgagagcaacaagaaguuccugccguuccagcaguucgggcgcgacaucgccgacacgaccgacgcgguccgcgacccccagacccuggagauccucgacaucacccccugcagcuucggcgggguguccgugaucacgccgggcaccaacaccagcaaccaggucgccgugcuguaccaggacgugaacugcaccgagguccccguggccauccacgccgaccagcugacgcccaccuggcggguguacuccaccggcagcaacgucuuccagacccgcgccgggugccucaucggcgcggagcacgugaacaacuccuacgagugcgacauccccaucggggccggcaucugcgccagcuaccagacgcagaccaacuccccgcggcgcgcccggagcguggcgucccagagcaucaucgccuacaccaugucccugggcgccgagaacagcgucgccuacuccaacaacagcaucgccauccccaccaacuucacgaucuccgugaccaccgagauccugcccgugagcaugaccaagacgagcgucgacugcaccauguacaucugcggggacuccaccgagugcagcaaccuccugcugcaguacggcuccuucugcacccagcucaaccgcgcgcugacggggaucgccguggagcaggacaagaacacccaggagguguucgcccaggucaagcagaucuacaagacgcccccgaucaaggacuucggcggguucaacuucagccagauccugcccgaccccuccaagcccagcaagcgguccuucaucgaggaccuccuguucaacaaggugacccuggccgacgccggcuucaucaagcaguacggcgacugccucggggacaucgcggcccgcgaccugaucugcgcccagaaguucaacggccugaccgugcucccgccccugcugaccgacgagaugaucgcccaguacaccagcgcccuccuggcggggaccaucacguccggcuggaccuucggggccggcgccgcccugcagauccccuucgcgaugcagauggccuaccgguucaacggcaucggggucacccagugcgugcucuacgagaaccagaagcugaucgccaaccaguucaacagcgccaucggcaagauccaggacucccugagcuccaccgccagcgcgcucgggaagcugcaggacguggucaaccagaacgcccaggcccugaacacgcucgugaagcagcuguccagcaacuucggcgccaucuccagcgugcugaacgacauccucucccgccuggacaaggucgaggccgaggugcagaucgaccggcugaucaccgggcgccuccagagccugcagaccuacgugacccagcagcugauccgggcggccgagauccgcgccagcgccaaccucgccgcgaccaagauguccgagugcguccugggccagagcaagcggguggacuucugcggcaagggguaccaccugauguccuucccccagagcgccccgcacggcguggucuuccuccacgugacguacguccccgcccaggagaagaacuucaccaccgcccccgcgaucugccacgacgggaaggcccacuucccccgcgagggcguguucguguccaacgggacccacugguucgucacgcagcggaacuucuacgagccgcagaucaucaccaccgacaacaccuucgugugcggcaacugcgacguggucaucggcaucgugaacaacacgguguacgacccccugcagcccgagcuggacuccuucaaggaggagcucgacaaguacuucaagaaccacaccagccccgacgucgaccugggggacaucuccggcaucaacgccagcguggugaacauccagaaggagaucgaccgccugaacgaggucgccaagaaccucaacgagucccugaucgaccugcaggagcucgggaaguacgagcaguacaucaaguggccgugguacaucuggcugggcuucaucgccggccugaucgcgaucgugauggugaccaucaugcucugcugcaugaccagcugcugcuccugccugaaggggugcugcagcugcggcuccugcugcaaguucgacgaggacgacagcgagcccguccugaagggggugaagcuccacuacacguga

SEQ ID NO: 14125 - RNA, 4116 nt, Artificial Sequence
  SARS-CoV-2/Wuhan/WIV05/2019__EPI_ISL_402128 spike protein CDS gc (1-1211)(N914C_S1123C) LumSynth construct
auguucguguuccugguccuccugccccuggugagcucccagugcgugaaccucaccacccgcacgcagcugccgcccgccuacaccaacagcuucacccggggcgucuacuaccccgacaagguguuccgcuccagcgugcugcacuccacccaggaccucuuccugcccuucuucagcaacgucacgugguuccacgccauccacguguccgggaccaacggcaccaagcgguucgacaacccggugcugcccuucaacgacggggucuacuucgcgagcaccgagaaguccaacaucauccgcggcuggaucuucgggacgacccucgacagcaagacccagucccugcugaucgugaacaacgccaccaacguggucaucaaggugugcgaguuccaguucugcaacgaccccuuccucggcguguacuaccacaagaacaacaagagcuggauggaguccgaguuccgggucuacagcuccgccaacaacugcacguucgaguacgugagccagcccuuccugauggaccuggagggcaagcaggggaacuucaagaaccuccgcgaguucguguucaagaacaucgacggcuacuucaagaucuacuccaagcacaccccgaucaaccugguccgggaccugccccagggguucagcgcccucgagccccugguggaccugcccaucggcaucaacaucacccgcuuccagacccuccuggcccugcaccgguccuaccucacgccgggggacagcagcuccggcuggaccgcgggcgccgccgccuacuacgugggguaccugcagccccgcaccuuccugcucaaguacaacgagaacggcaccaucacggacgcggucgacugcgcccuggacccccugagcgagaccaagugcacccucaaguccuucaccguggagaaggggaucuaccagacgagcaacuuccgggugcagcccaccgaguccaucguccgcuucccgaacaucaccaaccugugccccuucggcgagguguucaacgccacccgguucgccagcgucuacgccuggaaccgcaagcggaucuccaacugcguggcggacuacagcgugcuguacaacuccgccagcuucuccacguucaagugcuacggcgucagccccaccaagcucaacgaccugugcuucaccaacguguacgccgacuccuucgugauccgcggggacgagguccggcagaucgcccccggccagaccgggaagaucgccgacuacaacuacaagcugccggacgacuucacgggcugcgugaucgcguggaacagcaacaaccucgacuccaaggucgggggcaacuacaacuaccuguaccgccuguuccgcaagagcaaccucaagcccuucgagcgggacaucuccaccgagaucuaccaggccggcagcacccccugcaacgggguggagggcuucaacugcuacuucccccugcaguccuacggguuccagccgaccaacggcgugggguaccagcccuaccggguggucgugcugagcuucgagcuccugcacgcccccgccacggugugcggccccaagaaguccaccaaccuggucaagaacaagugcgugaacuucaacuucaacggccucaccgggaccggcgugcugaccgagagcaacaagaaguuccugccguuccagcaguucgggcgcgacaucgccgacacgaccgacgcgguccgcgacccccagacccuggagauccucgacaucacccccugcagcuucggcgggguguccgugaucacgccgggcaccaacaccagcaaccaggucgccgugcuguaccaggacgugaacugcaccgagguccccguggccauccacgccgaccagcugacgcccaccuggcggguguacuccaccggcagcaacgucuuccagacccgcgccgggugccucaucggcgcggagcacgugaacaacuccuacgagugcgacauccccaucggggccggcaucugcgccagcuaccagacgcagaccaacuccccgcggcgcgcccggagcguggcgucccagagcaucaucgccuacaccaugucccugggcgccgagaacagcgucgccuacuccaacaacagcaucgccauccccaccaacuucacgaucuccgugaccaccgagauccugcccgugagcaugaccaagacgagcgucgacugcaccauguacaucugcggggacuccaccgagugcagcaaccuccugcugcaguacggcuccuucugcacccagcucaaccgcgcgcugacggggaucgccguggagcaggacaagaacacccaggagguguucgcccaggucaagcagaucuacaagacgcccccgaucaaggacuucggcggguucaacuucagccagauccugcccgaccccuccaagcccagcaagcgguccuucaucgaggaccuccuguucaacaaggugacccuggccgacgccggcuucaucaagcaguacggcgacugccucggggacaucgcggcccgcgaccugaucugcgcccagaaguucaacggccugaccgugcucccgccccugcugaccgacgagaugaucgcccaguacaccagcgcccuccuggcggggaccaucacguccggcuggaccuucggggccggcgccgcccugcagauccccuucgcgaugcagauggccuaccgguucaacggcaucggggucacccagugcgugcucuacgagaaccagaagcugaucgccaaccaguucaacagcgccaucggcaagauccaggacucccugagcuccaccgccagcgcgcucgggaagcugcaggacguggucaaccagaacgcccaggcccugaacacgcucgugaagcagcuguccagcaacuucggcgccaucuccagcgugcugaacgacauccucucccgccuggacaaggucgaggccgaggugcagaucgaccggcugaucaccgggcgccuccagagccugcagaccuacgugacccagcagcugauccgggcggccgagauccgcgccagcgccaaccucgccgcgaccaagauguccgagugcguccugggccagagcaagcggguggacuucugcggcaagggguaccaccugauguccuucccccagagcgccccgcacggcguggucuuccuccacgugacguacguccccgcccaggagaagaacuucaccaccgcccccgcgaucugccacgacgggaaggcccacuucccccgcgagggcguguucguguccaacgggacccacugguucgucacgcagcggaacuucuacgagccgcagaucaucaccaccgacaacaccuucgugugcggcaacugcgacguggucaucggcaucgugaacaacacgguguacgacccccugcagcccgagcuggacuccuucaaggaggagcucgacaaguacuucaagaaccacaccagccccgacgucgaccugggggacaucuccggcaucaacgccagcguggugaacauccagaaggagaucgaccgccugaacgaggucgccaagaaccucaacgagucccugaucgaccugcaggagcucgggaaguacgagcaguacaucaagggcggcgggagcgggggcgggcagaucuacgagggcaagcugaccgccgaggggcuccgcuucggcaucguggccagccgguucaaccacgcgcuggucgaccgccugguggagggggccaucgacgccaucgugcggcacggcgggcgcgaggaggacaucacccucguccgggugcccggcuccugggagaucccgguggccgccggcgagcuggcccgcaaggaggacaucgacgcggucaucgccaucggggugcugauccggggcgccacgccccacuucgacuacaucgccagcgagguguccaaggggcucgcggaccugagccuggagcuccgcaagcccaucaccuucggcgucaucaccgccgacacccuggagcaggccaucgagcgggccgggacgaagcacggcaacaagggcugggaggccgcgcuguccgccaucgagauggccaaccucuucaagagccugcgcuga

SEQ ID NO: 14126 - RNA, 4140 nt, Artificial Sequence
  SARS-CoV-2/Wuhan/WIV05/2019__EPI_ISL_402128 spike protein CDS gc (1-1211)(N914C_S1123C) Ferritin construct
auguucguguuccugguccuccugccccuggugagcucccagugcgugaaccucaccacccgcacgcagcugccgcccgccuacaccaacagcuucacccggggcgucuacuaccccgacaagguguuccgcuccagcgugcugcacuccacccaggaccucuuccugcccuucuucagcaacgucacgugguuccacgccauccacguguccgggaccaacggcaccaagcgguucgacaacccggugcugcccuucaacgacggggucuacuucgcgagcaccgagaaguccaacaucauccgcggcuggaucuucgggacgacccucgacagcaagacccagucccugcugaucgugaacaacgccaccaacguggucaucaaggugugcgaguuccaguucugcaacgaccccuuccucggcguguacuaccacaagaacaacaagagcuggauggaguccgaguuccgggucuacagcuccgccaacaacugcacguucgaguacgugagccagcccuuccugauggaccuggagggcaagcaggggaacuucaagaaccuccgcgaguucguguucaagaacaucgacggcuacuucaagaucuacuccaagcacaccccgaucaaccugguccgggaccugccccagggguucagcgcccucgagccccugguggaccugcccaucggcaucaacaucacccgcuuccagacccuccuggcccugcaccgguccuaccucacgccgggggacagcagcuccggcuggaccgcgggcgccgccgccuacuacgugggguaccugcagccccgcaccuuccugcucaaguacaacgagaacggcaccaucacggacgcggucgacugcgcccuggacccccugagcgagaccaagugcacccucaaguccuucaccguggagaaggggaucuaccagacgagcaacuuccgggugcagcccaccgaguccaucguccgcuucccgaacaucaccaaccugugccccuucggcgagguguucaacgccacccgguucgccagcgucuacgccuggaaccgcaagcggaucuccaacugcguggcggacuacagcgugcuguacaacuccgccagcuucuccacguucaagugcuacggcgucagccccaccaagcucaacgaccugugcuucaccaacguguacgccgacuccuucgugauccgcggggacgagguccggcagaucgcccccggccagaccgggaagaucgccgacuacaacuacaagcugccggacgacuucacgggcugcgugaucgcguggaacagcaacaaccucgacuccaaggucgggggcaacuacaacuaccuguaccgccuguuccgcaagagcaaccucaagcccuucgagcgggacaucuccaccgagaucuaccaggccggcagcacccccugcaacgggguggagggcuucaacugcuacuucccccugcaguccuacggguuccagccgaccaacggcgugggguaccagcccuaccggguggucgugcugagcuucgagcuccugcacgcccccgccacggugugcggccccaagaaguccaccaaccuggucaagaacaagugcgugaacuucaacuucaacggccucaccgggaccggcgugcugaccgagagcaacaagaaguuccugccguuccagcaguucgggcgcgacaucgccgacacgaccgacgcgguccgcgacccccagacccuggagauccucgacaucacccccugcagcuucggcgggguguccgugaucacgccgggcaccaacaccagcaaccaggucgccgugcuguaccaggacgugaacugcaccgagguccccguggccauccacgccgaccagcugacgcccaccuggcggguguacuccaccggcagcaacgucuuccagacccgcgccgggugccucaucggcgcggagcacgugaacaacuccuacgagugcgacauccccaucggggccggcaucugcgccagcuaccagacgcagaccaacuccccgcggcgcgcccggagcguggcgucccagagcaucaucgccuacaccaugucccugggcgccgagaacagcgucgccuacuccaacaacagcaucgccauccccaccaacuucacgaucuccgugaccaccgagauccugcccgugagcaugaccaagacgagcgucgacugcaccauguacaucugcggggacuccaccgagugcagcaaccuccugcugcaguacggcuccuucugcacccagcucaaccgcgcgcugacggggaucgccguggagcaggacaagaacacccaggagguguucgcccaggucaagcagaucuacaagacgcccccgaucaaggacuucggcggguucaacuucagccagauccugcccgaccccuccaagcccagcaagcgguccuucaucgaggaccuccuguucaacaaggugacccuggccgacgccggcuucaucaagcaguacggcgacugccucggggacaucgcggcccgcgaccugaucugcgcccagaaguucaacggccugaccgugcucccgccccugcugaccgacgagaugaucgcccaguacaccagcgcccuccuggcggggaccaucacguccggcuggaccuucggggccggcgccgcccugcagauccccuucgcgaugcagauggccuaccgguucaacggcaucggggucacccagugcgugcucuacgagaaccagaagcugaucgccaaccaguucaacagcgccaucggcaagauccaggacucccugagcuccaccgccagcgcgcucgggaagcugcaggacguggucaaccagaacgcccaggcccugaacacgcucgugaagcagcuguccagcaacuucggcgccaucuccagcgugcugaacgacauccucucccgccuggacaaggucgaggccgaggugcagaucgaccggcugaucaccgggcgccuccagagccugcagaccuacgugacccagcagcugauccgggcggccgagauccgcgccagcgccaaccucgccgcgaccaagauguccgagugcguccugggccagagcaagcggguggacuucugcggcaagggguaccaccugauguccuucccccagagcgccccgcacggcguggucuuccuccacgugacguacguccccgcccaggagaagaacuucaccaccgcccccgcgaucugccacgacgggaaggcccacuucccccgcgagggcguguucguguccaacgggacccacugguucgucacgcagcggaacuucuacgagccgcagaucaucaccaccgacaacaccuucgugugcggcaacugcgacguggucaucggcaucgugaacaacacgguguacgacccccugcagcccgagcuggacuccuucaaggaggagcucgacaaguacuucaagaaccacaccagccccgacgucgaccugggggacaucuccggcaucaacgccagcguggugaacauccagaaggagaucgaccgccugaacgaggucgccaagaaccucaacgagucccugaucgaccugcaggagcucgggaaguacgagcaguacaucaagggcgggggcgggagcgacaucaucaagcuccugaacgagcaggucaacaaggagaugcaguccagcaaccuguacauguccaugagcuccuggugcuacacccacagccucgacggcgccgggcuguuccuguucgaccacgccgcggaggaguacgagcacgccaagaagcucaucaucuuccugaacgagaacaacgugcccgugcagcugaccuccaucagcgccccggagcacaaguucgagggccucacgcagaucuuccagaaggccuacgagcacgagcagcacaucuccgagagcaucaacaacaucguggaccacgccaucaaguccaaggaccacgcgaccuucaacuuccugcagugguacgucgccgagcagcacgaggaggaggugcuguucaaggacauccucgacaagaucgagcugaucgggaacgagaaccacggccuguaccucgccgaccaguacgugaaggggaucgccaagagccgcaaguccuga

SEQ ID NO: 14127 - RNA, 3726 nt, Artificial Sequence
  SARS-CoV-2/Wuhan/WIV05/2019__EPI_ISL_402128 spike protein CDS gc (1-1211)(N914C_S1123C) Foldon construct
auguucguguuccugguccuccugccccuggugagcucccagugcgugaaccucaccacccgcacgcagcugccgcccgccuacaccaacagcuucacccggggcgucuacuaccccgacaagguguuccgcuccagcgugcugcacuccacccaggaccucuuccugcccuucuucagcaacgucacgugguuccacgccauccacguguccgggaccaacggcaccaagcgguucgacaacccggugcugcccuucaacgacggggucuacuucgcgagcaccgagaaguccaacaucauccgcggcuggaucuucgggacgacccucgacagcaagacccagucccugcugaucgugaacaacgccaccaacguggucaucaaggugugcgaguuccaguucugcaacgaccccuuccucggcguguacuaccacaagaacaacaagagcuggauggaguccgaguuccgggucuacagcuccgccaacaacugcacguucgaguacgugagccagcccuuccugauggaccuggagggcaagcaggggaacuucaagaaccuccgcgaguucguguucaagaacaucgacggcuacuucaagaucuacuccaagcacaccccgaucaaccugguccgggaccugccccagggguucagcgcccucgagccccugguggaccugcccaucggcaucaacaucacccgcuuccagacccuccuggcccugcaccgguccuaccucacgccgggggacagcagcuccggcuggaccgcgggcgccgccgccuacuacgugggguaccugcagccccgcaccuuccugcucaaguacaacgagaacggcaccaucacggacgcggucgacugcgcccuggacccccugagcgagaccaagugcacccucaaguccuucaccguggagaaggggaucuaccagacgagcaacuuccgggugcagcccaccgaguccaucguccgcuucccgaacaucaccaaccugugccccuucggcgagguguucaacgccacccgguucgccagcgucuacgccuggaaccgcaagcggaucuccaacugcguggcggacuacagcgugcuguacaacuccgccagcuucuccacguucaagugcuacggcgucagccccaccaagcucaacgaccugugcuucaccaacguguacgccgacuccuucgugauccgcggggacgagguccggcagaucgcccccggccagaccgggaagaucgccgacuacaacuacaagcugccggacgacuucacgggcugcgugaucgcguggaacagcaacaaccucgacuccaaggucgggggcaacuacaacuaccuguaccgccuguuccgcaagagcaaccucaagcccuucgagcgggacaucuccaccgagaucuaccaggccggcagcacccccugcaacgggguggagggcuucaacugcuacuucccccugcaguccuacggguuccagccgaccaacggcgugggguaccagcccuaccggguggucgugcugagcuucgagcuccugcacgcccccgccacggugugcggccccaagaaguccaccaaccuggucaagaacaagugcgugaacuucaacuucaacggccucaccgggaccggcgugcugaccgagagcaacaagaaguuccugccguuccagcaguucgggcgcgacaucgccgacacgaccgacgcgguccgcgacccccagacccuggagauccucgacaucacccccugcagcuucggcgggguguccgugaucacgccgggcaccaacaccagcaaccaggucgccgugcuguaccaggacgugaacugcaccgagguccccguggccauccacgccgaccagcugacgcccaccuggcggguguacuccaccggcagcaacgucuuccagacccgcgccgggugccucaucggcgcggagcacgugaacaacuccuacgagugcgacauccccaucggggccggcaucugcgccagcuaccagacgcagaccaacuccccgcggcgcgcccggagcguggcgucccagagcaucaucgccuacaccaugucccugggcgccgagaacagcgucgccuacuccaacaacagcaucgccauccccaccaacuucacgaucuccgugaccaccgagauccugcccgugagcaugaccaagacgagcgucgacugcaccauguacaucugcggggacuccaccgagugcagcaaccuccugcugcaguacggcuccuucugcacccagcucaaccgcgcgcugacggggaucgccguggagcaggacaagaacacccaggagguguucgcccaggucaagcagaucuacaagacgcccccgaucaaggacuucggcggguucaacuucagccagauccugcccgaccccuccaagcccagcaagcgguccuucaucgaggaccuccuguucaacaaggugacccuggccgacgccggcuucaucaagcaguacggcgacugccucggggacaucgcggcccgcgaccugaucugcgcccagaaguucaacggccugaccgugcucccgccccugcugaccgacgagaugaucgcccaguacaccagcgcccuccuggcggggaccaucacguccggcuggaccuucggggccggcgccgcccugcagauccccuucgcgaugcagauggccuaccgguucaacggcaucggggucacccagugcgugcucuacgagaaccagaagcugaucgccaaccaguucaacagcgccaucggcaagauccaggacucccugagcuccaccgccagcgcgcucgggaagcugcaggacguggucaaccagaacgcccaggcccugaacacgcucgugaagcagcuguccagcaacuucggcgccaucuccagcgugcugaacgacauccucucccgccuggacaaggucgaggccgaggugcagaucgaccggcugaucaccgggcgccuccagagccugcagaccuacgugacccagcagcugauccgggcggccgagauccgcgccagcgccaaccucgccgcgaccaagauguccgagugcguccugggccagagcaagcggguggacuucugcggcaagggguaccaccugauguccuucccccagagcgccccgcacggcguggucuuccuccacgugacguacguccccgcccaggagaagaacuucaccaccgcccccgcgaucugccacgacgggaaggcccacuucccccgcgagggcguguucguguccaacgggacccacugguucgucacgcagcggaacuucuacgagccgcagaucaucaccaccgacaacaccuucgugugcggcaacugcgacguggucaucggcaucgugaacaacacgguguacgacccccugcagcccgagcuggacuccuucaaggaggagcucgacaaguacuucaagaaccacaccagccccgacgucgaccugggggacaucuccggcaucaacgccagcguggugaacauccagaaggagaucgaccgccugaacgaggucgccaagaaccucaacgagucccugaucgaccugcaggagcucgggaaguacgagcaguacaucaagggcgggagcggcuacauccccgaggccccgcgcgacgggcaggccuacgugcggaaggacggcgaguggguccugcucagcaccuuccuguga

SEQ ID NO: 14128 - RNA, 4098 nt, Artificial Sequence
  SARS-CoV-2/Wuhan/WIV05/2019__EPI_ISL_402128 spike protein CDS gc (1-1211)(N914C_S1123C) WhcAg construct
auguucguguuccugguccuccugccccuggugagcucccagugcgugaaccucaccacccgcacgcagcugccgcccgccuacaccaacagcuucacccggggcgucuacuaccccgacaagguguuccgcuccagcgugcugcacuccacccaggaccucuuccugcccuucuucagcaacgucacgugguuccacgccauccacguguccgggaccaacggcaccaagcgguucgacaacccggugcugcccuucaacgacggggucuacuucgcgagcaccgagaaguccaacaucauccgcggcuggaucuucgggacgacccucgacagcaagacccagucccugcugaucgugaacaacgccaccaacguggucaucaaggugugcgaguuccaguucugcaacgaccccuuccucggcguguacuaccacaagaacaacaagagcuggauggaguccgaguuccgggucuacagcuccgccaacaacugcacguucgaguacgugagccagcccuuccugauggaccuggagggcaagcaggggaacuucaagaaccuccgcgaguucguguucaagaacaucgacggcuacuucaagaucuacuccaagcacaccccgaucaaccugguccgggaccugccccagggguucagcgcccucgagccccugguggaccugcccaucggcaucaacaucacccgcuuccagacccuccuggcccugcaccgguccuaccucacgccgggggacagcagcuccggcuggaccgcgggcgccgccgccuacuacgugggguaccugcagccccgcaccuuccugcucaaguacaacgagaacggcaccaucacggacgcggucgacugcgcccuggacccccugagcgagaccaagugcacccucaaguccuucaccguggagaaggggaucuaccagacgagcaacuuccgggugcagcccaccgaguccaucguccgcuucccgaacaucaccaaccugugccccuucggcgagguguucaacgccacccgguucgccagcgucuacgccuggaaccgcaagcggaucuccaacugcguggcggacuacagcgugcuguacaacuccgccagcuucuccacguucaagugcuacggcgucagccccaccaagcucaacgaccugugcuucaccaacguguacgccgacuccuucgugauccgcggggacgagguccggcagaucgcccccggccagaccgggaagaucgccgacuacaacuacaagcugccggacgacuucacgggcugcgugaucgcguggaacagcaacaaccucgacuccaaggucgggggcaacuacaacuaccuguaccgccuguuccgcaagagcaaccucaagcccuucgagcgggacaucuccaccgagaucuaccaggccggcagcacccccugcaacgggguggagggcuucaacugcuacuucccccugcaguccuacggguuccagccgaccaacggcgugggguaccagcccuaccggguggucgugcugagcuucgagcuccugcacgcccccgccacggugugcggccccaagaaguccaccaaccuggucaagaacaagugcgugaacuucaacuucaacggccucaccgggaccggcgugcugaccgagagcaacaagaaguuccugccguuccagcaguucgggcgcgacaucgccgacacgaccgacgcgguccgcgacccccagacccuggagauccucgacaucacccccugcagcuucggcgggguguccgugaucacgccgggcaccaacaccagcaaccaggucgccgugcuguaccaggacgugaacugcaccgagguccccguggccauccacgccgaccagcugacgcccaccuggcggguguacuccaccggcagcaacgucuuccagacccgcgccgggugccucaucggcgcggagcacgugaacaacuccuacgagugcgacauccccaucggggccggcaucugcgccagcuaccagacgcagaccaacuccccgcggcgcgcccggagcguggcgucccagagcaucaucgccuacaccaugucccugggcgccgagaacagcgucgccuacuccaacaacagcaucgccauccccaccaacuucacgaucuccgugaccaccgagauccugcccgugagcaugaccaagacgagcgucgacugcaccauguacaucugcggggacuccaccgagugcagcaaccuccugcugcaguacggcuccuucugcacccagcucaaccgcgcgcugacggggaucgccguggagcaggacaagaacacccaggagguguucgcccaggucaagcagaucuacaagacgcccccgaucaaggacuucggcggguucaacuucagccagauccugcccgaccccuccaagcccagcaagcgguccuucaucgaggaccuccuguucaacaaggugacccuggccgacgccggcuucaucaagcaguacggcgacugccucggggacaucgcggcccgcgaccugaucugcgcccagaaguucaacggccugaccgugcucccgccccugcugaccgacgagaugaucgcccaguacaccagcgcccuccuggcggggaccaucacguccggcuggaccuucggggccggcgccgcccugcagauccccuucgcgaugcagauggccuaccgguucaacggcaucggggucacccagugcgugcucuacgagaaccagaagcugaucgccaaccaguucaacagcgccaucggcaagauccaggacucccugagcuccaccgccagcgcgcucgggaagcugcaggacguggucaaccagaacgcccaggcccugaacacgcucgugaagcagcuguccagcaacuucggcgccaucuccagcgugcugaacgacauccucucccgccuggacaaggucgaggccgaggugcagaucgaccggcugaucaccgggcgccuccagagccugcagaccuacgugacccagcagcugauccgggcggccgagauccgcgccagcgccaaccucgccgcgaccaagauguccgagugcguccugggccagagcaagcggguggacuucugcggcaagggguaccaccugauguccuucccccagagcgccccgcacggcguggucuuccuccacgugacguacguccccgcccaggagaagaacuucaccaccgcccccgcgaucugccacgacgggaaggcccacuucccccgcgagggcguguucguguccaacgggacccacugguucgucacgcagcggaacuucuacgagccgcagaucaucaccaccgacaacaccuucgugugcggcaacugcgacguggucaucggcaucgugaacaacacgguguacgacccccugcagcccgagcuggacuccuucaaggaggagcucgacaaguacuucaagaaccacaccagccccgacgucgaccugggggacaucuccggcaucaacgccagcguggugaacauccagaaggagaucgaccgccugaacgaggucgccaagaaccucaacgagucccugaucgaccugcaggagcucgggaaguacgagcaguacaucaagggcgggggcgggagcgacaucgaccccuacaaggaguucggcagcuccuaccagcugcucaacuuccugccccuggacuucuuccccgaccucaacgcccugguggacaccgccaccgcgcuguacgaggaggagcucacggggcgcgagcacugcagcccccaccacaccgccauccggcaggcccuggucugcugggacgagcugaccaagcucaucgccuggauguccagcaacaucaccuccgagcagguccgcacgaucaucgugaaccacgucaacgacaccuggggccugaaggugcggcagagccugugguuccaccucuccugccugaccuucgggcagcacaccgugcaggaguuccuggucagcuucggcguguggauccgcacgcccgccccguaccggccgcccaacgcgccgauccucuccacccugccggagcacaccgugaucugcuga

SEQ ID NO: 14129 - RNA, 3924 nt, Artificial Sequence
  SARS-CoV-2/Wuhan/WIV05/2019__EPI_ISL_402128 spike protein CDS gc (1-1147)(N914C_S1123C) LumSynth construct
auguucguguuccugguccuccugccccuggugagcucccagugcgugaaccucaccacccgcacgcagcugccgcccgccuacaccaacagcuucacccggggcgucuacuaccccgacaagguguuccgcuccagcgugcugcacuccacccaggaccucuuccugcccuucuucagcaacgucacgugguuccacgccauccacguguccgggaccaacggcaccaagcgguucgacaacccggugcugcccuucaacgacggggucuacuucgcgagcaccgagaaguccaacaucauccgcggcuggaucuucgggacgacccucgacagcaagacccagucccugcugaucgugaacaacgccaccaacguggucaucaaggugugcgaguuccaguucugcaacgaccccuuccucggcguguacuaccacaagaacaacaagagcuggauggaguccgaguuccgggucuacagcuccgccaacaacugcacguucgaguacgugagccagcccuuccugauggaccuggagggcaagcaggggaacuucaagaaccuccgcgaguucguguucaagaacaucgacggcuacuucaagaucuacuccaagcacaccccgaucaaccugguccgggaccugccccagggguucagcgcccucgagccccugguggaccugcccaucggcaucaacaucacccgcuuccagacccuccuggcccugcaccgguccuaccucacgccgggggacagcagcuccggcuggaccgcgggcgccgccgccuacuacgugggguaccugcagccccgcaccuuccugcucaaguacaacgagaacggcaccaucacggacgcggucgacugcgcccuggacccccugagcgagaccaagugcacccucaaguccuucaccguggagaaggggaucuaccagacgagcaacuuccgggugcagcccaccgaguccaucguccgcuucccgaacaucaccaaccugugccccuucggcgagguguucaacgccacccgguucgccagcgucuacgccuggaaccgcaagcggaucuccaacugcguggcggacuacagcgugcuguacaacuccgccagcuucuccacguucaagugcuacggcgucagccccaccaagcucaacgaccugugcuucaccaacguguacgccgacuccuucgugauccgcggggacgagguccggcagaucgcccccggccagaccgggaagaucgccgacuacaacuacaagcugccggacgacuucacgggcugcgugaucgcguggaacagcaacaaccucgacuccaaggucgggggcaacuacaacuaccuguaccgccuguuccgcaagagcaaccucaagcccuucgagcgggacaucuccaccgagaucuaccaggccggcagcacccccugcaacgggguggagggcuucaacugcuacuucccccugcaguccuacggguuccagccgaccaacggcgugggguaccagcccuaccggguggucgugcugagcuucgagcuccugcacgcccccgccacggugugcggccccaagaaguccaccaaccuggucaagaacaagugcgugaacuucaacuucaacggccucaccgggaccggcgugcugaccgagagcaacaagaaguuccugccguuccagcaguucgggcgcgacaucgccgacacgaccgacgcgguccgcgacccccagacccuggagauccucgacaucacccccugcagcuucggcgggguguccgugaucacgccgggcaccaacaccagcaaccaggucgccgugcuguaccaggacgugaacugcaccgagguccccguggccauccacgccgaccagcugacgcccaccuggcggguguacuccaccggcagcaacgucuuccagacccgcgccgggugccucaucggcgcggagcacgugaacaacuccuacgagugcgacauccccaucggggccggcaucugcgccagcuaccagacgcagaccaacuccccgcggcgcgcccggagcguggcgucccagagcaucaucgccuacaccaugucccugggcgccgagaacagcgucgccuacuccaacaacagcaucgccauccccaccaacuucacgaucuccgugaccaccgagauccugcccgugagcaugaccaagacgagcgucgacugcaccauguacaucugcggggacuccaccgagugcagcaaccuccugcugcaguacggcuccuucugcacccagcucaaccgcgcgcugacggggaucgccguggagcaggacaagaacacccaggagguguucgcccaggucaagcagaucuacaagacgcccccgaucaaggacuucggcggguucaacuucagccagauccugcccgaccccuccaagcccagcaagcgguccuucaucgaggaccuccuguucaacaaggugacccuggccgacgccggcuucaucaagcaguacggcgacugccucggggacaucgcggcccgcgaccugaucugcgcccagaaguucaacggccugaccgugcucccgccccugcugaccgacgagaugaucgcccaguacaccagcgcccuccuggcggggaccaucacguccggcuggaccuucggggccggcgccgcccugcagauccccuucgcgaugcagauggccuaccgguucaacggcaucggggucacccagugcgugcucuacgagaaccagaagcugaucgccaaccaguucaacagcgccaucggcaagauccaggacucccugagcuccaccgccagcgcgcucgggaagcugcaggacguggucaaccagaacgcccaggcccugaacacgcucgugaagcagcuguccagcaacuucggcgccaucuccagcgugcugaacgacauccucucccgccuggacaaggucgaggccgaggugcagaucgaccggcugaucaccgggcgccuccagagccugcagaccuacgugacccagcagcugauccgggcggccgagauccgcgccagcgccaaccucgccgcgaccaagauguccgagugcguccugggccagagcaagcggguggacuucugcggcaagggguaccaccugauguccuucccccagagcgccccgcacggcguggucuuccuccacgugacguacguccccgcccaggagaagaacuucaccaccgcccccgcgaucugccacgacgggaaggcccacuucccccgcgagggcguguucguguccaacgggacccacugguucgucacgcagcggaacuucuacgagccgcagaucaucaccaccgacaacaccuucgugugcggcaacugcgacguggucaucggcaucgugaacaacacgguguacgacccccugcagcccgagcuggacuccggcggcgggagcgggggcgggcagaucuacgagggcaagcugaccgccgaggggcuccgcuucggcaucguggccagccgguucaaccacgcgcuggucgaccgccugguggagggggccaucgacgccaucgugcggcacggcgggcgcgaggaggacaucacccucguccgggugcccggcuccugggagaucccgguggccgccggcgagcuggcccgcaaggaggacaucgacgcggucaucgccaucggggugcugauccggggcgccacgccccacuucgacuacaucgccagcgagguguccaaggggcucgcggaccugagccuggagcuccgcaagcccaucaccuucggcgucaucaccgccgacacccuggagcaggccaucgagcgggccgggacgaagcacggcaacaagggcugggaggccgcgcuguccgccaucgagauggccaaccucuucaagagccugcgcuga

SEQ ID NO: 14130 - RNA, 3948 nt, Artificial Sequence
  SARS-CoV-2/Wuhan/WIV05/2019__EPI_ISL_402128 spike protein CDS gc (1-1147)(N914C_S1123C) Ferritin construct
auguucguguuccugguccuccugccccuggugagcucccagugcgugaaccucaccacccgcacgcagcugccgcccgccuacaccaacagcuucacccggggcgucuacuaccccgacaagguguuccgcuccagcgugcugcacuccacccaggaccucuuccugcccuucuucagcaacgucacgugguuccacgccauccacguguccgggaccaacggcaccaagcgguucgacaacccggugcugcccuucaacgacggggucuacuucgcgagcaccgagaaguccaacaucauccgcggcuggaucuucgggacgacccucgacagcaagacccagucccugcugaucgugaacaacgccaccaacguggucaucaaggugugcgaguuccaguucugcaacgaccccuuccucggcguguacuaccacaagaacaacaagagcuggauggaguccgaguuccgggucuacagcuccgccaacaacugcacguucgaguacgugagccagcccuuccugauggaccuggagggcaagcaggggaacuucaagaaccuccgcgaguucguguucaagaacaucgacggcuacuucaagaucuacuccaagcacaccccgaucaaccugguccgggaccugccccagggguucagcgcccucgagccccugguggaccugcccaucggcaucaacaucacccgcuuccagacccuccuggcccugcaccgguccuaccucacgccgggggacagcagcuccggcuggaccgcgggcgccgccgccuacuacgugggguaccugcagccccgcaccuuccugcucaaguacaacgagaacggcaccaucacggacgcggucgacugcgcccuggacccccugagcgagaccaagugcacccucaaguccuucaccguggagaaggggaucuaccagacgagcaacuuccgggugcagcccaccgaguccaucguccgcuucccgaacaucaccaaccugugccccuucggcgagguguucaacgccacccgguucgccagcgucuacgccuggaaccgcaagcggaucuccaacugcguggcggacuacagcgugcuguacaacuccgccagcuucuccacguucaagugcuacggcgucagccccaccaagcucaacgaccugugcuucaccaacguguacgccgacuccuucgugauccgcggggacgagguccggcagaucgcccccggccagaccgggaagaucgccgacuacaacuacaagcugccggacgacuucacgggcugcgugaucgcguggaacagcaacaaccucgacuccaaggucgggggcaacuacaacuaccuguaccgccuguuccgcaagagcaaccucaagcccuucgagcgggacaucuccaccgagaucuaccaggccggcagcacccccugcaacgggguggagggcuucaacugcuacuucccccugcaguccuacggguuccagccgaccaacggcgugggguaccagcccuaccggguggucgugcugagcuucgagcuccugcacgcccccgccacggugugcggccccaagaaguccaccaaccuggucaagaacaagugcgugaacuucaacuucaacggccucaccgggaccggcgugcugaccgagagcaacaagaaguuccugccguuccagcaguucgggcgcgacaucgccgacacgaccgacgcgguccgcgacccccagacccuggagauccucgacaucacccccugcagcuucggcgggguguccgugaucacgccgggcaccaacaccagcaaccaggucgccgugcuguaccaggacgugaacugcaccgagguccccguggccauccacgccgaccagcugacgcccaccuggcggguguacuccaccggcagcaacgucuuccagacccgcgccgggugccucaucggcgcggagcacgugaacaacuccuacgagugcgacauccccaucggggccggcaucugcgccagcuaccagacgcagaccaacuccccgcggcgcgcccggagcguggcgucccagagcaucaucgccuacaccaugucccugggcgccgagaacagcgucgccuacuccaacaacagcaucgccauccccaccaacuucacgaucuccgugaccaccgagauccugcccgugagcaugaccaagacgagcgucgacugcaccauguacaucugcggggacuccaccgagugcagcaaccuccugcugcaguacggcuccuucugcacccagcucaaccgcgcgcugacggggaucgccguggagcaggacaagaacacccaggagguguucgcccaggucaagcagaucuacaagacgcccccgaucaaggacuucggcggguucaacuucagccagauccugcccgaccccuccaagcccagcaagcgguccuucaucgaggaccuccuguucaacaaggugacccuggccgacgccggcuucaucaagcaguacggcgacugccucggggacaucgcggcccgcgaccugaucugcgcccagaaguucaacggccugaccgugcucccgccccugcugaccgacgagaugaucgcccaguacaccagcgcccuccuggcggggaccaucacguccggcuggaccuucggggccggcgccgcccugcagauccccuucgcgaugcagauggccuaccgguucaacggcaucggggucacccagugcgugcucuacgagaaccagaagcugaucgccaaccaguucaacagcgccaucggcaagauccaggacucccugagcuccaccgccagcgcgcucgggaagcugcaggacguggucaaccagaacgcccaggcccugaacacgcucgugaagcagcuguccagcaacuucggcgccaucuccagcgugcugaacgacauccucucccgccuggacaaggucgaggccgaggugcagaucgaccggcugaucaccgggcgccuccagagccugcagaccuacgugacccagcagcugauccgggcggccgagauccgcgccagcgccaaccucgccgcgaccaagauguccgagugcguccugggccagagcaagcggguggacuucugcggcaagggguaccaccugauguccuucccccagagcgccccgcacggcguggucuuccuccacgugacguacguccccgcccaggagaagaacuucaccaccgcccccgcgaucugccacgacgggaaggcccacuucccccgcgagggcguguucguguccaacgggacccacugguucgucacgcagcggaacuucuacgagccgcagaucaucaccaccgacaacaccuucgugugcggcaacugcgacguggucaucggcaucgugaacaacacgguguacgacccccugcagcccgagcuggacuccggcgggggcgggagcgacaucaucaagcuccugaacgagcaggucaacaaggagaugcaguccagcaaccuguacauguccaugagcuccuggugcuacacccacagccucgacggcgccgggcuguuccuguucgaccacgccgcggaggaguacgagcacgccaagaagcucaucaucuuccugaacgagaacaacgugcccgugcagcugaccuccaucagcgccccggagcacaaguucgagggccucacgcagaucuuccagaaggccuacgagcacgagcagcacaucuccgagagcaucaacaacaucguggaccacgccaucaaguccaaggaccacgcgaccuucaacuuccugcagugguacgucgccgagcagcacgaggaggaggugcuguucaaggacauccucgacaagaucgagcugaucgggaacgagaaccacggccuguaccucgccgaccaguacgugaaggggaucgccaagagccgcaaguccuga

SEQ ID NO: 14131 - RNA, 3534 nt, Artificial Sequence
  SARS-CoV-2/Wuhan/WIV05/2019__EPI_ISL_402128 spike protein CDS gc (1-1147)(N914C_S1123C) Foldon construct
auguucguguuccugguccuccugccccuggugagcucccagugcgugaaccucaccacccgcacgcagcugccgcccgccuacaccaacagcuucacccggggcgucuacuaccccgacaagguguuccgcuccagcgugcugcacuccacccaggaccucuuccugcccuucuucagcaacgucacgugguuccacgccauccacguguccgggaccaacggcaccaagcgguucgacaacccggugcugcccuucaacgacggggucuacuucgcgagcaccgagaaguccaacaucauccgcggcuggaucuucgggacgacccucgacagcaagacccagucccugcugaucgugaacaacgccaccaacguggucaucaaggugugcgaguuccaguucugcaacgaccccuuccucggcguguacuaccacaagaacaacaagagcuggauggaguccgaguuccgggucuacagcuccgccaacaacugcacguucgaguacgugagccagcccuuccugauggaccuggagggcaagcaggggaacuucaagaaccuccgcgaguucguguucaagaacaucgacggcuacuucaagaucuacuccaagcacaccccgaucaaccugguccgggaccugccccagggguucagcgcccucgagccccugguggaccugcccaucggcaucaacaucacccgcuuccagacccuccuggcccugcaccgguccuaccucacgccgggggacagcagcuccggcuggaccgcgggcgccgccgccuacuacgugggguaccugcagccccgcaccuuccugcucaaguacaacgagaacggcaccaucacggacgcggucgacugcgcccuggacccccugagcgagaccaagugcacccucaaguccuucaccguggagaaggggaucuaccagacgagcaacuuccgggugcagcccaccgaguccaucguccgcuucccgaacaucaccaaccugugccccuucggcgagguguucaacgccacccgguucgccagcgucuacgccuggaaccgcaagcggaucuccaacugcguggcggacuacagcgugcuguacaacuccgccagcuucuccacguucaagugcuacggcgucagccccaccaagcucaacgaccugugcuucaccaacguguacgccgacuccuucgugauccgcggggacgagguccggcagaucgcccccggccagaccgggaagaucgccgacuacaacuacaagcugccggacgacuucacgggcugcgugaucgcguggaacagcaacaaccucgacuccaaggucgggggcaacuacaacuaccuguaccgccuguuccgcaagagcaaccucaagcccuucgagcgggacaucuccaccgagaucuaccaggccggcagcacccccugcaacgggguggagggcuucaacugcuacuucccccugcaguccuacggguuccagccgaccaacggcgugggguaccagcccuaccggguggucgugcugagcuucgagcuccugcacgcccccgccacggugugcggccccaagaaguccaccaaccuggucaagaacaagugcgugaacuucaacuucaacggccucaccgggaccggcgugcugaccgagagcaacaagaaguuccugccguuccagcaguucgggcgcgacaucgccgacacgaccgacgcgguccgcgacccccagacccuggagauccucgacaucacccccugcagcuucggcgggguguccgugaucacgccgggcaccaacaccagcaaccaggucgccgugcuguaccaggacgugaacugcaccgagguccccguggccauccacgccgaccagcugacgcccaccuggcggguguacuccaccggcagcaacgucuuccagacccgcgccgggugccucaucggcgcggagcacgugaacaacuccuacgagugcgacauccccaucggggccggcaucugcgccagcuaccagacgcagaccaacuccccgcggcgcgcccggagcguggcgucccagagcaucaucgccuacaccaugucccugggcgccgagaacagcgucgccuacuccaacaacagcaucgccauccccaccaacuucacgaucuccgugaccaccgagauccugcccgugagcaugaccaagacgagcgucgacugcaccauguacaucugcggggacuccaccgagugcagcaaccuccugcugcaguacggcuccuucugcacccagcucaaccgcgcgcugacggggaucgccguggagcaggacaagaacacccaggagguguucgcccaggucaagcagaucuacaagacgcccccgaucaaggacuucggcggguucaacuucagccagauccugcccgaccccuccaagcccagcaagcgguccuucaucgaggaccuccuguucaacaaggugacccuggccgacgccggcuucaucaagcaguacggcgacugccucggggacaucgcggcccgcgaccugaucugcgcccagaaguucaacggccugaccgugcucccgccccugcugaccgacgagaugaucgcccaguacaccagcgcccuccuggcggggaccaucacguccggcuggaccuucggggccggcgccgcccugcagauccccuucgcgaugcagauggccuaccgguucaacggcaucggggucacccagugcgugcucuacgagaaccagaagcugaucgccaaccaguucaacagcgccaucggcaagauccaggacucccugagcuccaccgccagcgcgcucgggaagcugcaggacguggucaaccagaacgcccaggcccugaacacgcucgugaagcagcuguccagcaacuucggcgccaucuccagcgugcugaacgacauccucucccgccuggacaaggucgaggccgaggugcagaucgaccggcugaucaccgggcgccuccagagccugcagaccuacgugacccagcagcugauccgggcggccgagauccgcgccagcgccaaccucgccgcgaccaagauguccgagugcguccugggccagagcaagcggguggacuucugcggcaagggguaccaccugauguccuucccccagagcgccccgcacggcguggucuuccuccacgugacguacguccccgcccaggagaagaacuucaccaccgcccccgcgaucugccacgacgggaaggcccacuucccccgcgagggcguguucguguccaacgggacccacugguucgucacgcagcggaacuucuacgagccgcagaucaucaccaccgacaacaccuucgugugcggcaacugcgacguggucaucggcaucgugaacaacacgguguacgacccccugcagcccgagcuggacuccggcgggagcggcuacauccccgaggccccgcgcgacgggcaggccuacgugcggaaggacggcgaguggguccugcucagcaccuuccuguga

SEQ ID NO: 14132 - RNA, 3906 nt, Artificial Sequence
  SARS-CoV-2/Wuhan/WIV05/2019__EPI_ISL_402128 spike protein CDS gc (1-1147)(N914C_S1123C) WhcAg construct
auguucguguuccugguccuccugccccuggugagcucccagugcgugaaccucaccacccgcacgcagcugccgcccgccuacaccaacagcuucacccggggcgucuacuaccccgacaagguguuccgcuccagcgugcugcacuccacccaggaccucuuccugcccuucuucagcaacgucacgugguuccacgccauccacguguccgggaccaacggcaccaagcgguucgacaacccggugcugcccuucaacgacggggucuacuucgcgagcaccgagaaguccaacaucauccgcggcuggaucuucgggacgacccucgacagcaagacccagucccugcugaucgugaacaacgccaccaacguggucaucaaggugugcgaguuccaguucugcaacgaccccuuccucggcguguacuaccacaagaacaacaagagcuggauggaguccgaguuccgggucuacagcuccgccaacaacugcacguucgaguacgugagccagcccuuccugauggaccuggagggcaagcaggggaacuucaagaaccuccgcgaguucguguucaagaacaucgacggcuacuucaagaucuacuccaagcacaccccgaucaaccugguccgggaccugccccagggguucagcgcccucgagccccugguggaccugcccaucggcaucaacaucacccgcuuccagacccuccuggcccugcaccgguccuaccucacgccgggggacagcagcuccggcuggaccgcgggcgccgccgccuacuacgugggguaccugcagccccgcaccuuccugcucaaguacaacgagaacggcaccaucacggacgcggucgacugcgcccuggacccccugagcgagaccaagugcacccucaaguccuucaccguggagaaggggaucuaccagacgagcaacuuccgggugcagcccaccgaguccaucguccgcuucccgaacaucaccaaccugugccccuucggcgagguguucaacgccacccgguucgccagcgucuacgccuggaaccgcaagcggaucuccaacugcguggcggacuacagcgugcuguacaacuccgccagcuucuccacguucaagugcuacggcgucagccccaccaagcucaacgaccugugcuucaccaacguguacgccgacuccuucgugauccgcggggacgagguccggcagaucgcccccggccagaccgggaagaucgccgacuacaacuacaagcugccggacgacuucacgggcugcgugaucgcguggaacagcaacaaccucgacuccaaggucgggggcaacuacaacuaccuguaccgccuguuccgcaagagcaaccucaagcccuucgagcgggacaucuccaccgagaucuaccaggccggcagcacccccugcaacgggguggagggcuucaacugcuacuucccccugcaguccuacggguuccagccgaccaacggcgugggguaccagcccuaccggguggucgugcugagcuucgagcuccugcacgcccccgccacggugugcggccccaagaaguccaccaaccuggucaagaacaagugcgugaacuucaacuucaacggccucaccgggaccggcgugcugaccgagagcaacaagaaguuccugccguuccagcaguucgggcgcgacaucgccgacacgaccgacgcgguccgcgacccccagacccuggagauccucgacaucacccccugcagcuucggcgggguguccgugaucacgccgggcaccaacaccagcaaccaggucgccgugcuguaccaggacgugaacugcaccgagguccccguggccauccacgccgaccagcugacgcccaccuggcggguguacuccaccggcagcaacgucuuccagacccgcgccgggugccucaucggcgcggagcacgugaacaacuccuacgagugcgacauccccaucggggccggcaucugcgccagcuaccagacgcagaccaacuccccgcggcgcgcccggagcguggcgucccagagcaucaucgccuacaccaugucccugggcgccgagaacagcgucgccuacuccaacaacagcaucgccauccccaccaacuucacgaucuccgugaccaccgagauccugcccgugagcaugaccaagacgagcgucgacugcaccauguacaucugcggggacuccaccgagugcagcaaccuccugcugcaguacggcuccuucugcacccagcucaaccgcgcgcugacggggaucgccguggagcaggacaagaacacccaggagguguucgcccaggucaagcagaucuacaagacgcccccgaucaaggacuucggcggguucaacuucagccagauccugcccgaccccuccaagcccagcaagcgguccuucaucgaggaccuccuguucaacaaggugacccuggccgacgccggcuucaucaagcaguacggcgacugccucggggacaucgcggcccgcgaccugaucugcgcccagaaguucaacggccugaccgugcucccgccccugcugaccgacgagaugaucgcccaguacaccagcgcccuccuggcggggaccaucacguccggcuggaccuucggggccggcgccgcccugcagauccccuucgcgaugcagauggccuaccgguucaacggcaucggggucacccagugcgugcucuacgagaaccagaagcugaucgccaaccaguucaacagcgccaucggcaagauccaggacucccugagcuccaccgccagcgcgcucgggaagcugcaggacguggucaaccagaacgcccaggcccugaacacgcucgugaagcagcuguccagcaacuucggcgccaucuccagcgugcugaacgacauccucucccgccuggacaaggucgaggccgaggugcagaucgaccggcugaucaccgggcgccuccagagccugcagaccuacgugacccagcagcugauccgggcggccgagauccgcgccagcgccaaccucgccgcgaccaagauguccgagugcguccugggccagagcaagcggguggacuucugcggcaagggguaccaccugauguccuucccccagagcgccccgcacggcguggucuuccuccacgugacguacguccccgcccaggagaagaacuucaccaccgcccccgcgaucugccacgacgggaaggcccacuucccccgcgagggcguguucguguccaacgggacccacugguucgucacgcagcggaacuucuacgagccgcagaucaucaccaccgacaacaccuucgugugcggcaacugcgacguggucaucggcaucgugaacaacacgguguacgacccccugcagcccgagcuggacuccggcgggggcgggagcgacaucgaccccuacaaggaguucggcagcuccuaccagcugcucaacuuccugccccuggacuucuuccccgaccucaacgcccugguggacaccgccaccgcgcuguacgaggaggagcucacggggcgcgagcacugcagcccccaccacaccgccauccggcaggcccuggucugcugggacgagcugaccaagcucaucgccuggauguccagcaacaucaccuccgagcagguccgcacgaucaucgugaaccacgucaacgacaccuggggccugaaggugcggcagagccugugguuccaccucuccugccugaccuucgggcagcacaccgugcaggaguuccuggucagcuucggcguguggauccgcacgcccgccccguaccggccgcccaacgcgccgauccucuccacccugccggagcacaccgugaucugcuga

SEQ ID NO: 14133 - RNA, 3822 nt, Artificial Sequence
  SARS-CoV-2/Wuhan/WIV05/2019__EPI_ISL_402128 spike protein CDS gc mod (1-1273)(N914C_S1123C)
auguucguguuucuggugcugcugccccugguguccagccagugugugaaccugaccaccagaacacagcugccuccagccuacaccaacagcuucaccagaggcguguacuaccccgacaagguguucagauccagcgugcugcacucuacccaggaccuguuccugccuuucuucagcaacgugaccugguuccacgccauccacguguccggcaccaauggcaccaagagauucgacaaccccgugcugcccuucaacgacgggguguacuuugccagcaccgagaaguccaacaucaucagaggcuggaucuucggcaccacacuggacagcaagacccagagccugcugaucgugaacaacgccaccaacguggucaucaaagugugcgaguuccaguucugcaacgaccccuuccugggcgucuacuaccacaagaacaacaagagcuggauggaaagcgaguuccggguguacagcagcgccaacaacugcaccuucgaguacgugucccagccuuuccugauggaccuggaaggcaagcagggcaacuucaagaaccugcgcgaguucguguucaagaacaucgacggcuacuucaaaaucuacagcaagcacaccccuaucaaccucgugcgggaucugccucagggcuucucugcucuggaaccccugguggaucugcccaucggcaucaacaucacccgguuucagacacugcuggcccugcacagaagcuaccugacaccuggcgauagcagcagcggauggacagcuggugccgccgcuuacuaugugggcuaccugcagccuagaaccuuccugcugaaguacaacgagaacggcaccaucaccgacgccguggauugugcucuggauccucugagcgagacaaagugcacccugaaguccuucaccguggaaaagggcaucuaccagaccagcaacuuccgggugcagcccaccgaauccaucgugcgguuccccaauaucaccaaucugugccccuucggcgagguguucaaugccaccagauucgccucuguguacgccuggaaccggaagcggaucagcaauugcguggccgacuacuccgugcuguacaacuccgccagcuucagcaccuucaagugcuacggcguguccccuaccaagcugaacgaccugugcuucacaaacguguacgccgacagcuucgugauccggggagaugaagugcggcagauugccccuggacagacaggcaagaucgccgacuacaacuacaagcugcccgacgacuucaccggcugugugauugccuggaacagcaacaaccuggacuccaaagucggcggcaacuacaauuaccuguaccggcuguuccggaaguccaaucugaagcccuucgagcgggacaucagcaccgaaaucuaucaggccggcagcaccccuugcaacggcguggaaggcuucaacugcuacuucccacugcaguccuacggcuuucagcccacaaauggcgugggcuaucagcccuacagagugguggugcugagcuucgaacugcugcaugcuccugccacagugugcggcccuaagaaaagcaccaaucucgugaagaacaaaugcgugaacuucaacuucaacggccugaccggcaccggcgugcugacagagagcaacaagaaguuccugccauuccagcaguuuggccgggauaucgccgauaccacagacgccguuagagauccccagacacuggaaauccuggacaucaccccaugcagcuucggcggagugucugugaucaccccuggcaccaacaccagcaaucagguggcagugcuguaccaggacgugaacuguaccgaagugcccguggccauucacgccgaucagcugacaccuacauggcggguguacuccaccggcagcaauguguuucagaccagagccggcugucugaucggagccgagcacgugaacaauagcuacgagugcgacauccccaucggcgcuggcaucugugccagcuaccagacacagacaaacagccccagacgggcuagaagcguggccagccagagcaucauugccuacacaaugucucugggcgccgagaacagcguggccuacuccaacaacucuaucgcuauccccaccaacuucaccaucagcgugaccaccgagauccugccuguguccaugaccaagaccagcguggacugcaccauguacaucugcggcgauuccaccgagugcuccaaccugcugcugcaguacggcagcuucugcacccagcugaauagagcccugacagggaucgccguggaacaggacaagaacacccaagagguguucgcccaagugaagcaaaucuacaagaccccuccuaucaaggacuucggcggcuucaauuucagccagauucugcccgauccuagcaagcccagcaagcggagcuucaucgaggaccugcuguucaacaaagugacacuggccgacgccggcuucaucaagcaguauggcgauugucugggcgacauugccgccagggaucugauuugcgcccagaaguuuaacggacugacagugcugccuccucugcugaccgaugagaugaucgcccaguacacaucugcccugcuggccggcacaaucacaagcggcuggacauuuggagcuggcgccgcucugcagauccccuuugcuaugcagauggccuaccgguucaacggcaucggagugacccagugcgugcuguacgagaaccagaagcugaucgccaaccaguucaacagcgccaucggcaagauccaggacagccugagcagcacagcaagcgcccugggaaagcugcaggacguggucaaccagaaugcccaggcacugaacacccuggucaagcagcuguccuccaacuucggcgccaucagcucugugcugaacgauauccugagcagacuggacaaggucgaggccgaggugcagaucgacagacugaucacaggcagacugcagagccuccagacauacgugacccagcagcugaucagagccgccgagauuagagccucugccaaucuggccgccaccaagaugucugagugugugcugggccagagcaagagaguggacuuuugcggcaagggcuaccaccugaugagcuucccucagucugccccucacggcgugguguuucugcacgugacauaugugcccgcucaagagaagaauuucaccaccgcuccagccaucugccacgacggcaaagcccacuuuccuagagaaggcguguucguguccaacggcacccauugguucgugacacagcggaacuucuacgagccccagaucaucaccaccgacaacaccuucguguguggcaacugcgacguugugaucggcauugugaacaauaccguguacgacccucugcagcccgagcuggacagcuucaaagaggaacuggacaaguacuuuaagaaccacacaagccccgacguggaccugggcgauaucagcggaaucaaugccagcgucgugaacauccagaaagagaucgaccggcugaacgagguggccaagaaucugaacgagagccugaucgaccugcaagaacuggggaaguacgagcaguacaucaaguggcccugguacaucuggcugggcuuuaucgccggacugauugccaucgugauggucacaaucaugcuguguugcaugaccagcugcuguagcugccugaagggcuguuguagcuguggcagcugcugcaaguucgacgaggacgauucugagcccgugcugaagggcgugaaacugcacuacaccuga

SEQ ID NO: 14134 - RNA, 4116 nt, Artificial Sequence
  SARS-CoV-2/Wuhan/WIV05/2019__EPI_ISL_402128 spike protein CDS gc mod (1-1211)(N914C_S1123C) LumSynth construct
auguucguguuucuggugcugcugccccugguguccagccagugugugaaccugaccaccagaacacagcugccuccagccuacaccaacagcuucaccagaggcguguacuaccccgacaagguguucagauccagcgugcugcacucuacccaggaccuguuccugccuuucuucagcaacgugaccugguuccacgccauccacguguccggcaccaauggcaccaagagauucgacaaccccgugcugcccuucaacgacgggguguacuuugccagcaccgagaaguccaacaucaucagaggcuggaucuucggcaccacacuggacagcaagacccagagccugcugaucgugaacaacgccaccaacguggucaucaaagugugcgaguuccaguucugcaacgaccccuuccugggcgucuacuaccacaagaacaacaagagcuggauggaaagcgaguuccggguguacagcagcgccaacaacugcaccuucgaguacgugucccagccuuuccugauggaccuggaaggcaagcagggcaacuucaagaaccugcgcgaguucguguucaagaacaucgacggcuacuucaaaaucuacagcaagcacaccccuaucaaccucgugcgggaucugccucagggcuucucugcucuggaaccccugguggaucugcccaucggcaucaacaucacccgguuucagacacugcuggcccugcacagaagcuaccugacaccuggcgauagcagcagcggauggacagcuggugccgccgcuuacuaugugggcuaccugcagccuagaaccuuccugcugaaguacaacgagaacggcaccaucaccgacgccguggauugugcucuggauccucugagcgagacaaagugcacccugaaguccuucaccguggaaaagggcaucuaccagaccagcaacuuccgggugcagcccaccgaauccaucgugcgguuccccaauaucaccaaucugugccccuucggcgagguguucaaugccaccagauucgccucuguguacgccuggaaccggaagcggaucagcaauugcguggccgacuacuccgugcuguacaacuccgccagcuucagcaccuucaagugcuacggcguguccccuaccaagcugaacgaccugugcuucacaaacguguacgccgacagcuucgugauccggggagaugaagugcggcagauugccccuggacagacaggcaagaucgccgacuacaacuacaagcugcccgacgacuucaccggcugugugauugccuggaacagcaacaaccuggacuccaaagucggcggcaacuacaauuaccuguaccggcuguuccggaaguccaaucugaagcccuucgagcgggacaucagcaccgaaaucuaucaggccggcagcaccccuugcaacggcguggaaggcuucaacugcuacuucccacugcaguccuacggcuuucagcccacaaauggcgugggcuaucagcccuacagagugguggugcugagcuucgaacugcugcaugcuccugccacagugugcggcccuaagaaaagcaccaaucucgugaagaacaaaugcgugaacuucaacuucaacggccugaccggcaccggcgugcugacagagagcaacaagaaguuccugccauuccagcaguuuggccgggauaucgccgauaccacagacgccguuagagauccccagacacuggaaauccuggacaucaccccaugcagcuucggcggagugucugugaucaccccuggcaccaacaccagcaaucagguggcagugcuguaccaggacgugaacuguaccgaagugcccguggccauucacgccgaucagcugacaccuacauggcggguguacuccaccggcagcaauguguuucagaccagagccggcugucugaucggagccgagcacgugaacaauagcuacgagugcgacauccccaucggcgcuggcaucugugccagcuaccagacacagacaaacagccccagacgggcuagaagcguggccagccagagcaucauugccuacacaaugucucugggcgccgagaacagcguggccuacuccaacaacucuaucgcuauccccaccaacuucaccaucagcgugaccaccgagauccugccuguguccaugaccaagaccagcguggacugcaccauguacaucugcggcgauuccaccgagugcuccaaccugcugcugcaguacggcagcuucugcacccagcugaauagagcccugacagggaucgccguggaacaggacaagaacacccaagagguguucgcccaagugaagcaaaucuacaagaccccuccuaucaaggacuucggcggcuucaauuucagccagauucugcccgauccuagcaagcccagcaagcggagcuucaucgaggaccugcuguucaacaaagugacacuggccgacgccggcuucaucaagcaguauggcgauugucugggcgacauugccgccagggaucugauuugcgcccagaaguuuaacggacugacagugcugccuccucugcugaccgaugagaugaucgcccaguacacaucugcccugcuggccggcacaaucacaagcggcuggacauuuggagcuggcgccgcucugcagauccccuuugcuaugcagauggccuaccgguucaacggcaucggagugacccagugcgugcuguacgagaaccagaagcugaucgccaaccaguucaacagcgccaucggcaagauccaggacagccugagcagcacagcaagcgcccugggaaagcugcaggacguggucaaccagaaugcccaggcacugaacacccuggucaagcagcuguccuccaacuucggcgccaucagcucugugcugaacgauauccugagcagacuggacaaggucgaggccgaggugcagaucgacagacugaucacaggcagacugcagagccuccagacauacgugacccagcagcugaucagagccgccgagauuagagccucugccaaucuggccgccaccaagaugucugagugugugcugggccagagcaagagaguggacuuuugcggcaagggcuaccaccugaugagcuucccucagucugccccucacggcgugguguuucugcacgugacauaugugcccgcucaagagaagaauuucaccaccgcuccagccaucugccacgacggcaaagcccacuuuccuagagaaggcguguucguguccaacggcacccauugguucgugacacagcggaacuucuacgagccccagaucaucaccaccgacaacaccuucguguguggcaacugcgacguugugaucggcauugugaacaauaccguguacgacccucugcagcccgagcuggacagcuucaaagaggaacuggacaaguacuuuaagaaccacacaagccccgacguggaccugggcgauaucagcggaaucaaugccagcgucgugaacauccagaaagagaucgaccggcugaacgagguggccaagaaucugaacgagagccugaucgaccugcaagaacuggggaaguacgagcaguacaucaagggcggaggaucuggcggaggacagaucuacgagggcaagcugacagccgagggccugagauuuggaaucguggccagccgguucaaucacgcccugguggauagacugguggaaggcgccaucgaugccauugucagacacggcggcagagaagaggacaucacccucguuagagugcccggcucuugggagauuccuguggcugcuggcgagcuggcccggaaagaagauaucgacgccguuaucgccaucggcgugcugaucagaggcgccacaccucacuucgacuauaucgccagcgagguguccaaaggccuggccgaucugagccuggaacugagaaagcccaucaccuucggcgugaucaccgcugacacacuggaacaggccauugagagagccggcaccaagcacggcaacaaaggaugggaagccgcucuguccgccaucgagauggccaaccuguucaagagccugcgguga

SEQ ID NO: 14135 - RNA, 4140 nt, Artificial Sequence
  SARS-CoV-2/Wuhan/WIV05/2019__EPI_ISL_402128 spike protein CDS gc mod (1-1211)(N914C_S1123C) Ferritin construct
auguucguguuucuggugcugcugccccugguguccagccagugugugaaccugaccaccagaacacagcugccuccagccuacaccaacagcuucaccagaggcguguacuaccccgacaagguguucagauccagcgugcugcacucuacccaggaccuguuccugccuuucuucagcaacgugaccugguuccacgccauccacguguccggcaccaauggcaccaagagauucgacaaccccgugcugcccuucaacgacgggguguacuuugccagcaccgagaaguccaacaucaucagaggcuggaucuucggcaccacacuggacagcaagacccagagccugcugaucgugaacaacgccaccaacguggucaucaaagugugcgaguuccaguucugcaacgaccccuuccugggcgucuacuaccacaagaacaacaagagcuggauggaaagcgaguuccggguguacagcagcgccaacaacugcaccuucgaguacgugucccagccuuuccugauggaccuggaaggcaagcagggcaacuucaagaaccugcgcgaguucguguucaagaacaucgacggcuacuucaaaaucuacagcaagcacaccccuaucaaccucgugcgggaucugccucagggcuucucugcucuggaaccccugguggaucugcccaucggcaucaacaucacccgguuucagacacugcuggcccugcacagaagcuaccugacaccuggcgauagcagcagcggauggacagcuggugccgccgcuuacuaugugggcuaccugcagccuagaaccuuccugcugaaguacaacgagaacggcaccaucaccgacgccguggauugugcucuggauccucugagcgagacaaagugcacccugaaguccuucaccguggaaaagggcaucuaccagaccagcaacuuccgggugcagcccaccgaauccaucgugcgguuccccaauaucaccaaucugugccccuucggcgagguguucaaugccaccagauucgccucuguguacgccuggaaccggaagcggaucagcaauugcguggccgacuacuccgugcuguacaacuccgccagcuucagcaccuucaagugcuacggcguguccccuaccaagcugaacgaccugugcuucacaaacguguacgccgacagcuucgugauccggggagaugaagugcggcagauugccccuggacagacaggcaagaucgccgacuacaacuacaagcugcccgacgacuucaccggcugugugauugccuggaacagcaacaaccuggacuccaaagucggcggcaacuacaauuaccuguaccggcuguuccggaaguccaaucugaagcccuucgagcgggacaucagcaccgaaaucuaucaggccggcagcaccccuugcaacggcguggaaggcuucaacugcuacuucccacugcaguccuacggcuuucagcccacaaauggcgugggcuaucagcccuacagagugguggugcugagcuucgaacugcugcaugcuccugccacagugugcggcccuaagaaaagcaccaaucucgugaagaacaaaugcgugaacuucaacuucaacggccugaccggcaccggcgugcugacagagagcaacaagaaguuccugccauuccagcaguuuggccgggauaucgccgauaccacagacgccguuagagauccccagacacuggaaauccuggacaucaccccaugcagcuucggcggagugucugugaucaccccuggcaccaacaccagcaaucagguggcagugcuguaccaggacgugaacuguaccgaagugcccguggccauucacgccgaucagcugacaccuacauggcggguguacuccaccggcagcaauguguuucagaccagagccggcugucugaucggagccgagcacgugaacaauagcuacgagugcgacauccccaucggcgcuggcaucugugccagcuaccagacacagacaaacagccccagacgggcuagaagcguggccagccagagcaucauugccuacacaaugucucugggcgccgagaacagcguggccuacuccaacaacucuaucgcuauccccaccaacuucaccaucagcgugaccaccgagauccugccuguguccaugaccaagaccagcguggacugcaccauguacaucugcggcgauuccaccgagugcuccaaccugcugcugcaguacggcagcuucugcacccagcugaauagagcccugacagggaucgccguggaacaggacaagaacacccaagagguguucgcccaagugaagcaaaucuacaagaccccuccuaucaaggacuucggcggcuucaauuucagccagauucugcccgauccuagcaagcccagcaagcggagcuucaucgaggaccugcuguucaacaaagugacacuggccgacgccggcuucaucaagcaguauggcgauugucugggcgacauugccgccagggaucugauuugcgcccagaaguuuaacggacugacagugcugccuccucugcugaccgaugagaugaucgcccaguacacaucugcccugcuggccggcacaaucacaagcggcuggacauuuggagcuggcgccgcucugcagauccccuuugcuaugcagauggccuaccgguucaacggcaucggagugacccagugcgugcuguacgagaaccagaagcugaucgccaaccaguucaacagcgccaucggcaagauccaggacagccugagcagcacagcaagcgcccugggaaagcugcaggacguggucaaccagaaugcccaggcacugaacacccuggucaagcagcuguccuccaacuucggcgccaucagcucugugcugaacgauauccugagcagacuggacaaggucgaggccgaggugcagaucgacagacugaucacaggcagacugcagagccuccagacauacgugacccagcagcugaucagagccgccgagauuagagccucugccaaucuggccgccaccaagaugucugagugugugcugggccagagcaagagaguggacuuuugcggcaagggcuaccaccugaugagcuucccucagucugccccucacggcgugguguuucugcacgugacauaugugcccgcucaagagaagaauuucaccaccgcuccagccaucugccacgacggcaaagcccacuuuccuagagaaggcguguucguguccaacggcacccauugguucgugacacagcggaacuucuacgagccccagaucaucaccaccgacaacaccuucguguguggcaacugcgacguugugaucggcauugugaacaauaccguguacgacccucugcagcccgagcuggacagcuucaaagaggaacuggacaaguacuuuaagaaccacacaagccccgacguggaccugggcgauaucagcggaaucaaugccagcgucgugaacauccagaaagagaucgaccggcugaacgagguggccaagaaucugaacgagagccugaucgaccugcaagaacuggggaaguacgagcaguacaucaagggaggcggaggaucugacaucaucaagcugcugaacgagcaagugaacaaagagaugcagagcagcaaccuguacaugagcaugagcagcuggugcuacacccacagccuugauggcgccggacuguuccuguuugaucacgccgccgaggaauacgagcacgccaagaagcugaucaucuuccugaacgagaacaacgugcccgugcagcugaccagcauuucugccccugagcacaaguucgagggccugacacagaucuuccagaaggccuacgaacacgagcagcacaucagcgagagcaucaacaacaucguggaccacgccauuaagagcaaggaucacgccaccuucaacuuucugcagugguacguggccgaacagcacgaggaagaggugcuguucaaggacauccuggacaagaucgagcugaucggcaacgagaaccacggccuguaucuggccgaccaguacgugaagggaaucgccaagagcagaaagagcuga

SEQ ID NO: 14136 - RNA, 3726 nt, Artificial Sequence
  SARS-CoV-2/Wuhan/WIV05/2019__EPI_ISL_402128 spike protein CDS gc mod (1-1211)(N914C_S1123C) Foldon construct
auguucguguuucuggugcugcugccccugguguccagccagugugugaaccugaccaccagaacacagcugccuccagccuacaccaacagcuucaccagaggcguguacuaccccgacaagguguucagauccagcgugcugcacucuacccaggaccuguuccugccuuucuucagcaacgugaccugguuccacgccauccacguguccggcaccaauggcaccaagagauucgacaaccccgugcugcccuucaacgacgggguguacuuugccagcaccgagaaguccaacaucaucagaggcuggaucuucggcaccacacuggacagcaagacccagagccugcugaucgugaacaacgccaccaacguggucaucaaagugugcgaguuccaguucugcaacgaccccuuccugggcgucuacuaccacaagaacaacaagagcuggauggaaagcgaguuccggguguacagcagcgccaacaacugcaccuucgaguacgugucccagccuuuccugauggaccuggaaggcaagcagggcaacuucaagaaccugcgcgaguucguguucaagaacaucgacggcuacuucaaaaucuacagcaagcacaccccuaucaaccucgugcgggaucugccucagggcuucucugcucuggaaccccugguggaucugcccaucggcaucaacaucacccgguuucagacacugcuggcccugcacagaagcuaccugacaccuggcgauagcagcagcggauggacagcuggugccgccgcuuacuaugugggcuaccugcagccuagaaccuuccugcugaaguacaacgagaacggcaccaucaccgacgccguggauugugcucuggauccucugagcgagacaaagugcacccugaaguccuucaccguggaaaagggcaucuaccagaccagcaacuuccgggugcagcccaccgaauccaucgugcgguuccccaauaucaccaaucugugccccuucggcgagguguucaaugccaccagauucgccucuguguacgccuggaaccggaagcggaucagcaauugcguggccgacuacuccgugcuguacaacuccgccagcuucagcaccuucaagugcuacggcguguccccuaccaagcugaacgaccugugcuucacaaacguguacgccgacagcuucgugauccggggagaugaagugcggcagauugccccuggacagacaggcaagaucgccgacuacaacuacaagcugcccgacgacuucaccggcugugugauugccuggaacagcaacaaccuggacuccaaagucggcggcaacuacaauuaccuguaccggcuguuccggaaguccaaucugaagcccuucgagcgggacaucagcaccgaaaucuaucaggccggcagcaccccuugcaacggcguggaaggcuucaacugcuacuucccacugcaguccuacggcuuucagcccacaaauggcgugggcuaucagcccuacagagugguggugcugagcuucgaacugcugcaugcuccugccacagugugcggcccuaagaaaagcaccaaucucgugaagaacaaaugcgugaacuucaacuucaacggccugaccggcaccggcgugcugacagagagcaacaagaaguuccugccauuccagcaguuuggccgggauaucgccgauaccacagacgccguuagagauccccagacacuggaaauccuggacaucaccccaugcagcuucggcggagugucugugaucaccccuggcaccaacaccagcaaucagguggcagugcuguaccaggacgugaacuguaccgaagugcccguggccauucacgccgaucagcugacaccuacauggcggguguacuccaccggcagcaauguguuucagaccagagccggcugucugaucggagccgagcacgugaacaauagcuacgagugcgacauccccaucggcgcuggcaucugugccagcuaccagacacagacaaacagccccagacgggcuagaagcguggccagccagagcaucauugccuacacaaugucucugggcgccgagaacagcguggccuacuccaacaacucuaucgcuauccccaccaacuucaccaucagcgugaccaccgagauccugccuguguccaugaccaagaccagcguggacugcaccauguacaucugcggcgauuccaccgagugcuccaaccugcugcugcaguacggcagcuucugcacccagcugaauagagcccugacagggaucgccguggaacaggacaagaacacccaagagguguucgcccaagugaagcaaaucuacaagaccccuccuaucaaggacuucggcggcuucaauuucagccagauucugcccgauccuagcaagcccagcaagcggagcuucaucgaggaccugcuguucaacaaagugacacuggccgacgccggcuucaucaagcaguauggcgauugucugggcgacauugccgccagggaucugauuugcgcccagaaguuuaacggacugacagugcugccuccucugcugaccgaugagaugaucgcccaguacacaucugcccugcuggccggcacaaucacaagcggcuggacauuuggagcuggcgccgcucugcagauccccuuugcuaugcagauggccuaccgguucaacggcaucggagugacccagugcgugcuguacgagaaccagaagcugaucgccaaccaguucaacagcgccaucggcaagauccaggacagccugagcagcacagcaagcgcccugggaaagcugcaggacguggucaaccagaaugcccaggcacugaacacccuggucaagcagcuguccuccaacuucggcgccaucagcucugugcugaacgauauccugagcagacuggacaaggucgaggccgaggugcagaucgacagacugaucacaggcagacugcagagccuccagacauacgugacccagcagcugaucagagccgccgagauuagagccucugccaaucuggccgccaccaagaugucugagugugugcugggccagagcaagagaguggacuuuugcggcaagggcuaccaccugaugagcuucccucagucugccccucacggcgugguguuucugcacgugacauaugugcccgcucaagagaagaauuucaccaccgcuccagccaucugccacgacggcaaagcccacuuuccuagagaaggcguguucguguccaacggcacccauugguucgugacacagcggaacuucuacgagccccagaucaucaccaccgacaacaccuucguguguggcaacugcgacguugugaucggcauugugaacaauaccguguacgacccucugcagcccgagcuggacagcuucaaagaggaacuggacaaguacuuuaagaaccacacaagccccgacguggaccugggcgauaucagcggaaucaaugccagcgucgugaacauccagaaagagaucgaccggcugaacgagguggccaagaaucugaacgagagccugaucgaccugcaagaacuggggaaguacgagcaguacaucaagggaggaucuggcuauauccccgaggcuccuagagauggccaggccuauguucggaaggauggcgaaugggugcugcugagcaccuuccuuuga

SEQ ID NO: 14137 - RNA, 4098 nt, Artificial Sequence
  SARS-CoV-2/Wuhan/WIV05/2019__EPI_ISL_402128 spike protein CDS gc mod (1-1211)(N914C_S1123C) WhcAg construct
auguucguguuucuggugcugcugccccugguguccagccagugugugaaccugaccaccagaacacagcugccuccagccuacaccaacagcuucaccagaggcguguacuaccccgacaagguguucagauccagcgugcugcacucuacccaggaccuguuccugccuuucuucagcaacgugaccugguuccacgccauccacguguccggcaccaauggcaccaagagauucgacaaccccgugcugcccuucaacgacgggguguacuuugccagcaccgagaaguccaacaucaucagaggcuggaucuucggcaccacacuggacagcaagacccagagccugcugaucgugaacaacgccaccaacguggucaucaaagugugcgaguuccaguucugcaacgaccccuuccugggcgucuacuaccacaagaacaacaagagcuggauggaaagcgaguuccggguguacagcagcgccaacaacugcaccuucgaguacgugucccagccuuuccugauggaccuggaaggcaagcagggcaacuucaagaaccugcgcgaguucguguucaagaacaucgacggcuacuucaaaaucuacagcaagcacaccccuaucaaccucgugcgggaucugccucagggcuucucugcucuggaaccccugguggaucugcccaucggcaucaacaucacccgguuucagacacugcuggcccugcacagaagcuaccugacaccuggcgauagcagcagcggauggacagcuggugccgccgcuuacuaugugggcuaccugcagccuagaaccuuccugcugaaguacaacgagaacggcaccaucaccgacgccguggauugugcucuggauccucugagcgagacaaagugcacccugaaguccuucaccguggaaaagggcaucuaccagaccagcaacuuccgggugcagcccaccgaauccaucgugcgguuccccaauaucaccaaucugugccccuucggcgagguguucaaugccaccagauucgccucuguguacgccuggaaccggaagcggaucagcaauugcguggccgacuacuccgugcuguacaacuccgccagcuucagcaccuucaagugcuacggcguguccccuaccaagcugaacgaccugugcuucacaaacguguacgccgacagcuucgugauccggggagaugaagugcggcagauugccccuggacagacaggcaagaucgccgacuacaacuacaagcugcccgacgacuucaccggcugugugauugccuggaacagcaacaaccuggacuccaaagucggcggcaacuacaauuaccuguaccggcuguuccggaaguccaaucugaagcccuucgagcgggacaucagcaccgaaaucuaucaggccggcagcaccccuugcaacggcguggaaggcuucaacugcuacuucccacugcaguccuacggcuuucagcccacaaauggcgugggcuaucagcccuacagagugguggugcugagcuucgaacugcugcaugcuccugccacagugugcggcccuaagaaaagcaccaaucucgugaagaacaaaugcgugaacuucaacuucaacggccugaccggcaccggcgugcugacagagagcaacaagaaguuccugccauuccagcaguuuggccgggauaucgccgauaccacagacgccguuagagauccccagacacuggaaauccuggacaucaccccaugcagcuucggcggagugucugugaucaccccuggcaccaacaccagcaaucagguggcagugcuguaccaggacgugaacuguaccgaagugcccguggccauucacgccgaucagcugacaccuacauggcggguguacuccaccggcagcaauguguuucagaccagagccggcugucugaucggagccgagcacgugaacaauagcuacgagugcgacauccccaucggcgcuggcaucugugccagcuaccagacacagacaaacagccccagacgggcuagaagcguggccagccagagcaucauugccuacacaaugucucugggcgccgagaacagcguggccuacuccaacaacucuaucgcuauccccaccaacuucaccaucagcgugaccaccgagauccugccuguguccaugaccaagaccagcguggacugcaccauguacaucugcggcgauuccaccgagugcuccaaccugcugcugcaguacggcagcuucugcacccagcugaauagagcccugacagggaucgccguggaacaggacaagaacacccaagagguguucgcccaagugaagcaaaucuacaagaccccuccuaucaaggacuucggcggcuucaauuucagccagauucugcccgauccuagcaagcccagcaagcggagcuucaucgaggaccugcuguucaacaaagugacacuggccgacgccggcuucaucaagcaguauggcgauugucugggcgacauugccgccagggaucugauuugcgcccagaaguuuaacggacugacagugcugccuccucugcugaccgaugagaugaucgcccaguacacaucugcccugcuggccggcacaaucacaagcggcuggacauuuggagcuggcgccgcucugcagauccccuuugcuaugcagauggccuaccgguucaacggcaucggagugacccagugcgugcuguacgagaaccagaagcugaucgccaaccaguucaacagcgccaucggcaagauccaggacagccugagcagcacagcaagcgcccugggaaagcugcaggacguggucaaccagaaugcccaggcacugaacacccuggucaagcagcuguccuccaacuucggcgccaucagcucugugcugaacgauauccugagcagacuggacaaggucgaggccgaggugcagaucgacagacugaucacaggcagacugcagagccuccagacauacgugacccagcagcugaucagagccgccgagauuagagccucugccaaucuggccgccaccaagaugucugagugugugcugggccagagcaagagaguggacuuuugcggcaagggcuaccaccugaugagcuucccucagucugccccucacggcgugguguuucugcacgugacauaugugcccgcucaagagaagaauuucaccaccgcuccagccaucugccacgacggcaaagcccacuuuccuagagaaggcguguucguguccaacggcacccauugguucgugacacagcggaacuucuacgagccccagaucaucaccaccgacaacaccuucguguguggcaacugcgacguugugaucggcauugugaacaauaccguguacgacccucugcagcccgagcuggacagcuucaaagaggaacuggacaaguacuuuaagaaccacacaagccccgacguggaccugggcgauaucagcggaaucaaugccagcgucgugaacauccagaaagagaucgaccggcugaacgagguggccaagaaucugaacgagagccugaucgaccugcaagaacuggggaaguacgagcaguacaucaagggaggcggaggaucugacaucgaccccuacaaagaguucggcagcagcuaccagcugcugaacuuccugccucuggacuucuuccccgaccugaacgcccugguggauacagccacagcucuguacgaggaagaacugaccggcagagagcacugcagcccucaccacacagccauuagacaggcccucgugugcugggacgagcugacaaaacugaucgccuggaugagcagcaacaucaccagcgagcaagugcggaccaucaucgugaaccacgugaacgauaccuggggccugaaagugcggcagagccugugguuucaccugagcugucugaccuucggccagcacaccgugcaagaguuucugguguccuucggcguguggaucagaaccccugcuccauacagaccuccaaacgcucccauccugagcacccugccugagcacacagugaucuguuga

SEQ ID NO: 14138 - RNA, 3924 nt, Artificial Sequence
  SARS-CoV-2/Wuhan/WIV05/2019__EPI_ISL_402128 spike protein CDS gc mod (1-1147)(N914C_S1123C) LumSynth construct
auguucguguuucuggugcugcugccccugguguccagccagugugugaaccugaccaccagaacacagcugccuccagccuacaccaacagcuucaccagaggcguguacuaccccgacaagguguucagauccagcgugcugcacucuacccaggaccuguuccugccuuucuucagcaacgugaccugguuccacgccauccacguguccggcaccaauggcaccaagagauucgacaaccccgugcugcccuucaacgacgggguguacuuugccagcaccgagaaguccaacaucaucagaggcuggaucuucggcaccacacuggacagcaagacccagagccugcugaucgugaacaacgccaccaacguggucaucaaagugugcgaguuccaguucugcaacgaccccuuccugggcgucuacuaccacaagaacaacaagagcuggauggaaagcgaguuccggguguacagcagcgccaacaacugcaccuucgaguacgugucccagccuuuccugauggaccuggaaggcaagcagggcaacuucaagaaccugcgcgaguucguguucaagaacaucgacggcuacuucaaaaucuacagcaagcacaccccuaucaaccucgugcgggaucugccucagggcuucucugcucuggaaccccugguggaucugcccaucggcaucaacaucacccgguuucagacacugcuggcccugcacagaagcuaccugacaccuggcgauagcagcagcggauggacagcuggugccgccgcuuacuaugugggcuaccugcagccuagaaccuuccugcugaaguacaacgagaacggcaccaucaccgacgccguggauugugcucuggauccucugagcgagacaaagugcacccugaaguccuucaccguggaaaagggcaucuaccagaccagcaacuuccgggugcagcccaccgaauccaucgugcgguuccccaauaucaccaaucugugccccuucggcgagguguucaaugccaccagauucgccucuguguacgccuggaaccggaagcggaucagcaauugcguggccgacuacuccgugcuguacaacuccgccagcuucagcaccuucaagugcuacggcguguccccuaccaagcugaacgaccugugcuucacaaacguguacgccgacagcuucgugauccggggagaugaagugcggcagauugccccuggacagacaggcaagaucgccgacuacaacuacaagcugcccgacgacuucaccggcugugugauugccuggaacagcaacaaccuggacuccaaagucggcggcaacuacaauuaccuguaccggcuguuccggaaguccaaucugaagcccuucgagcgggacaucagcaccgaaaucuaucaggccggcagcaccccuugcaacggcguggaaggcuucaacugcuacuucccacugcaguccuacggcuuucagcccacaaauggcgugggcuaucagcccuacagagugguggugcugagcuucgaacugcugcaugcuccugccacagugugcggcccuaagaaaagcaccaaucucgugaagaacaaaugcgugaacuucaacuucaacggccugaccggcaccggcgugcugacagagagcaacaagaaguuccugccauuccagcaguuuggccgggauaucgccgauaccacagacgccguuagagauccccagacacuggaaauccuggacaucaccccaugcagcuucggcggagugucugugaucaccccuggcaccaacaccagcaaucagguggcagugcuguaccaggacgugaacuguaccgaagugcccguggccauucacgccgaucagcugacaccuacauggcggguguacuccaccggcagcaauguguuucagaccagagccggcugucugaucggagccgagcacgugaacaauagcuacgagugcgacauccccaucggcgcuggcaucugugccagcuaccagacacagacaaacagccccagacgggcuagaagcguggccagccagagcaucauugccuacacaaugucucugggcgccgagaacagcguggccuacuccaacaacucuaucgcuauccccaccaacuucaccaucagcgugaccaccgagauccugccuguguccaugaccaagaccagcguggacugcaccauguacaucugcggcgauuccaccgagugcuccaaccugcugcugcaguacggcagcuucugcacccagcugaauagagcccugacagggaucgccguggaacaggacaagaacacccaagagguguucgcccaagugaagcaaaucuacaagaccccuccuaucaaggacuucggcggcuucaauuucagccagauucugcccgauccuagcaagcccagcaagcggagcuucaucgaggaccugcuguucaacaaagugacacuggccgacgccggcuucaucaagcaguauggcgauugucugggcgacauugccgccagggaucugauuugcgcccagaaguuuaacggacugacagugcugccuccucugcugaccgaugagaugaucgcccaguacacaucugcccugcuggccggcacaaucacaagcggcuggacauuuggagcuggcgccgcucugcagauccccuuugcuaugcagauggccuaccgguucaacggcaucggagugacccagugcgugcuguacgagaaccagaagcugaucgccaaccaguucaacagcgccaucggcaagauccaggacagccugagcagcacagcaagcgcccugggaaagcugcaggacguggucaaccagaaugcccaggcacugaacacccuggucaagcagcuguccuccaacuucggcgccaucagcucugugcugaacgauauccugagcagacuggacaaggucgaggccgaggugcagaucgacagacugaucacaggcagacugcagagccuccagacauacgugacccagcagcugaucagagccgccgagauuagagccucugccaaucuggccgccaccaagaugucugagugugugcugggccagagcaagagaguggacuuuugcggcaagggcuaccaccugaugagcuucccucagucugccccucacggcgugguguuucugcacgugacauaugugcccgcucaagagaagaauuucaccaccgcuccagccaucugccacgacggcaaagcccacuuuccuagagaaggcguguucguguccaacggcacccauugguucgugacacagcggaacuucuacgagccccagaucaucaccaccgacaacaccuucguguguggcaacugcgacguugugaucggcauugugaacaauaccguguacgacccucugcagcccgagcuggacagcggcggaggaucuggcggaggacagaucuacgagggcaagcugacagccgagggccugagauuuggaaucguggccagccgguucaaucacgcccugguggauagacugguggaaggcgccaucgaugccauugucagacacggcggcagagaagaggacaucacccucguuagagugcccggcucuugggagauuccuguggcugcuggcgagcuggcccggaaagaagauaucgacgccguuaucgccaucggcgugcugaucagaggcgccacaccucacuucgacuauaucgccagcgagguguccaaaggccuggccgaucugagccuggaacugagaaagcccaucaccuucggcgugaucaccgcugacacacuggaacaggccauugagagagccggcaccaagcacggcaacaaaggaugggaagccgcucuguccgccaucgagauggccaaccuguucaagagccugcgguga

SEQ ID NO: 14139 - RNA, 3948 nt, Artificial Sequence
  SARS-CoV-2/Wuhan/WIV05/2019__EPI_ISL_402128 spike protein CDS gc mod (1-1147)(N914C_S1123C) Ferritin construct
auguucguguuucuggugcugcugccccugguguccagccagugugugaaccugaccaccagaacacagcugccuccagccuacaccaacagcuucaccagaggcguguacuaccccgacaagguguucagauccagcgugcugcacucuacccaggaccuguuccugccuuucuucagcaacgugaccugguuccacgccauccacguguccggcaccaauggcaccaagagauucgacaaccccgugcugcccuucaacgacgggguguacuuugccagcaccgagaaguccaacaucaucagaggcuggaucuucggcaccacacuggacagcaagacccagagccugcugaucgugaacaacgccaccaacguggucaucaaagugugcgaguuccaguucugcaacgaccccuuccugggcgucuacuaccacaagaacaacaagagcuggauggaaagcgaguuccggguguacagcagcgccaacaacugcaccuucgaguacgugucccagccuuuccugauggaccuggaaggcaagcagggcaacuucaagaaccugcgcgaguucguguucaagaacaucgacggcuacuucaaaaucuacagcaagcacaccccuaucaaccucgugcgggaucugccucagggcuucucugcucuggaaccccugguggaucugcccaucggcaucaacaucacccgguuucagacacugcuggcccugcacagaagcuaccugacaccuggcgauagcagcagcggauggacagcuggugccgccgcuuacuaugugggcuaccugcagccuagaaccuuccugcugaaguacaacgagaacggcaccaucaccgacgccguggauugugcucuggauccucugagcgagacaaagugcacccugaaguccuucaccguggaaaagggcaucuaccagaccagcaacuuccgggugcagcccaccgaauccaucgugcgguuccccaauaucaccaaucugugccccuucggcgagguguucaaugccaccagauucgccucuguguacgccuggaaccggaagcggaucagcaauugcguggccgacuacuccgugcuguacaacuccgccagcuucagcaccuucaagugcuacggcguguccccuaccaagcugaacgaccugugcuucacaaacguguacgccgacagcuucgugauccggggagaugaagugcggcagauugccccuggacagacaggcaagaucgccgacuacaacuacaagcugcccgacgacuucaccggcugugugauugccuggaacagcaacaaccuggacuccaaagucggcggcaacuacaauuaccuguaccggcuguuccggaaguccaaucugaagcccuucgagcgggacaucagcaccgaaaucuaucaggccggcagcaccccuugcaacggcguggaaggcuucaacugcuacuucccacugcaguccuacggcuuucagcccacaaauggcgugggcuaucagcccuacagagugguggugcugagcuucgaacugcugcaugcuccugccacagugugcggcccuaagaaaagcaccaaucucgugaagaacaaaugcgugaacuucaacuucaacggccugaccggcaccggcgugcugacagagagcaacaagaaguuccugccauuccagcaguuuggccgggauaucgccgauaccacagacgccguuagagauccccagacacuggaaauccuggacaucaccccaugcagcuucggcggagugucugugaucaccccuggcaccaacaccagcaaucagguggcagugcuguaccaggacgugaacuguaccgaagugcccguggccauucacgccgaucagcugacaccuacauggcggguguacuccaccggcagcaauguguuucagaccagagccggcugucugaucggagccgagcacgugaacaauagcuacgagugcgacauccccaucggcgcuggcaucugugccagcuaccagacacagacaaacagccccagacgggcuagaagcguggccagccagagcaucauugccuacacaaugucucugggcgccgagaacagcguggccuacuccaacaacucuaucgcuauccccaccaacuucaccaucagcgugaccaccgagauccugccuguguccaugaccaagaccagcguggacugcaccauguacaucugcggcgauuccaccgagugcuccaaccugcugcugcaguacggcagcuucugcacccagcugaauagagcccugacagggaucgccguggaacaggacaagaacacccaagagguguucgcccaagugaagcaaaucuacaagaccccuccuaucaaggacuucggcggcuucaauuucagccagauucugcccgauccuagcaagcccagcaagcggagcuucaucgaggaccugcuguucaacaaagugacacuggccgacgccggcuucaucaagcaguauggcgauugucugggcgacauugccgccagggaucugauuugcgcccagaaguuuaacggacugacagugcugccuccucugcugaccgaugagaugaucgcccaguacacaucugcccugcuggccggcacaaucacaagcggcuggacauuuggagcuggcgccgcucugcagauccccuuugcuaugcagauggccuaccgguucaacggcaucggagugacccagugcgugcuguacgagaaccagaagcugaucgccaaccaguucaacagcgccaucggcaagauccaggacagccugagcagcacagcaagcgcccugggaaagcugcaggacguggucaaccagaaugcccaggcacugaacacccuggucaagcagcuguccuccaacuucggcgccaucagcucugugcugaacgauauccugagcagacuggacaaggucgaggccgaggugcagaucgacagacugaucacaggcagacugcagagccuccagacauacgugacccagcagcugaucagagccgccgagauuagagccucugccaaucuggccgccaccaagaugucugagugugugcugggccagagcaagagaguggacuuuugcggcaagggcuaccaccugaugagcuucccucagucugccccucacggcgugguguuucugcacgugacauaugugcccgcucaagagaagaauuucaccaccgcuccagccaucugccacgacggcaaagcccacuuuccuagagaaggcguguucguguccaacggcacccauugguucgugacacagcggaacuucuacgagccccagaucaucaccaccgacaacaccuucguguguggcaacugcgacguugugaucggcauugugaacaauaccguguacgacccucugcagcccgagcuggacagcggaggcggaggaucugacaucaucaagcugcugaacgagcaagugaacaaagagaugcagagcagcaaccuguacaugagcaugagcagcuggugcuacacccacagccuugauggcgccggacuguuccuguuugaucacgccgccgaggaauacgagcacgccaagaagcugaucaucuuccugaacgagaacaacgugcccgugcagcugaccagcauuucugccccugagcacaaguucgagggccugacacagaucuuccagaaggccuacgaacacgagcagcacaucagcgagagcaucaacaacaucguggaccacgccauuaagagcaaggaucacgccaccuucaacuuucugcagugguacguggccgaacagcacgaggaagaggugcuguucaaggacauccuggacaagaucgagcugaucggcaacgagaaccacggccuguaucuggccgaccaguacgugaagggaaucgccaagagcagaaagagcuga

SEQ ID NO: 14140 - RNA, 3534 nt, Artificial Sequence
  SARS-CoV-2/Wuhan/WIV05/2019__EPI_ISL_402128 spike protein CDS gc mod (1-1147)(N914C_S1123C) Foldon construct
auguucguguuucuggugcugcugccccugguguccagccagugugugaaccugaccaccagaacacagcugccuccagccuacaccaacagcuucaccagaggcguguacuaccccgacaagguguucagauccagcgugcugcacucuacccaggaccuguuccugccuuucuucagcaacgugaccugguuccacgccauccacguguccggcaccaauggcaccaagagauucgacaaccccgugcugcccuucaacgacgggguguacuuugccagcaccgagaaguccaacaucaucagaggcuggaucuucggcaccacacuggacagcaagacccagagccugcugaucgugaacaacgccaccaacguggucaucaaagugugcgaguuccaguucugcaacgaccccuuccugggcgucuacuaccacaagaacaacaagagcuggauggaaagcgaguuccggguguacagcagcgccaacaacugcaccuucgaguacgugucccagccuuuccugauggaccuggaaggcaagcagggcaacuucaagaaccugcgcgaguucguguucaagaacaucgacggcuacuucaaaaucuacagcaagcacaccccuaucaaccucgugcgggaucugccucagggcuucucugcucuggaaccccugguggaucugcccaucggcaucaacaucacccgguuucagacacugcuggcccugcacagaagcuaccugacaccuggcgauagcagcagcggauggacagcuggugccgccgcuuacuaugugggcuaccugcagccuagaaccuuccugcugaaguacaacgagaacggcaccaucaccgacgccguggauugugcucuggauccucugagcgagacaaagugcacccugaaguccuucaccguggaaaagggcaucuaccagaccagcaacuuccgggugcagcccaccgaauccaucgugcgguuccccaauaucaccaaucugugccccuucggcgagguguucaaugccaccagauucgccucuguguacgccuggaaccggaagcggaucagcaauugcguggccgacuacuccgugcuguacaacuccgccagcuucagcaccuucaagugcuacggcguguccccuaccaagcugaacgaccugugcuucacaaacguguacgccgacagcuucgugauccggggagaugaagugcggcagauugccccuggacagacaggcaagaucgccgacuacaacuacaagcugcccgacgacuucaccggcugugugauugccuggaacagcaacaaccuggacuccaaagucggcggcaacuacaauuaccuguaccggcuguuccggaaguccaaucugaagcccuucgagcgggacaucagcaccgaaaucuaucaggccggcagcaccccuugcaacggcguggaaggcuucaacugcuacuucccacugcaguccuacggcuuucagcccacaaauggcgugggcuaucagcccuacagagugguggugcugagcuucgaacugcugcaugcuccugccacagugugcggcccuaagaaaagcaccaaucucgugaagaacaaaugcgugaacuucaacuucaacggccugaccggcaccggcgugcugacagagagcaacaagaaguuccugccauuccagcaguuuggccgggauaucgccgauaccacagacgccguuagagauccccagacacuggaaauccuggacaucaccccaugcagcuucggcggagugucugugaucaccccuggcaccaacaccagcaaucagguggcagugcuguaccaggacgugaacuguaccgaagugcccguggccauucacgccgaucagcugacaccuacauggcggguguacuccaccggcagcaauguguuucagaccagagccggcugucugaucggagccgagcacgugaacaauagcuacgagugcgacauccccaucggcgcuggcaucugugccagcuaccagacacagacaaacagccccagacgggcuagaagcguggccagccagagcaucauugccuacacaaugucucugggcgccgagaacagcguggccuacuccaacaacucuaucgcuauccccaccaacuucaccaucagcgugaccaccgagauccugccuguguccaugaccaagaccagcguggacugcaccauguacaucugcggcgauuccaccgagugcuccaaccugcugcugcaguacggcagcuucugcacccagcugaauagagcccugacagggaucgccguggaacaggacaagaacacccaagagguguucgcccaagugaagcaaaucuacaagaccccuccuaucaaggacuucggcggcuucaauuucagccagauucugcccgauccuagcaagcccagcaagcggagcuucaucgaggaccugcuguucaacaaagugacacuggccgacgccggcuucaucaagcaguauggcgauugucugggcgacauugccgccagggaucugauuugcgcccagaaguuuaacggacugacagugcugccuccucugcugaccgaugagaugaucgcccaguacacaucugcccugcuggccggcacaaucacaagcggcuggacauuuggagcuggcgccgcucugcagauccccuuugcuaugcagauggccuaccgguucaacggcaucggagugacccagugcgugcuguacgagaaccagaagcugaucgccaaccaguucaacagcgccaucggcaagauccaggacagccugagcagcacagcaagcgcccugggaaagcugcaggacguggucaaccagaaugcccaggcacugaacacccuggucaagcagcuguccuccaacuucggcgccaucagcucugugcugaacgauauccugagcagacuggacaaggucgaggccgaggugcagaucgacagacugaucacaggcagacugcagagccuccagacauacgugacccagcagcugaucagagccgccgagauuagagccucugccaaucuggccgccaccaagaugucugagugugugcugggccagagcaagagaguggacuuuugcggcaagggcuaccaccugaugagcuucccucagucugccccucacggcgugguguuucugcacgugacauaugugcccgcucaagagaagaauuucaccaccgcuccagccaucugccacgacggcaaagcccacuuuccuagagaaggcguguucguguccaacggcacccauugguucgugacacagcggaacuucuacgagccccagaucaucaccaccgacaacaccuucguguguggcaacugcgacguugugaucggcauugugaacaauaccguguacgacccucugcagcccgagcuggacagcggaggaucuggcuauauccccgaggcuccuagagauggccaggccuauguucggaaggauggcgaaugggugcugcugagcaccuuccuuuga

SEQ ID NO: 14141 - RNA, 3906 nt, Artificial Sequence
  SARS-CoV-2/Wuhan/WIV05/2019__EPI_ISL_402128 spike protein CDS gc mod (1-1147)(N914C_S1123C) WhcAg construct
auguucguguuucuggugcugcugccccugguguccagccagugugugaaccugaccaccagaacacagcugccuccagccuacaccaacagcuucaccagaggcguguacuaccccgacaagguguucagauccagcgugcugcacucuacccaggaccuguuccugccuuucuucagcaacgugaccugguuccacgccauccacguguccggcaccaauggcaccaagagauucgacaaccccgugcugcccuucaacgacgggguguacuuugccagcaccgagaaguccaacaucaucagaggcuggaucuucggcaccacacuggacagcaagacccagagccugcugaucgugaacaacgccaccaacguggucaucaaagugugcgaguuccaguucugcaacgaccccuuccugggcgucuacuaccacaagaacaacaagagcuggauggaaagcgaguuccggguguacagcagcgccaacaacugcaccuucgaguacgugucccagccuuuccugauggaccuggaaggcaagcagggcaacuucaagaaccugcgcgaguucguguucaagaacaucgacggcuacuucaaaaucuacagcaagcacaccccuaucaaccucgugcgggaucugccucagggcuucucugcucuggaaccccugguggaucugcccaucggcaucaacaucacccgguuucagacacugcuggcccugcacagaagcuaccugacaccuggcgauagcagcagcggauggacagcuggugccgccgcuuacuaugugggcuaccugcagccuagaaccuuccugcugaaguacaacgagaacggcaccaucaccgacgccguggauugugcucuggauccucugagcgagacaaagugcacccugaaguccuucaccguggaaaagggcaucuaccagaccagcaacuuccgggugcagcccaccgaauccaucgugcgguuccccaauaucaccaaucugugccccuucggcgagguguucaaugccaccagauucgccucuguguacgccuggaaccggaagcggaucagcaauugcguggccgacuacuccgugcuguacaacuccgccagcuucagcaccuucaagugcuacggcguguccccuaccaagcugaacgaccugugcuucacaaacguguacgccgacagcuucgugauccggggagaugaagugcggcagauugccccuggacagacaggcaagaucgccgacuacaacuacaagcugcccgacgacuucaccggcugugugauugccuggaacagcaacaaccuggacuccaaagucggcggcaacuacaauuaccuguaccggcuguuccggaaguccaaucugaagcccuucgagcgggacaucagcaccgaaaucuaucaggccggcagcaccccuugcaacggcguggaaggcuucaacugcuacuucccacugcaguccuacggcuuucagcccacaaauggcgugggcuaucagcccuacagagugguggugcugagcuucgaacugcugcaugcuccugccacagugugcggcccuaagaaaagcaccaaucucgugaagaacaaaugcgugaacuucaacuucaacggccugaccggcaccggcgugcugacagagagcaacaagaaguuccugccauuccagcaguuuggccgggauaucgccgauaccacagacgccguuagagauccccagacacuggaaauccuggacaucaccccaugcagcuucggcggagugucugugaucaccccuggcaccaacaccagcaaucagguggcagugcuguaccaggacgugaacuguaccgaagugcccguggccauucacgccgaucagcugacaccuacauggcggguguacuccaccggcagcaauguguuucagaccagagccggcugucugaucggagccgagcacgugaacaauagcuacgagugcgacauccccaucggcgcuggcaucugugccagcuaccagacacagacaaacagccccagacgggcuagaagcguggccagccagagcaucauugccuacacaaugucucugggcgccgagaacagcguggccuacuccaacaacucuaucgcuauccccaccaacuucaccaucagcgugaccaccgagauccugccuguguccaugaccaagaccagcguggacugcaccauguacaucugcggcgauuccaccgagugcuccaaccugcugcugcaguacggcagcuucugcacccagcugaauagagcccugacagggaucgccguggaacaggacaagaacacccaagagguguucgcccaagugaagcaaaucuacaagaccccuccuaucaaggacuucggcggcuucaauuucagccagauucugcccgauccuagcaagcccagcaagcggagcuucaucgaggaccugcuguucaacaaagugacacuggccgacgccggcuucaucaagcaguauggcgauugucugggcgacauugccgccagggaucugauuugcgcccagaaguuuaacggacugacagugcugccuccucugcugaccgaugagaugaucgcccaguacacaucugcccugcuggccggcacaaucacaagcggcuggacauuuggagcuggcgccgcucugcagauccccuuugcuaugcagauggccuaccgguucaacggcaucggagugacccagugcgugcuguacgagaaccagaagcugaucgccaaccaguucaacagcgccaucggcaagauccaggacagccugagcagcacagcaagcgcccugggaaagcugcaggacguggucaaccagaaugcccaggcacugaacacccuggucaagcagcuguccuccaacuucggcgccaucagcucugugcugaacgauauccugagcagacuggacaaggucgaggccgaggugcagaucgacagacugaucacaggcagacugcagagccuccagacauacgugacccagcagcugaucagagccgccgagauuagagccucugccaaucuggccgccaccaagaugucugagugugugcugggccagagcaagagaguggacuuuugcggcaagggcuaccaccugaugagcuucccucagucugccccucacggcgugguguuucugcacgugacauaugugcccgcucaagagaagaauuucaccaccgcuccagccaucugccacgacggcaaagcccacuuuccuagagaaggcguguucguguccaacggcacccauugguucgugacacagcggaacuucuacgagccccagaucaucaccaccgacaacaccuucguguguggcaacugcgacguugugaucggcauugugaacaauaccguguacgacccucugcagcccgagcuggacagcggaggcggaggaucugacaucgaccccuacaaagaguucggcagcagcuaccagcugcugaacuuccugccucuggacuucuuccccgaccugaacgcccugguggauacagccacagcucuguacgaggaagaacugaccggcagagagcacugcagcccucaccacacagccauuagacaggcccucgugugcugggacgagcugacaaaacugaucgccuggaugagcagcaacaucaccagcgagcaagugcggaccaucaucgugaaccacgugaacgauaccuggggccugaaagugcggcagagccugugguuucaccugagcugucugaccuucggccagcacaccgugcaagaguuucugguguccuucggcguguggaucagaaccccugcuccauacagaccuccaaacgcucccauccugagcacccugccugagcacacagugaucuguuga

SEQ ID NO: 14142 - RNA, 4094 nt, Artificial Sequence
  SARS-CoV-2/Wuhan/WIV05/2019__EPI_ISL_402128 spike protein mRNA gc (1-1273)(N914C_S1123C)
aggagagucccgcagucggcguccagcggcucugcuuguucgugugugugucguugcaggccuuauucaagcuuaccauguucguguuccugguccuccugccccuggugagcucccagugcgugaaccucaccacccgcacgcagcugccgcccgccuacaccaacagcuucacccggggcgucuacuaccccgacaagguguuccgcuccagcgugcugcacuccacccaggaccucuuccugcccuucuucagcaacgucacgugguuccacgccauccacguguccgggaccaacggcaccaagcgguucgacaacccggugcugcccuucaacgacggggucuacuucgcgagcaccgagaaguccaacaucauccgcggcuggaucuucgggacgacccucgacagcaagacccagucccugcugaucgugaacaacgccaccaacguggucaucaaggugugcgaguuccaguucugcaacgaccccuuccucggcguguacuaccacaagaacaacaagagcuggauggaguccgaguuccgggucuacagcuccgccaacaacugcacguucgaguacgugagccagcccuuccugauggaccuggagggcaagcaggggaacuucaagaaccuccgcgaguucguguucaagaacaucgacggcuacuucaagaucuacuccaagcacaccccgaucaaccugguccgggaccugccccagggguucagcgcccucgagccccugguggaccugcccaucggcaucaacaucacccgcuuccagacccuccuggcccugcaccgguccuaccucacgccgggggacagcagcuccggcuggaccgcgggcgccgccgccuacuacgugggguaccugcagccccgcaccuuccugcucaaguacaacgagaacggcaccaucacggacgcggucgacugcgcccuggacccccugagcgagaccaagugcacccucaaguccuucaccguggagaaggggaucuaccagacgagcaacuuccgggugcagcccaccgaguccaucguccgcuucccgaacaucaccaaccugugccccuucggcgagguguucaacgccacccgguucgccagcgucuacgccuggaaccgcaagcggaucuccaacugcguggcggacuacagcgugcuguacaacuccgccagcuucuccacguucaagugcuacggcgucagccccaccaagcucaacgaccugugcuucaccaacguguacgccgacuccuucgugauccgcggggacgagguccggcagaucgcccccggccagaccgggaagaucgccgacuacaacuacaagcugccggacgacuucacgggcugcgugaucgcguggaacagcaacaaccucgacuccaaggucgggggcaacuacaacuaccuguaccgccuguuccgcaagagcaaccucaagcccuucgagcgggacaucuccaccgagaucuaccaggccggcagcacccccugcaacgggguggagggcuucaacugcuacuucccccugcaguccuacggguuccagccgaccaacggcgugggguaccagcccuaccggguggucgugcugagcuucgagcuccugcacgcccccgccacggugugcggccccaagaaguccaccaaccuggucaagaacaagugcgugaacuucaacuucaacggccucaccgggaccggcgugcugaccgagagcaacaagaaguuccugccguuccagcaguucgggcgcgacaucgccgacacgaccgacgcgguccgcgacccccagacccuggagauccucgacaucacccccugcagcuucggcgggguguccgugaucacgccgggcaccaacaccagcaaccaggucgccgugcuguaccaggacgugaacugcaccgagguccccguggccauccacgccgaccagcugacgcccaccuggcggguguacuccaccggcagcaacgucuuccagacccgcgccgggugccucaucggcgcggagcacgugaacaacuccuacgagugcgacauccccaucggggccggcaucugcgccagcuaccagacgcagaccaacuccccgcggcgcgcccggagcguggcgucccagagcaucaucgccuacaccaugucccugggcgccgagaacagcgucgccuacuccaacaacagcaucgccauccccaccaacuucacgaucuccgugaccaccgagauccugcccgugagcaugaccaagacgagcgucgacugcaccauguacaucugcggggacuccaccgagugcagcaaccuccugcugcaguacggcuccuucugcacccagcucaaccgcgcgcugacggggaucgccguggagcaggacaagaacacccaggagguguucgcccaggucaagcagaucuacaagacgcccccgaucaaggacuucggcggguucaacuucagccagauccugcccgaccccuccaagcccagcaagcgguccuucaucgaggaccuccuguucaacaaggugacccuggccgacgccggcuucaucaagcaguacggcgacugccucggggacaucgcggcccgcgaccugaucugcgcccagaaguucaacggccugaccgugcucccgccccugcugaccgacgagaugaucgcccaguacaccagcgcccuccuggcggggaccaucacguccggcuggaccuucggggccggcgccgcccugcagauccccuucgcgaugcagauggccuaccgguucaacggcaucggggucacccagugcgugcucuacgagaaccagaagcugaucgccaaccaguucaacagcgccaucggcaagauccaggacucccugagcuccaccgccagcgcgcucgggaagcugcaggacguggucaaccagaacgcccaggcccugaacacgcucgugaagcagcuguccagcaacuucggcgccaucuccagcgugcugaacgacauccucucccgccuggacaaggucgaggccgaggugcagaucgaccggcugaucaccgggcgccuccagagccugcagaccuacgugacccagcagcugauccgggcggccgagauccgcgccagcgccaaccucgccgcgaccaagauguccgagugcguccugggccagagcaagcggguggacuucugcggcaagggguaccaccugauguccuucccccagagcgccccgcacggcguggucuuccuccacgugacguacguccccgcccaggagaagaacuucaccaccgcccccgcgaucugccacgacgggaaggcccacuucccccgcgagggcguguucguguccaacgggacccacugguucgucacgcagcggaacuucuacgagccgcagaucaucaccaccgacaacaccuucgugugcggcaacugcgacguggucaucggcaucgugaacaacacgguguacgacccccugcagcccgagcuggacuccuucaaggaggagcucgacaaguacuucaagaaccacaccagccccgacgucgaccugggggacaucuccggcaucaacgccagcguggugaacauccagaaggagaucgaccgccugaacgaggucgccaagaaccucaacgagucccugaucgaccugcaggagcucgggaaguacgagcaguacaucaaguggccgugguacaucuggcugggcuucaucgccggccugaucgcgaucgugauggugaccaucaugcucugcugcaugaccagcugcugcuccugccugaaggggugcugcagcugcggcuccugcugcaaguucgacgaggacgacagcgagcccguccugaagggggugaagcuccacuacacgugaggacuagucccuguucccagagcccacuuuuuuuucuuuuuuugaaauaaaauagccugucuuucagaucucaaaggcucuuuucagagccaccaaaaaaaaaaaaaaaaaaaaaaaaaaaaaaaaaaaaaaaaaaaaaaaaaaaaaaaaaaaaaaaaaaaaaaaaaaaaaaaaaaaaaaaaaaaaaaaaaaaaa

SEQ ID NO: 14143 - RNA, 4388 nt, Artificial Sequence
  SARS-CoV-2/Wuhan/WIV05/2019__EPI_ISL_402128 spike protein mRNA gc (1-1211)(N914C_S1123C) LumSynth construct
aggagagucccgcagucggcguccagcggcucugcuuguucgugugugugucguugcaggccuuauucaagcuuaccauguucguguuccugguccuccugccccuggugagcucccagugcgugaaccucaccacccgcacgcagcugccgcccgccuacaccaacagcuucacccggggcgucuacuaccccgacaagguguuccgcuccagcgugcugcacuccacccaggaccucuuccugcccuucuucagcaacgucacgugguuccacgccauccacguguccgggaccaacggcaccaagcgguucgacaacccggugcugcccuucaacgacggggucuacuucgcgagcaccgagaaguccaacaucauccgcggcuggaucuucgggacgacccucgacagcaagacccagucccugcugaucgugaacaacgccaccaacguggucaucaaggugugcgaguuccaguucugcaacgaccccuuccucggcguguacuaccacaagaacaacaagagcuggauggaguccgaguuccgggucuacagcuccgccaacaacugcacguucgaguacgugagccagcccuuccugauggaccuggagggcaagcaggggaacuucaagaaccuccgcgaguucguguucaagaacaucgacggcuacuucaagaucuacuccaagcacaccccgaucaaccugguccgggaccugccccagggguucagcgcccucgagccccugguggaccugcccaucggcaucaacaucacccgcuuccagacccuccuggcccugcaccgguccuaccucacgccgggggacagcagcuccggcuggaccgcgggcgccgccgccuacuacgugggguaccugcagccccgcaccuuccugcucaaguacaacgagaacggcaccaucacggacgcggucgacugcgcccuggacccccugagcgagaccaagugcacccucaaguccuucaccguggagaaggggaucuaccagacgagcaacuuccgggugcagcccaccgaguccaucguccgcuucccgaacaucaccaaccugugccccuucggcgagguguucaacgccacccgguucgccagcgucuacgccuggaaccgcaagcggaucuccaacugcguggcggacuacagcgugcuguacaacuccgccagcuucuccacguucaagugcuacggcgucagccccaccaagcucaacgaccugugcuucaccaacguguacgccgacuccuucgugauccgcggggacgagguccggcagaucgcccccggccagaccgggaagaucgccgacuacaacuacaagcugccggacgacuucacgggcugcgugaucgcguggaacagcaacaaccucgacuccaaggucgggggcaacuacaacuaccuguaccgccuguuccgcaagagcaaccucaagcccuucgagcgggacaucuccaccgagaucuaccaggccggcagcacccccugcaacgggguggagggcuucaacugcuacuucccccugcaguccuacggguuccagccgaccaacggcgugggguaccagcccuaccggguggucgugcugagcuucgagcuccugcacgcccccgccacggugugcggccccaagaaguccaccaaccuggucaagaacaagugcgugaacuucaacuucaacggccucaccgggaccggcgugcugaccgagagcaacaagaaguuccugccguuccagcaguucgggcgcgacaucgccgacacgaccgacgcgguccgcgacccccagacccuggagauccucgacaucacccccugcagcuucggcgggguguccgugaucacgccgggcaccaacaccagcaaccaggucgccgugcuguaccaggacgugaacugcaccgagguccccguggccauccacgccgaccagcugacgcccaccuggcggguguacuccaccggcagcaacgucuuccagacccgcgccgggugccucaucggcgcggagcacgugaacaacuccuacgagugcgacauccccaucggggccggcaucugcgccagcuaccagacgcagaccaacuccccgcggcgcgcccggagcguggcgucccagagcaucaucgccuacaccaugucccugggcgccgagaacagcgucgccuacuccaacaacagcaucgccauccccaccaacuucacgaucuccgugaccaccgagauccugcccgugagcaugaccaagacgagcgucgacugcaccauguacaucugcggggacuccaccgagugcagcaaccuccugcugcaguacggcuccuucugcacccagcucaaccgcgcgcugacggggaucgccguggagcaggacaagaacacccaggagguguucgcccaggucaagcagaucuacaagacgcccccgaucaaggacuucggcggguucaacuucagccagauccugcccgaccccuccaagcccagcaagcgguccuucaucgaggaccuccuguucaacaaggugacccuggccgacgccggcuucaucaagcaguacggcgacugccucggggacaucgcggcccgcgaccugaucugcgcccagaaguucaacggccugaccgugcucccgccccugcugaccgacgagaugaucgcccaguacaccagcgcccuccuggcggggaccaucacguccggcuggaccuucggggccggcgccgcccugcagauccccuucgcgaugcagauggccuaccgguucaacggcaucggggucacccagugcgugcucuacgagaaccagaagcugaucgccaaccaguucaacagcgccaucggcaagauccaggacucccugagcuccaccgccagcgcgcucgggaagcugcaggacguggucaaccagaacgcccaggcccugaacacgcucgugaagcagcuguccagcaacuucggcgccaucuccagcgugcugaacgacauccucucccgccuggacaaggucgaggccgaggugcagaucgaccggcugaucaccgggcgccuccagagccugcagaccuacgugacccagcagcugauccgggcggccgagauccgcgccagcgccaaccucgccgcgaccaagauguccgagugcguccugggccagagcaagcggguggacuucugcggcaagggguaccaccugauguccuucccccagagcgccccgcacggcguggucuuccuccacgugacguacguccccgcccaggagaagaacuucaccaccgcccccgcgaucugccacgacgggaaggcccacuucccccgcgagggcguguucguguccaacgggacccacugguucgucacgcagcggaacuucuacgagccgcagaucaucaccaccgacaacaccuucgugugcggcaacugcgacguggucaucggcaucgugaacaacacgguguacgacccccugcagcccgagcuggacuccuucaaggaggagcucgacaaguacuucaagaaccacaccagccccgacgucgaccugggggacaucuccggcaucaacgccagcguggugaacauccagaaggagaucgaccgccugaacgaggucgccaagaaccucaacgagucccugaucgaccugcaggagcucgggaaguacgagcaguacaucaagggcggcgggagcgggggcgggcagaucuacgagggcaagcugaccgccgaggggcuccgcuucggcaucguggccagccgguucaaccacgcgcuggucgaccgccugguggagggggccaucgacgccaucgugcggcacggcgggcgcgaggaggacaucacccucguccgggugcccggcuccugggagaucccgguggccgccggcgagcuggcccgcaaggaggacaucgacgcggucaucgccaucggggugcugauccggggcgccacgccccacuucgacuacaucgccagcgagguguccaaggggcucgcggaccugagccuggagcuccgcaagcccaucaccuucggcgucaucaccgccgacacccuggagcaggccaucgagcgggccgggacgaagcacggcaacaagggcugggaggccgcgcuguccgccaucgagauggccaaccucuucaagagccugcgcugaggacuagucccuguucccagagcccacuuuuuuuucuuuuuuugaaauaaaauagccugucuuucagaucucaaaggcucuuuucagagccaccaaaaaaaaaaaaaaaaaaaaaaaaaaaaaaaaaaaaaaaaaaaaaaaaaaaaaaaaaaaaaaaaaaaaaaaaaaaaaaaaaaaaaaaaaaaaaaaaaaaaa

SEQ ID NO: 14144 - RNA, 4412 nt, Artificial Sequence
  SARS-CoV-2/Wuhan/WIV05/2019__EPI_ISL_402128 spike protein mRNA gc (1-1211)(N914C_S1123C) Ferritin construct
aggagagucccgcagucggcguccagcggcucugcuuguucgugugugugucguugcaggccuuauucaagcuuaccauguucguguuccugguccuccugccccuggugagcucccagugcgugaaccucaccacccgcacgcagcugccgcccgccuacaccaacagcuucacccggggcgucuacuaccccgacaagguguuccgcuccagcgugcugcacuccacccaggaccucuuccugcccuucuucagcaacgucacgugguuccacgccauccacguguccgggaccaacggcaccaagcgguucgacaacccggugcugcccuucaacgacggggucuacuucgcgagcaccgagaaguccaacaucauccgcggcuggaucuucgggacgacccucgacagcaagacccagucccugcugaucgugaacaacgccaccaacguggucaucaaggugugcgaguuccaguucugcaacgaccccuuccucggcguguacuaccacaagaacaacaagagcuggauggaguccgaguuccgggucuacagcuccgccaacaacugcacguucgaguacgugagccagcccuuccugauggaccuggagggcaagcaggggaacuucaagaaccuccgcgaguucguguucaagaacaucgacggcuacuucaagaucuacuccaagcacaccccgaucaaccugguccgggaccugccccagggguucagcgcccucgagccccugguggaccugcccaucggcaucaacaucacccgcuuccagacccuccuggcccugcaccgguccuaccucacgccgggggacagcagcuccggcuggaccgcgggcgccgccgccuacuacgugggguaccugcagccccgcaccuuccugcucaaguacaacgagaacggcaccaucacggacgcggucgacugcgcccuggacccccugagcgagaccaagugcacccucaaguccuucaccguggagaaggggaucuaccagacgagcaacuuccgggugcagcccaccgaguccaucguccgcuucccgaacaucaccaaccugugccccuucggcgagguguucaacgccacccgguucgccagcgucuacgccuggaaccgcaagcggaucuccaacugcguggcggacuacagcgugcuguacaacuccgccagcuucuccacguucaagugcuacggcgucagccccaccaagcucaacgaccugugcuucaccaacguguacgccgacuccuucgugauccgcggggacgagguccggcagaucgcccccggccagaccgggaagaucgccgacuacaacuacaagcugccggacgacuucacgggcugcgugaucgcguggaacagcaacaaccucgacuccaaggucgggggcaacuacaacuaccuguaccgccuguuccgcaagagcaaccucaagcccuucgagcgggacaucuccaccgagaucuaccaggccggcagcacccccugcaacgggguggagggcuucaacugcuacuucccccugcaguccuacggguuccagccgaccaacggcgugggguaccagcccuaccggguggucgugcugagcuucgagcuccugcacgcccccgccacggugugcggccccaagaaguccaccaaccuggucaagaacaagugcgugaacuucaacuucaacggccucaccgggaccggcgugcugaccgagagcaacaagaaguuccugccguuccagcaguucgggcgcgacaucgccgacacgaccgacgcgguccgcgacccccagacccuggagauccucgacaucacccccugcagcuucggcgggguguccgugaucacgccgggcaccaacaccagcaaccaggucgccgugcuguaccaggacgugaacugcaccgagguccccguggccauccacgccgaccagcugacgcccaccuggcggguguacuccaccggcagcaacgucuuccagacccgcgccgggugccucaucggcgcggagcacgugaacaacuccuacgagugcgacauccccaucggggccggcaucugcgccagcuaccagacgcagaccaacuccccgcggcgcgcccggagcguggcgucccagagcaucaucgccuacaccaugucccugggcgccgagaacagcgucgccuacuccaacaacagcaucgccauccccaccaacuucacgaucuccgugaccaccgagauccugcccgugagcaugaccaagacgagcgucgacugcaccauguacaucugcggggacuccaccgagugcagcaaccuccugcugcaguacggcuccuucugcacccagcucaaccgcgcgcugacggggaucgccguggagcaggacaagaacacccaggagguguucgcccaggucaagcagaucuacaagacgcccccgaucaaggacuucggcggguucaacuucagccagauccugcccgaccccuccaagcccagcaagcgguccuucaucgaggaccuccuguucaacaaggugacccuggccgacgccggcuucaucaagcaguacggcgacugccucggggacaucgcggcccgcgaccugaucugcgcccagaaguucaacggccugaccgugcucccgccccugcugaccgacgagaugaucgcccaguacaccagcgcccuccuggcggggaccaucacguccggcuggaccuucggggccggcgccgcccugcagauccccuucgcgaugcagauggccuaccgguucaacggcaucggggucacccagugcgugcucuacgagaaccagaagcugaucgccaaccaguucaacagcgccaucggcaagauccaggacucccugagcuccaccgccagcgcgcucgggaagcugcaggacguggucaaccagaacgcccaggcccugaacacgcucgugaagcagcuguccagcaacuucggcgccaucuccagcgugcugaacgacauccucucccgccuggacaaggucgaggccgaggugcagaucgaccggcugaucaccgggcgccuccagagccugcagaccuacgugacccagcagcugauccgggcggccgagauccgcgccagcgccaaccucgccgcgaccaagauguccgagugcguccugggccagagcaagcggguggacuucugcggcaagggguaccaccugauguccuucccccagagcgccccgcacggcguggucuuccuccacgugacguacguccccgcccaggagaagaacuucaccaccgcccccgcgaucugccacgacgggaaggcccacuucccccgcgagggcguguucguguccaacgggacccacugguucgucacgcagcggaacuucuacgagccgcagaucaucaccaccgacaacaccuucgugugcggcaacugcgacguggucaucggcaucgugaacaacacgguguacgacccccugcagcccgagcuggacuccuucaaggaggagcucgacaaguacuucaagaaccacaccagccccgacgucgaccugggggacaucuccggcaucaacgccagcguggugaacauccagaaggagaucgaccgccugaacgaggucgccaagaaccucaacgagucccugaucgaccugcaggagcucgggaaguacgagcaguacaucaagggcgggggcgggagcgacaucaucaagcuccugaacgagcaggucaacaaggagaugcaguccagcaaccuguacauguccaugagcuccuggugcuacacccacagccucgacggcgccgggcuguuccuguucgaccacgccgcggaggaguacgagcacgccaagaagcucaucaucuuccugaacgagaacaacgugcccgugcagcugaccuccaucagcgccccggagcacaaguucgagggccucacgcagaucuuccagaaggccuacgagcacgagcagcacaucuccgagagcaucaacaacaucguggaccacgccaucaaguccaaggaccacgcgaccuucaacuuccugcagugguacgucgccgagcagcacgaggaggaggugcuguucaaggacauccucgacaagaucgagcugaucgggaacgagaaccacggccuguaccucgccgaccaguacgugaaggggaucgccaagagccgcaaguccugaggacuagucccuguucccagagcccacuuuuuuuucuuuuuuugaaauaaaauagccugucuuucagaucucaaaggcucuuuucagagccaccaaaaaaaaaaaaaaaaaaaaaaaaaaaaaaaaaaaaaaaaaaaaaaaaaaaaaaaaaaaaaaaaaaaaaaaaaaaaaaaaaaaaaaaaaaaaaaaaaaaaa

SEQ ID NO: 14145 - RNA, 3998 nt, Artificial Sequence
  SARS-CoV-2/Wuhan/WIV05/2019__EPI_ISL_402128 spike protein mRNA gc (1-1211)(N914C_S1123C) Foldon construct
aggagagucccgcagucggcguccagcggcucugcuuguucgugugugugucguugcaggccuuauucaagcuuaccauguucguguuccugguccuccugccccuggugagcucccagugcgugaaccucaccacccgcacgcagcugccgcccgccuacaccaacagcuucacccggggcgucuacuaccccgacaagguguuccgcuccagcgugcugcacuccacccaggaccucuuccugcccuucuucagcaacgucacgugguuccacgccauccacguguccgggaccaacggcaccaagcgguucgacaacccggugcugcccuucaacgacggggucuacuucgcgagcaccgagaaguccaacaucauccgcggcuggaucuucgggacgacccucgacagcaagacccagucccugcugaucgugaacaacgccaccaacguggucaucaaggugugcgaguuccaguucugcaacgaccccuuccucggcguguacuaccacaagaacaacaagagcuggauggaguccgaguuccgggucuacagcuccgccaacaacugcacguucgaguacgugagccagcccuuccugauggaccuggagggcaagcaggggaacuucaagaaccuccgcgaguucguguucaagaacaucgacggcuacuucaagaucuacuccaagcacaccccgaucaaccugguccgggaccugccccagggguucagcgcccucgagccccugguggaccugcccaucggcaucaacaucacccgcuuccagacccuccuggcccugcaccgguccuaccucacgccgggggacagcagcuccggcuggaccgcgggcgccgccgccuacuacgugggguaccugcagccccgcaccuuccugcucaaguacaacgagaacggcaccaucacggacgcggucgacugcgcccuggacccccugagcgagaccaagugcacccucaaguccuucaccguggagaaggggaucuaccagacgagcaacuuccgggugcagcccaccgaguccaucguccgcuucccgaacaucaccaaccugugccccuucggcgagguguucaacgccacccgguucgccagcgucuacgccuggaaccgcaagcggaucuccaacugcguggcggacuacagcgugcuguacaacuccgccagcuucuccacguucaagugcuacggcgucagccccaccaagcucaacgaccugugcuucaccaacguguacgccgacuccuucgugauccgcggggacgagguccggcagaucgcccccggccagaccgggaagaucgccgacuacaacuacaagcugccggacgacuucacgggcugcgugaucgcguggaacagcaacaaccucgacuccaaggucgggggcaacuacaacuaccuguaccgccuguuccgcaagagcaaccucaagcccuucgagcgggacaucuccaccgagaucuaccaggccggcagcacccccugcaacgggguggagggcuucaacugcuacuucccccugcaguccuacggguuccagccgaccaacggcgugggguaccagcccuaccggguggucgugcugagcuucgagcuccugcacgcccccgccacggugugcggccccaagaaguccaccaaccuggucaagaacaagugcgugaacuucaacuucaacggccucaccgggaccggcgugcugaccgagagcaacaagaaguuccugccguuccagcaguucgggcgcgacaucgccgacacgaccgacgcgguccgcgacccccagacccuggagauccucgacaucacccccugcagcuucggcgggguguccgugaucacgccgggcaccaacaccagcaaccaggucgccgugcuguaccaggacgugaacugcaccgagguccccguggccauccacgccgaccagcugacgcccaccuggcggguguacuccaccggcagcaacgucuuccagacccgcgccgggugccucaucggcgcggagcacgugaacaacuccuacgagugcgacauccccaucggggccggcaucugcgccagcuaccagacgcagaccaacuccccgcggcgcgcccggagcguggcgucccagagcaucaucgccuacaccaugucccugggcgccgagaacagcgucgccuacuccaacaacagcaucgccauccccaccaacuucacgaucuccgugaccaccgagauccugcccgugagcaugaccaagacgagcgucgacugcaccauguacaucugcggggacuccaccgagugcagcaaccuccugcugcaguacggcuccuucugcacccagcucaaccgcgcgcugacggggaucgccguggagcaggacaagaacacccaggagguguucgcccaggucaagcagaucuacaagacgcccccgaucaaggacuucggcggguucaacuucagccagauccugcccgaccccuccaagcccagcaagcgguccuucaucgaggaccuccuguucaacaaggugacccuggccgacgccggcuucaucaagcaguacggcgacugccucggggacaucgcggcccgcgaccugaucugcgcccagaaguucaacggccugaccgugcucccgccccugcugaccgacgagaugaucgcccaguacaccagcgcccuccuggcggggaccaucacguccggcuggaccuucggggccggcgccgcccugcagauccccuucgcgaugcagauggccuaccgguucaacggcaucggggucacccagugcgugcucuacgagaaccagaagcugaucgccaaccaguucaacagcgccaucggcaagauccaggacucccugagcuccaccgccagcgcgcucgggaagcugcaggacguggucaaccagaacgcccaggcccugaacacgcucgugaagcagcuguccagcaacuucggcgccaucuccagcgugcugaacgacauccucucccgccuggacaaggucgaggccgaggugcagaucgaccggcugaucaccgggcgccuccagagccugcagaccuacgugacccagcagcugauccgggcggccgagauccgcgccagcgccaaccucgccgcgaccaagauguccgagugcguccugggccagagcaagcggguggacuucugcggcaagggguaccaccugauguccuucccccagagcgccccgcacggcguggucuuccuccacgugacguacguccccgcccaggagaagaacuucaccaccgcccccgcgaucugccacgacgggaaggcccacuucccccgcgagggcguguucguguccaacgggacccacugguucgucacgcagcggaacuucuacgagccgcagaucaucaccaccgacaacaccuucgugugcggcaacugcgacguggucaucggcaucgugaacaacacgguguacgacccccugcagcccgagcuggacuccuucaaggaggagcucgacaaguacuucaagaaccacaccagccccgacgucgaccugggggacaucuccggcaucaacgccagcguggugaacauccagaaggagaucgaccgccugaacgaggucgccaagaaccucaacgagucccugaucgaccugcaggagcucgggaaguacgagcaguacaucaagggcgggagcggcuacauccccgaggccccgcgcgacgggcaggccuacgugcggaaggacggcgaguggguccugcucagcaccuuccugugaggacuagucccuguucccagagcccacuuuuuuuucuuuuuuugaaauaaaauagccugucuuucagaucucaaaggcucuuuucagagccaccaaaaaaaaaaaaaaaaaaaaaaaaaaaaaaaaaaaaaaaaaaaaaaaaaaaaaaaaaaaaaaaaaaaaaaaaaaaaaaaaaaaaaaaaaaaaaaaaaaaaa

SEQ ID NO: 14146 - RNA, 4370 nt, Artificial Sequence
  SARS-CoV-2/Wuhan/WIV05/2019__EPI_ISL_402128 spike protein mRNA gc (1-1211)(N914C_S1123C) WhcAg construct
aggagagucccgcagucggcguccagcggcucugcuuguucgugugugugucguugcaggccuuauucaagcuuaccauguucguguuccugguccuccugccccuggugagcucccagugcgugaaccucaccacccgcacgcagcugccgcccgccuacaccaacagcuucacccggggcgucuacuaccccgacaagguguuccgcuccagcgugcugcacuccacccaggaccucuuccugcccuucuucagcaacgucacgugguuccacgccauccacguguccgggaccaacggcaccaagcgguucgacaacccggugcugcccuucaacgacggggucuacuucgcgagcaccgagaaguccaacaucauccgcggcuggaucuucgggacgacccucgacagcaagacccagucccugcugaucgugaacaacgccaccaacguggucaucaaggugugcgaguuccaguucugcaacgaccccuuccucggcguguacuaccacaagaacaacaagagcuggauggaguccgaguuccgggucuacagcuccgccaacaacugcacguucgaguacgugagccagcccuuccugauggaccuggagggcaagcaggggaacuucaagaaccuccgcgaguucguguucaagaacaucgacggcuacuucaagaucuacuccaagcacaccccgaucaaccugguccgggaccugccccagggguucagcgcccucgagccccugguggaccugcccaucggcaucaacaucacccgcuuccagacccuccuggcccugcaccgguccuaccucacgccgggggacagcagcuccggcuggaccgcgggcgccgccgccuacuacgugggguaccugcagccccgcaccuuccugcucaaguacaacgagaacggcaccaucacggacgcggucgacugcgcccuggacccccugagcgagaccaagugcacccucaaguccuucaccguggagaaggggaucuaccagacgagcaacuuccgggugcagcccaccgaguccaucguccgcuucccgaacaucaccaaccugugccccuucggcgagguguucaacgccacccgguucgccagcgucuacgccuggaaccgcaagcggaucuccaacugcguggcggacuacagcgugcuguacaacuccgccagcuucuccacguucaagugcuacggcgucagccccaccaagcucaacgaccugugcuucaccaacguguacgccgacuccuucgugauccgcggggacgagguccggcagaucgcccccggccagaccgggaagaucgccgacuacaacuacaagcugccggacgacuucacgggcugcgugaucgcguggaacagcaacaaccucgacuccaaggucgggggcaacuacaacuaccuguaccgccuguuccgcaagagcaaccucaagcccuucgagcgggacaucuccaccgagaucuaccaggccggcagcacccccugcaacgggguggagggcuucaacugcuacuucccccugcaguccuacggguuccagccgaccaacggcgugggguaccagcccuaccggguggucgugcugagcuucgagcuccugcacgcccccgccacggugugcggccccaagaaguccaccaaccuggucaagaacaagugcgugaacuucaacuucaacggccucaccgggaccggcgugcugaccgagagcaacaagaaguuccugccguuccagcaguucgggcgcgacaucgccgacacgaccgacgcgguccgcgacccccagacccuggagauccucgacaucacccccugcagcuucggcgggguguccgugaucacgccgggcaccaacaccagcaaccaggucgccgugcuguaccaggacgugaacugcaccgagguccccguggccauccacgccgaccagcugacgcccaccuggcggguguacuccaccggcagcaacgucuuccagacccgcgccgggugccucaucggcgcggagcacgugaacaacuccuacgagugcgacauccccaucggggccggcaucugcgccagcuaccagacgcagaccaacuccccgcggcgcgcccggagcguggcgucccagagcaucaucgccuacaccaugucccugggcgccgagaacagcgucgccuacuccaacaacagcaucgccauccccaccaacuucacgaucuccgugaccaccgagauccugcccgugagcaugaccaagacgagcgucgacugcaccauguacaucugcggggacuccaccgagugcagcaaccuccugcugcaguacggcuccuucugcacccagcucaaccgcgcgcugacggggaucgccguggagcaggacaagaacacccaggagguguucgcccaggucaagcagaucuacaagacgcccccgaucaaggacuucggcggguucaacuucagccagauccugcccgaccccuccaagcccagcaagcgguccuucaucgaggaccuccuguucaacaaggugacccuggccgacgccggcuucaucaagcaguacggcgacugccucggggacaucgcggcccgcgaccugaucugcgcccagaaguucaacggccugaccgugcucccgccccugcugaccgacgagaugaucgcccaguacaccagcgcccuccuggcggggaccaucacguccggcuggaccuucggggccggcgccgcccugcagauccccuucgcgaugcagauggccuaccgguucaacggcaucggggucacccagugcgugcucuacgagaaccagaagcugaucgccaaccaguucaacagcgccaucggcaagauccaggacucccugagcuccaccgccagcgcgcucgggaagcugcaggacguggucaaccagaacgcccaggcccugaacacgcucgugaagcagcuguccagcaacuucggcgccaucuccagcgugcugaacgacauccucucccgccuggacaaggucgaggccgaggugcagaucgaccggcugaucaccgggcgccuccagagccugcagaccuacgugacccagcagcugauccgggcggccgagauccgcgccagcgccaaccucgccgcgaccaagauguccgagugcguccugggccagagcaagcggguggacuucugcggcaagggguaccaccugauguccuucccccagagcgccccgcacggcguggucuuccuccacgugacguacguccccgcccaggagaagaacuucaccaccgcccccgcgaucugccacgacgggaaggcccacuucccccgcgagggcguguucguguccaacgggacccacugguucgucacgcagcggaacuucuacgagccgcagaucaucaccaccgacaacaccuucgugugcggcaacugcgacguggucaucggcaucgugaacaacacgguguacgacccccugcagcccgagcuggacuccuucaaggaggagcucgacaaguacuucaagaaccacaccagccccgacgucgaccugggggacaucuccggcaucaacgccagcguggugaacauccagaaggagaucgaccgccugaacgaggucgccaagaaccucaacgagucccugaucgaccugcaggagcucgggaaguacgagcaguacaucaagggcgggggcgggagcgacaucgaccccuacaaggaguucggcagcuccuaccagcugcucaacuuccugccccuggacuucuuccccgaccucaacgcccugguggacaccgccaccgcgcuguacgaggaggagcucacggggcgcgagcacugcagcccccaccacaccgccauccggcaggcccuggucugcugggacgagcugaccaagcucaucgccuggauguccagcaacaucaccuccgagcagguccgcacgaucaucgugaaccacgucaacgacaccuggggccugaaggugcggcagagccugugguuccaccucuccugccugaccuucgggcagcacaccgugcaggaguuccuggucagcuucggcguguggauccgcacgcccgccccguaccggccgcccaacgcgccgauccucuccacccugccggagcacaccgugaucugcugaggacuagucccuguucccagagcccacuuuuuuuucuuuuuuugaaauaaaauagccugucuuucagaucucaaaggcucuuuucagagccaccaaaaaaaaaaaaaaaaaaaaaaaaaaaaaaaaaaaaaaaaaaaaaaaaaaaaaaaaaaaaaaaaaaaaaaaaaaaaaaaaaaaaaaaaaaaaaaaaaaaaa

SEQ ID NO: 14147 - RNA, 4196 nt, Artificial Sequence
  SARS-CoV-2/Wuhan/WIV05/2019__EPI_ISL_402128 spike protein mRNA gc (1-1147)(N914C_S1123C) LumSynth construct
aggagagucccgcagucggcguccagcggcucugcuuguucgugugugugucguugcaggccuuauucaagcuuaccauguucguguuccugguccuccugccccuggugagcucccagugcgugaaccucaccacccgcacgcagcugccgcccgccuacaccaacagcuucacccggggcgucuacuaccccgacaagguguuccgcuccagcgugcugcacuccacccaggaccucuuccugcccuucuucagcaacgucacgugguuccacgccauccacguguccgggaccaacggcaccaagcgguucgacaacccggugcugcccuucaacgacggggucuacuucgcgagcaccgagaaguccaacaucauccgcggcuggaucuucgggacgacccucgacagcaagacccagucccugcugaucgugaacaacgccaccaacguggucaucaaggugugcgaguuccaguucugcaacgaccccuuccucggcguguacuaccacaagaacaacaagagcuggauggaguccgaguuccgggucuacagcuccgccaacaacugcacguucgaguacgugagccagcccuuccugauggaccuggagggcaagcaggggaacuucaagaaccuccgcgaguucguguucaagaacaucgacggcuacuucaagaucuacuccaagcacaccccgaucaaccugguccgggaccugccccagggguucagcgcccucgagccccugguggaccugcccaucggcaucaacaucacccgcuuccagacccuccuggcccugcaccgguccuaccucacgccgggggacagcagcuccggcuggaccgcgggcgccgccgccuacuacgugggguaccugcagccccgcaccuuccugcucaaguacaacgagaacggcaccaucacggacgcggucgacugcgcccuggacccccugagcgagaccaagugcacccucaaguccuucaccguggagaaggggaucuaccagacgagcaacuuccgggugcagcccaccgaguccaucguccgcuucccgaacaucaccaaccugugccccuucggcgagguguucaacgccacccgguucgccagcgucuacgccuggaaccgcaagcggaucuccaacugcguggcggacuacagcgugcuguacaacuccgccagcuucuccacguucaagugcuacggcgucagccccaccaagcucaacgaccugugcuucaccaacguguacgccgacuccuucgugauccgcggggacgagguccggcagaucgcccccggccagaccgggaagaucgccgacuacaacuacaagcugccggacgacuucacgggcugcgugaucgcguggaacagcaacaaccucgacuccaaggucgggggcaacuacaacuaccuguaccgccuguuccgcaagagcaaccucaagcccuucgagcgggacaucuccaccgagaucuaccaggccggcagcacccccugcaacgggguggagggcuucaacugcuacuucccccugcaguccuacggguuccagccgaccaacggcgugggguaccagcccuaccggguggucgugcugagcuucgagcuccugcacgcccccgccacggugugcggccccaagaaguccaccaaccuggucaagaacaagugcgugaacuucaacuucaacggccucaccgggaccggcgugcugaccgagagcaacaagaaguuccugccguuccagcaguucgggcgcgacaucgccgacacgaccgacgcgguccgcgacccccagacccuggagauccucgacaucacccccugcagcuucggcgggguguccgugaucacgccgggcaccaacaccagcaaccaggucgccgugcuguaccaggacgugaacugcaccgagguccccguggccauccacgccgaccagcugacgcccaccuggcggguguacuccaccggcagcaacgucuuccagacccgcgccgggugccucaucggcgcggagcacgugaacaacuccuacgagugcgacauccccaucggggccggcaucugcgccagcuaccagacgcagaccaacuccccgcggcgcgcccggagcguggcgucccagagcaucaucgccuacaccaugucccugggcgccgagaacagcgucgccuacuccaacaacagcaucgccauccccaccaacuucacgaucuccgugaccaccgagauccugcccgugagcaugaccaagacgagcgucgacugcaccauguacaucugcggggacuccaccgagugcagcaaccuccugcugcaguacggcuccuucugcacccagcucaaccgcgcgcugacggggaucgccguggagcaggacaagaacacccaggagguguucgcccaggucaagcagaucuacaagacgcccccgaucaaggacuucggcggguucaacuucagccagauccugcccgaccccuccaagcccagcaagcgguccuucaucgaggaccuccuguucaacaaggugacccuggccgacgccggcuucaucaagcaguacggcgacugccucggggacaucgcggcccgcgaccugaucugcgcccagaaguucaacggccugaccgugcucccgccccugcugaccgacgagaugaucgcccaguacaccagcgcccuccuggcggggaccaucacguccggcuggaccuucggggccggcgccgcccugcagauccccuucgcgaugcagauggccuaccgguucaacggcaucggggucacccagugcgugcucuacgagaaccagaagcugaucgccaaccaguucaacagcgccaucggcaagauccaggacucccugagcuccaccgccagcgcgcucgggaagcugcaggacguggucaaccagaacgcccaggcccugaacacgcucgugaagcagcuguccagcaacuucggcgccaucuccagcgugcugaacgacauccucucccgccuggacaaggucgaggccgaggugcagaucgaccggcugaucaccgggcgccuccagagccugcagaccuacgugacccagcagcugauccgggcggccgagauccgcgccagcgccaaccucgccgcgaccaagauguccgagugcguccugggccagagcaagcggguggacuucugcggcaagggguaccaccugauguccuucccccagagcgccccgcacggcguggucuuccuccacgugacguacguccccgcccaggagaagaacuucaccaccgcccccgcgaucugccacgacgggaaggcccacuucccccgcgagggcguguucguguccaacgggacccacugguucgucacgcagcggaacuucuacgagccgcagaucaucaccaccgacaacaccuucgugugcggcaacugcgacguggucaucggcaucgugaacaacacgguguacgacccccugcagcccgagcuggacuccggcggcgggagcgggggcgggcagaucuacgagggcaagcugaccgccgaggggcuccgcuucggcaucguggccagccgguucaaccacgcgcuggucgaccgccugguggagggggccaucgacgccaucgugcggcacggcgggcgcgaggaggacaucacccucguccgggugcccggcuccugggagaucccgguggccgccggcgagcuggcccgcaaggaggacaucgacgcggucaucgccaucggggugcugauccggggcgccacgccccacuucgacuacaucgccagcgagguguccaaggggcucgcggaccugagccuggagcuccgcaagcccaucaccuucggcgucaucaccgccgacacccuggagcaggccaucgagcgggccgggacgaagcacggcaacaagggcugggaggccgcgcuguccgccaucgagauggccaaccucuucaagagccugcgcugaggacuagucccuguucccagagcccacuuuuuuuucuuuuuuugaaauaaaauagccugucuuucagaucucaaaggcucuuuucagagccaccaaaaaaaaaaaaaaaaaaaaaaaaaaaaaaaaaaaaaaaaaaaaaaaaaaaaaaaaaaaaaaaaaaaaaaaaaaaaaaaaaaaaaaaaaaaaaaaaaaaaa

SEQ ID NO: 14148 - RNA, 4220 nt, Artificial Sequence
  SARS-CoV-2/Wuhan/WIV05/2019__EPI_ISL_402128 spike protein mRNA gc (1-1147)(N914C_S1123C) Ferritin construct
aggagagucccgcagucggcguccagcggcucugcuuguucgugugugugucguugcaggccuuauucaagcuuaccauguucguguuccugguccuccugccccuggugagcucccagugcgugaaccucaccacccgcacgcagcugccgcccgccuacaccaacagcuucacccggggcgucuacuaccccgacaagguguuccgcuccagcgugcugcacuccacccaggaccucuuccugcccuucuucagcaacgucacgugguuccacgccauccacguguccgggaccaacggcaccaagcgguucgacaacccggugcugcccuucaacgacggggucuacuucgcgagcaccgagaaguccaacaucauccgcggcuggaucuucgggacgacccucgacagcaagacccagucccugcugaucgugaacaacgccaccaacguggucaucaaggugugcgaguuccaguucugcaacgaccccuuccucggcguguacuaccacaagaacaacaagagcuggauggaguccgaguuccgggucuacagcuccgccaacaacugcacguucgaguacgugagccagcccuuccugauggaccuggagggcaagcaggggaacuucaagaaccuccgcgaguucguguucaagaacaucgacggcuacuucaagaucuacuccaagcacaccccgaucaaccugguccgggaccugccccagggguucagcgcccucgagccccugguggaccugcccaucggcaucaacaucacccgcuuccagacccuccuggcccugcaccgguccuaccucacgccgggggacagcagcuccggcuggaccgcgggcgccgccgccuacuacgugggguaccugcagccccgcaccuuccugcucaaguacaacgagaacggcaccaucacggacgcggucgacugcgcccuggacccccugagcgagaccaagugcacccucaaguccuucaccguggagaaggggaucuaccagacgagcaacuuccgggugcagcccaccgaguccaucguccgcuucccgaacaucaccaaccugugccccuucggcgagguguucaacgccacccgguucgccagcgucuacgccuggaaccgcaagcggaucuccaacugcguggcggacuacagcgugcuguacaacuccgccagcuucuccacguucaagugcuacggcgucagccccaccaagcucaacgaccugugcuucaccaacguguacgccgacuccuucgugauccgcggggacgagguccggcagaucgcccccggccagaccgggaagaucgccgacuacaacuacaagcugccggacgacuucacgggcugcgugaucgcguggaacagcaacaaccucgacuccaaggucgggggcaacuacaacuaccuguaccgccuguuccgcaagagcaaccucaagcccuucgagcgggacaucuccaccgagaucuaccaggccggcagcacccccugcaacgggguggagggcuucaacugcuacuucccccugcaguccuacggguuccagccgaccaacggcgugggguaccagcccuaccggguggucgugcugagcuucgagcuccugcacgcccccgccacggugugcggccccaagaaguccaccaaccuggucaagaacaagugcgugaacuucaacuucaacggccucaccgggaccggcgugcugaccgagagcaacaagaaguuccugccguuccagcaguucgggcgcgacaucgccgacacgaccgacgcgguccgcgacccccagacccuggagauccucgacaucacccccugcagcuucggcgggguguccgugaucacgccgggcaccaacaccagcaaccaggucgccgugcuguaccaggacgugaacugcaccgagguccccguggccauccacgccgaccagcugacgcccaccuggcggguguacuccaccggcagcaacgucuuccagacccgcgccgggugccucaucggcgcggagcacgugaacaacuccuacgagugcgacauccccaucggggccggcaucugcgccagcuaccagacgcagaccaacuccccgcggcgcgcccggagcguggcgucccagagcaucaucgccuacaccaugucccugggcgccgagaacagcgucgccuacuccaacaacagcaucgccauccccaccaacuucacgaucuccgugaccaccgagauccugcccgugagcaugaccaagacgagcgucgacugcaccauguacaucugcggggacuccaccgagugcagcaaccuccugcugcaguacggcuccuucugcacccagcucaaccgcgcgcugacggggaucgccguggagcaggacaagaacacccaggagguguucgcccaggucaagcagaucuacaagacgcccccgaucaaggacuucggcggguucaacuucagccagauccugcccgaccccuccaagcccagcaagcgguccuucaucgaggaccuccuguucaacaaggugacccuggccgacgccggcuucaucaagcaguacggcgacugccucggggacaucgcggcccgcgaccugaucugcgcccagaaguucaacggccugaccgugcucccgccccugcugaccgacgagaugaucgcccaguacaccagcgcccuccuggcggggaccaucacguccggcuggaccuucggggccggcgccgcccugcagauccccuucgcgaugcagauggccuaccgguucaacggcaucggggucacccagugcgugcucuacgagaaccagaagcugaucgccaaccaguucaacagcgccaucggcaagauccaggacucccugagcuccaccgccagcgcgcucgggaagcugcaggacguggucaaccagaacgcccaggcccugaacacgcucgugaagcagcuguccagcaacuucggcgccaucuccagcgugcugaacgacauccucucccgccuggacaaggucgaggccgaggugcagaucgaccggcugaucaccgggcgccuccagagccugcagaccuacgugacccagcagcugauccgggcggccgagauccgcgccagcgccaaccucgccgcgaccaagauguccgagugcguccugggccagagcaagcggguggacuucugcggcaagggguaccaccugauguccuucccccagagcgccccgcacggcguggucuuccuccacgugacguacguccccgcccaggagaagaacuucaccaccgcccccgcgaucugccacgacgggaaggcccacuucccccgcgagggcguguucguguccaacgggacccacugguucgucacgcagcggaacuucuacgagccgcagaucaucaccaccgacaacaccuucgugugcggcaacugcgacguggucaucggcaucgugaacaacacgguguacgacccccugcagcccgagcuggacuccggcgggggcgggagcgacaucaucaagcuccugaacgagcaggucaacaaggagaugcaguccagcaaccuguacauguccaugagcuccuggugcuacacccacagccucgacggcgccgggcuguuccuguucgaccacgccgcggaggaguacgagcacgccaagaagcucaucaucuuccugaacgagaacaacgugcccgugcagcugaccuccaucagcgccccggagcacaaguucgagggccucacgcagaucuuccagaaggccuacgagcacgagcagcacaucuccgagagcaucaacaacaucguggaccacgccaucaaguccaaggaccacgcgaccuucaacuuccugcagugguacgucgccgagcagcacgaggaggaggugcuguucaaggacauccucgacaagaucgagcugaucgggaacgagaaccacggccuguaccucgccgaccaguacgugaaggggaucgccaagagccgcaaguccugaggacuagucccuguucccagagcccacuuuuuuuucuuuuuuugaaauaaaauagccugucuuucagaucucaaaggcucuuuucagagccaccaaaaaaaaaaaaaaaaaaaaaaaaaaaaaaaaaaaaaaaaaaaaaaaaaaaaaaaaaaaaaaaaaaaaaaaaaaaaaaaaaaaaaaaaaaaaaaaaaaaaa

SEQ ID NO: 14149 - RNA, 3806 nt, Artificial Sequence
  SARS-CoV-2/Wuhan/WIV05/2019__EPI_ISL_402128 spike protein mRNA gc (1-1147)(N914C_S1123C) Foldon construct
aggagagucccgcagucggcguccagcggcucugcuuguucgugugugugucguugcaggccuuauucaagcuuaccauguucguguuccugguccuccugccccuggugagcucccagugcgugaaccucaccacccgcacgcagcugccgcccgccuacaccaacagcuucacccggggcgucuacuaccccgacaagguguuccgcuccagcgugcugcacuccacccaggaccucuuccugcccuucuucagcaacgucacgugguuccacgccauccacguguccgggaccaacggcaccaagcgguucgacaacccggugcugcccuucaacgacggggucuacuucgcgagcaccgagaaguccaacaucauccgcggcuggaucuucgggacgacccucgacagcaagacccagucccugcugaucgugaacaacgccaccaacguggucaucaaggugugcgaguuccaguucugcaacgaccccuuccucggcguguacuaccacaagaacaacaagagcuggauggaguccgaguuccgggucuacagcuccgccaacaacugcacguucgaguacgugagccagcccuuccugauggaccuggagggcaagcaggggaacuucaagaaccuccgcgaguucguguucaagaacaucgacggcuacuucaagaucuacuccaagcacaccccgaucaaccugguccgggaccugccccagggguucagcgcccucgagccccugguggaccugcccaucggcaucaacaucacccgcuuccagacccuccuggcccugcaccgguccuaccucacgccgggggacagcagcuccggcuggaccgcgggcgccgccgccuacuacgugggguaccugcagccccgcaccuuccugcucaaguacaacgagaacggcaccaucacggacgcggucgacugcgcccuggacccccugagcgagaccaagugcacccucaaguccuucaccguggagaaggggaucuaccagacgagcaacuuccgggugcagcccaccgaguccaucguccgcuucccgaacaucaccaaccugugccccuucggcgagguguucaacgccacccgguucgccagcgucuacgccuggaaccgcaagcggaucuccaacugcguggcggacuacagcgugcuguacaacuccgccagcuucuccacguucaagugcuacggcgucagccccaccaagcucaacgaccugugcuucaccaacguguacgccgacuccuucgugauccgcggggacgagguccggcagaucgcccccggccagaccgggaagaucgccgacuacaacuacaagcugccggacgacuucacgggcugcgugaucgcguggaacagcaacaaccucgacuccaaggucgggggcaacuacaacuaccuguaccgccuguuccgcaagagcaaccucaagcccuucgagcgggacaucuccaccgagaucuaccaggccggcagcacccccugcaacgggguggagggcuucaacugcuacuucccccugcaguccuacggguuccagccgaccaacggcgugggguaccagcccuaccggguggucgugcugagcuucgagcuccugcacgcccccgccacggugugcggccccaagaaguccaccaaccuggucaagaacaagugcgugaacuucaacuucaacggccucaccgggaccggcgugcugaccgagagcaacaagaaguuccugccguuccagcaguucgggcgcgacaucgccgacacgaccgacgcgguccgcgacccccagacccuggagauccucgacaucacccccugcagcuucggcgggguguccgugaucacgccgggcaccaacaccagcaaccaggucgccgugcuguaccaggacgugaacugcaccgagguccccguggccauccacgccgaccagcugacgcccaccuggcggguguacuccaccggcagcaacgucuuccagacccgcgccgggugccucaucggcgcggagcacgugaacaacuccuacgagugcgacauccccaucggggccggcaucugcgccagcuaccagacgcagaccaacuccccgcggcgcgcccggagcguggcgucccagagcaucaucgccuacaccaugucccugggcgccgagaacagcgucgccuacuccaacaacagcaucgccauccccaccaacuucacgaucuccgugaccaccgagauccugcccgugagcaugaccaagacgagcgucgacugcaccauguacaucugcggggacuccaccgagugcagcaaccuccugcugcaguacggcuccuucugcacccagcucaaccgcgcgcugacggggaucgccguggagcaggacaagaacacccaggagguguucgcccaggucaagcagaucuacaagacgcccccgaucaaggacuucggcggguucaacuucagccagauccugcccgaccccuccaagcccagcaagcgguccuucaucgaggaccuccuguucaacaaggugacccuggccgacgccggcuucaucaagcaguacggcgacugccucggggacaucgcggcccgcgaccugaucugcgcccagaaguucaacggccugaccgugcucccgccccugcugaccgacgagaugaucgcccaguacaccagcgcccuccuggcggggaccaucacguccggcuggaccuucggggccggcgccgcccugcagauccccuucgcgaugcagauggccuaccgguucaacggcaucggggucacccagugcgugcucuacgagaaccagaagcugaucgccaaccaguucaacagcgccaucggcaagauccaggacucccugagcuccaccgccagcgcgcucgggaagcugcaggacguggucaaccagaacgcccaggcccugaacacgcucgugaagcagcuguccagcaacuucggcgccaucuccagcgugcugaacgacauccucucccgccuggacaaggucgaggccgaggugcagaucgaccggcugaucaccgggcgccuccagagccugcagaccuacgugacccagcagcugauccgggcggccgagauccgcgccagcgccaaccucgccgcgaccaagauguccgagugcguccugggccagagcaagcggguggacuucugcggcaagggguaccaccugauguccuucccccagagcgccccgcacggcguggucuuccuccacgugacguacguccccgcccaggagaagaacuucaccaccgcccccgcgaucugccacgacgggaaggcccacuucccccgcgagggcguguucguguccaacgggacccacugguucgucacgcagcggaacuucuacgagccgcagaucaucaccaccgacaacaccuucgugugcggcaacugcgacguggucaucggcaucgugaacaacacgguguacgacccccugcagcccgagcuggacuccggcgggagcggcuacauccccgaggccccgcgcgacgggcaggccuacgugcggaaggacggcgaguggguccugcucagcaccuuccugugaggacuagucccuguucccagagcccacuuuuuuuucuuuuuuugaaauaaaauagccugucuuucagaucucaaaggcucuuuucagagccaccaaaaaaaaaaaaaaaaaaaaaaaaaaaaaaaaaaaaaaaaaaaaaaaaaaaaaaaaaaaaaaaaaaaaaaaaaaaaaaaaaaaaaaaaaaaaaaaaaaaaa

SEQ ID NO: 14150 - RNA, 4178 nt, Artificial Sequence
  SARS-CoV-2/Wuhan/WIV05/2019__EPI_ISL_402128 spike protein mRNA gc (1-1147)(N914C_S1123C) WhcAg construct
aggagagucccgcagucggcguccagcggcucugcuuguucgugugugugucguugcaggccuuauucaagcuuaccauguucguguuccugguccuccugccccuggugagcucccagugcgugaaccucaccacccgcacgcagcugccgcccgccuacaccaacagcuucacccggggcgucuacuaccccgacaagguguuccgcuccagcgugcugcacuccacccaggaccucuuccugcccuucuucagcaacgucacgugguuccacgccauccacguguccgggaccaacggcaccaagcgguucgacaacccggugcugcccuucaacgacggggucuacuucgcgagcaccgagaaguccaacaucauccgcggcuggaucuucgggacgacccucgacagcaagacccagucccugcugaucgugaacaacgccaccaacguggucaucaaggugugcgaguuccaguucugcaacgaccccuuccucggcguguacuaccacaagaacaacaagagcuggauggaguccgaguuccgggucuacagcuccgccaacaacugcacguucgaguacgugagccagcccuuccugauggaccuggagggcaagcaggggaacuucaagaaccuccgcgaguucguguucaagaacaucgacggcuacuucaagaucuacuccaagcacaccccgaucaaccugguccgggaccugccccagggguucagcgcccucgagccccugguggaccugcccaucggcaucaacaucacccgcuuccagacccuccuggcccugcaccgguccuaccucacgccgggggacagcagcuccggcuggaccgcgggcgccgccgccuacuacgugggguaccugcagccccgcaccuuccugcucaaguacaacgagaacggcaccaucacggacgcggucgacugcgcccuggacccccugagcgagaccaagugcacccucaaguccuucaccguggagaaggggaucuaccagacgagcaacuuccgggugcagcccaccgaguccaucguccgcuucccgaacaucaccaaccugugccccuucggcgagguguucaacgccacccgguucgccagcgucuacgccuggaaccgcaagcggaucuccaacugcguggcggacuacagcgugcuguacaacuccgccagcuucuccacguucaagugcuacggcgucagccccaccaagcucaacgaccugugcuucaccaacguguacgccgacuccuucgugauccgcggggacgagguccggcagaucgcccccggccagaccgggaagaucgccgacuacaacuacaagcugccggacgacuucacgggcugcgugaucgcguggaacagcaacaaccucgacuccaaggucgggggcaacuacaacuaccuguaccgccuguuccgcaagagcaaccucaagcccuucgagcgggacaucuccaccgagaucuaccaggccggcagcacccccugcaacgggguggagggcuucaacugcuacuucccccugcaguccuacggguuccagccgaccaacggcgugggguaccagcccuaccggguggucgugcugagcuucgagcuccugcacgcccccgccacggugugcggccccaagaaguccaccaaccuggucaagaacaagugcgugaacuucaacuucaacggccucaccgggaccggcgugcugaccgagagcaacaagaaguuccugccguuccagcaguucgggcgcgacaucgccgacacgaccgacgcgguccgcgacccccagacccuggagauccucgacaucacccccugcagcuucggcgggguguccgugaucacgccgggcaccaacaccagcaaccaggucgccgugcuguaccaggacgugaacugcaccgagguccccguggccauccacgccgaccagcugacgcccaccuggcggguguacuccaccggcagcaacgucuuccagacccgcgccgggugccucaucggcgcggagcacgugaacaacuccuacgagugcgacauccccaucggggccggcaucugcgccagcuaccagacgcagaccaacuccccgcggcgcgcccggagcguggcgucccagagcaucaucgccuacaccaugucccugggcgccgagaacagcgucgccuacuccaacaacagcaucgccauccccaccaacuucacgaucuccgugaccaccgagauccugcccgugagcaugaccaagacgagcgucgacugcaccauguacaucugcggggacuccaccgagugcagcaaccuccugcugcaguacggcuccuucugcacccagcucaaccgcgcgcugacggggaucgccguggagcaggacaagaacacccaggagguguucgcccaggucaagcagaucuacaagacgcccccgaucaaggacuucggcggguucaacuucagccagauccugcccgaccccuccaagcccagcaagcgguccuucaucgaggaccuccuguucaacaaggugacccuggccgacgccggcuucaucaagcaguacggcgacugccucggggacaucgcggcccgcgaccugaucugcgcccagaaguucaacggccugaccgugcucccgccccugcugaccgacgagaugaucgcccaguacaccagcgcccuccuggcggggaccaucacguccggcuggaccuucggggccggcgccgcccugcagauccccuucgcgaugcagauggccuaccgguucaacggcaucggggucacccagugcgugcucuacgagaaccagaagcugaucgccaaccaguucaacagcgccaucggcaagauccaggacucccugagcuccaccgccagcgcgcucgggaagcugcaggacguggucaaccagaacgcccaggcccugaacacgcucgugaagcagcuguccagcaacuucggcgccaucuccagcgugcugaacgacauccucucccgccuggacaaggucgaggccgaggugcagaucgaccggcugaucaccgggcgccuccagagccugcagaccuacgugacccagcagcugauccgggcggccgagauccgcgccagcgccaaccucgccgcgaccaagauguccgagugcguccugggccagagcaagcggguggacuucugcggcaagggguaccaccugauguccuucccccagagcgccccgcacggcguggucuuccuccacgugacguacguccccgcccaggagaagaacuucaccaccgcccccgcgaucugccacgacgggaaggcccacuucccccgcgagggcguguucguguccaacgggacccacugguucgucacgcagcggaacuucuacgagccgcagaucaucaccaccgacaacaccuucgugugcggcaacugcgacguggucaucggcaucgugaacaacacgguguacgacccccugcagcccgagcuggacuccggcgggggcgggagcgacaucgaccccuacaaggaguucggcagcuccuaccagcugcucaacuuccugccccuggacuucuuccccgaccucaacgcccugguggacaccgccaccgcgcuguacgaggaggagcucacggggcgcgagcacugcagcccccaccacaccgccauccggcaggcccuggucugcugggacgagcugaccaagcucaucgccuggauguccagcaacaucaccuccgagcagguccgcacgaucaucgugaaccacgucaacgacaccuggggccugaaggugcggcagagccugugguuccaccucuccugccugaccuucgggcagcacaccgugcaggaguuccuggucagcuucggcguguggauccgcacgcccgccccguaccggccgcccaacgcgccgauccucuccacccugccggagcacaccgugaucugcugaggacuagucccuguucccagagcccacuuuuuuuucuuuuuuugaaauaaaauagccugucuuucagaucucaaaggcucuuuucagagccaccaaaaaaaaaaaaaaaaaaaaaaaaaaaaaaaaaaaaaaaaaaaaaaaaaaaaaaaaaaaaaaaaaaaaaaaaaaaaaaaaaaaaaaaaaaaaaaaaaaaaa

SEQ ID NO: 14151 - RNA, 4094 nt, Artificial Sequence
  SARS-CoV-2/Wuhan/WIV05/2019__EPI_ISL_402128 spike protein mRNA gc mod (1-1273)(N914C_S1123C)
aggagagucccgcagucggcguccagcggcucugcuuguucgugugugugucguugcaggccuuauucaagcuuaccauguucguguuucuggugcugcugccccugguguccagccagugugugaaccugaccaccagaacacagcugccuccagccuacaccaacagcuucaccagaggcguguacuaccccgacaagguguucagauccagcgugcugcacucuacccaggaccuguuccugccuuucuucagcaacgugaccugguuccacgccauccacguguccggcaccaauggcaccaagagauucgacaaccccgugcugcccuucaacgacgggguguacuuugccagcaccgagaaguccaacaucaucagaggcuggaucuucggcaccacacuggacagcaagacccagagccugcugaucgugaacaacgccaccaacguggucaucaaagugugcgaguuccaguucugcaacgaccccuuccugggcgucuacuaccacaagaacaacaagagcuggauggaaagcgaguuccggguguacagcagcgccaacaacugcaccuucgaguacgugucccagccuuuccugauggaccuggaaggcaagcagggcaacuucaagaaccugcgcgaguucguguucaagaacaucgacggcuacuucaaaaucuacagcaagcacaccccuaucaaccucgugcgggaucugccucagggcuucucugcucuggaaccccugguggaucugcccaucggcaucaacaucacccgguuucagacacugcuggcccugcacagaagcuaccugacaccuggcgauagcagcagcggauggacagcuggugccgccgcuuacuaugugggcuaccugcagccuagaaccuuccugcugaaguacaacgagaacggcaccaucaccgacgccguggauugugcucuggauccucugagcgagacaaagugcacccugaaguccuucaccguggaaaagggcaucuaccagaccagcaacuuccgggugcagcccaccgaauccaucgugcgguuccccaauaucaccaaucugugccccuucggcgagguguucaaugccaccagauucgccucuguguacgccuggaaccggaagcggaucagcaauugcguggccgacuacuccgugcuguacaacuccgccagcuucagcaccuucaagugcuacggcguguccccuaccaagcugaacgaccugugcuucacaaacguguacgccgacagcuucgugauccggggagaugaagugcggcagauugccccuggacagacaggcaagaucgccgacuacaacuacaagcugcccgacgacuucaccggcugugugauugccuggaacagcaacaaccuggacuccaaagucggcggcaacuacaauuaccuguaccggcuguuccggaaguccaaucugaagcccuucgagcgggacaucagcaccgaaaucuaucaggccggcagcaccccuugcaacggcguggaaggcuucaacugcuacuucccacugcaguccuacggcuuucagcccacaaauggcgugggcuaucagcccuacagagugguggugcugagcuucgaacugcugcaugcuccugccacagugugcggcccuaagaaaagcaccaaucucgugaagaacaaaugcgugaacuucaacuucaacggccugaccggcaccggcgugcugacagagagcaacaagaaguuccugccauuccagcaguuuggccgggauaucgccgauaccacagacgccguuagagauccccagacacuggaaauccuggacaucaccccaugcagcuucggcggagugucugugaucaccccuggcaccaacaccagcaaucagguggcagugcuguaccaggacgugaacuguaccgaagugcccguggccauucacgccgaucagcugacaccuacauggcggguguacuccaccggcagcaauguguuucagaccagagccggcugucugaucggagccgagcacgugaacaauagcuacgagugcgacauccccaucggcgcuggcaucugugccagcuaccagacacagacaaacagccccagacgggcuagaagcguggccagccagagcaucauugccuacacaaugucucugggcgccgagaacagcguggccuacuccaacaacucuaucgcuauccccaccaacuucaccaucagcgugaccaccgagauccugccuguguccaugaccaagaccagcguggacugcaccauguacaucugcggcgauuccaccgagugcuccaaccugcugcugcaguacggcagcuucugcacccagcugaauagagcccugacagggaucgccguggaacaggacaagaacacccaagagguguucgcccaagugaagcaaaucuacaagaccccuccuaucaaggacuucggcggcuucaauuucagccagauucugcccgauccuagcaagcccagcaagcggagcuucaucgaggaccugcuguucaacaaagugacacuggccgacgccggcuucaucaagcaguauggcgauugucugggcgacauugccgccagggaucugauuugcgcccagaaguuuaacggacugacagugcugccuccucugcugaccgaugagaugaucgcccaguacacaucugcccugcuggccggcacaaucacaagcggcuggacauuuggagcuggcgccgcucugcagauccccuuugcuaugcagauggccuaccgguucaacggcaucggagugacccagugcgugcuguacgagaaccagaagcugaucgccaaccaguucaacagcgccaucggcaagauccaggacagccugagcagcacagcaagcgcccugggaaagcugcaggacguggucaaccagaaugcccaggcacugaacacccuggucaagcagcuguccuccaacuucggcgccaucagcucugugcugaacgauauccugagcagacuggacaaggucgaggccgaggugcagaucgacagacugaucacaggcagacugcagagccuccagacauacgugacccagcagcugaucagagccgccgagauuagagccucugccaaucuggccgccaccaagaugucugagugugugcugggccagagcaagagaguggacuuuugcggcaagggcuaccaccugaugagcuucccucagucugccccucacggcgugguguuucugcacgugacauaugugcccgcucaagagaagaauuucaccaccgcuccagccaucugccacgacggcaaagcccacuuuccuagagaaggcguguucguguccaacggcacccauugguucgugacacagcggaacuucuacgagccccagaucaucaccaccgacaacaccuucguguguggcaacugcgacguugugaucggcauugugaacaauaccguguacgacccucugcagcccgagcuggacagcuucaaagaggaacuggacaaguacuuuaagaaccacacaagccccgacguggaccugggcgauaucagcggaaucaaugccagcgucgugaacauccagaaagagaucgaccggcugaacgagguggccaagaaucugaacgagagccugaucgaccugcaagaacuggggaaguacgagcaguacaucaaguggcccugguacaucuggcugggcuuuaucgccggacugauugccaucgugauggucacaaucaugcuguguugcaugaccagcugcuguagcugccugaagggcuguuguagcuguggcagcugcugcaaguucgacgaggacgauucugagcccgugcugaagggcgugaaacugcacuacaccugaggacuagucccuguucccagagcccacuuuuuuuucuuuuuuugaaauaaaauagccugucuuucagaucucaaaggcucuuuucagagccaccaaaaaaaaaaaaaaaaaaaaaaaaaaaaaaaaaaaaaaaaaaaaaaaaaaaaaaaaaaaaaaaaaaaaaaaaaaaaaaaaaaaaaaaaaaaaaaaaaaaaa

SEQ ID NO: 14152 - RNA, 4388 nt, Artificial Sequence
  SARS-CoV-2/Wuhan/WIV05/2019__EPI_ISL_402128 spike protein mRNA gc mod (1-1211)(N914C_S1123C) LumSynth construct
aggagagucccgcagucggcguccagcggcucugcuuguucgugugugugucguugcaggccuuauucaagcuuaccauguucguguuucuggugcugcugccccugguguccagccagugugugaaccugaccaccagaacacagcugccuccagccuacaccaacagcuucaccagaggcguguacuaccccgacaagguguucagauccagcgugcugcacucuacccaggaccuguuccugccuuucuucagcaacgugaccugguuccacgccauccacguguccggcaccaauggcaccaagagauucgacaaccccgugcugcccuucaacgacgggguguacuuugccagcaccgagaaguccaacaucaucagaggcuggaucuucggcaccacacuggacagcaagacccagagccugcugaucgugaacaacgccaccaacguggucaucaaagugugcgaguuccaguucugcaacgaccccuuccugggcgucuacuaccacaagaacaacaagagcuggauggaaagcgaguuccggguguacagcagcgccaacaacugcaccuucgaguacgugucccagccuuuccugauggaccuggaaggcaagcagggcaacuucaagaaccugcgcgaguucguguucaagaacaucgacggcuacuucaaaaucuacagcaagcacaccccuaucaaccucgugcgggaucugccucagggcuucucugcucuggaaccccugguggaucugcccaucggcaucaacaucacccgguuucagacacugcuggcccugcacagaagcuaccugacaccuggcgauagcagcagcggauggacagcuggugccgccgcuuacuaugugggcuaccugcagccuagaaccuuccugcugaaguacaacgagaacggcaccaucaccgacgccguggauugugcucuggauccucugagcgagacaaagugcacccugaaguccuucaccguggaaaagggcaucuaccagaccagcaacuuccgggugcagcccaccgaauccaucgugcgguuccccaauaucaccaaucugugccccuucggcgagguguucaaugccaccagauucgccucuguguacgccuggaaccggaagcggaucagcaauugcguggccgacuacuccgugcuguacaacuccgccagcuucagcaccuucaagugcuacggcguguccccuaccaagcugaacgaccugugcuucacaaacguguacgccgacagcuucgugauccggggagaugaagugcggcagauugccccuggacagacaggcaagaucgccgacuacaacuacaagcugcccgacgacuucaccggcugugugauugccuggaacagcaacaaccuggacuccaaagucggcggcaacuacaauuaccuguaccggcuguuccggaaguccaaucugaagcccuucgagcgggacaucagcaccgaaaucuaucaggccggcagcaccccuugcaacggcguggaaggcuucaacugcuacuucccacugcaguccuacggcuuucagcccacaaauggcgugggcuaucagcccuacagagugguggugcugagcuucgaacugcugcaugcuccugccacagugugcggcccuaagaaaagcaccaaucucgugaagaacaaaugcgugaacuucaacuucaacggccugaccggcaccggcgugcugacagagagcaacaagaaguuccugccauuccagcaguuuggccgggauaucgccgauaccacagacgccguuagagauccccagacacuggaaauccuggacaucaccccaugcagcuucggcggagugucugugaucaccccuggcaccaacaccagcaaucagguggcagugcuguaccaggacgugaacuguaccgaagugcccguggccauucacgccgaucagcugacaccuacauggcggguguacuccaccggcagcaauguguuucagaccagagccggcugucugaucggagccgagcacgugaacaauagcuacgagugcgacauccccaucggcgcuggcaucugugccagcuaccagacacagacaaacagccccagacgggcuagaagcguggccagccagagcaucauugccuacacaaugucucugggcgccgagaacagcguggccuacuccaacaacucuaucgcuauccccaccaacuucaccaucagcgugaccaccgagauccugccuguguccaugaccaagaccagcguggacugcaccauguacaucugcggcgauuccaccgagugcuccaaccugcugcugcaguacggcagcuucugcacccagcugaauagagcccugacagggaucgccguggaacaggacaagaacacccaagagguguucgcccaagugaagcaaaucuacaagaccccuccuaucaaggacuucggcggcuucaauuucagccagauucugcccgauccuagcaagcccagcaagcggagcuucaucgaggaccugcuguucaacaaagugacacuggccgacgccggcuucaucaagcaguauggcgauugucugggcgacauugccgccagggaucugauuugcgcccagaaguuuaacggacugacagugcugccuccucugcugaccgaugagaugaucgcccaguacacaucugcccugcuggccggcacaaucacaagcggcuggacauuuggagcuggcgccgcucugcagauccccuuugcuaugcagauggccuaccgguucaacggcaucggagugacccagugcgugcuguacgagaaccagaagcugaucgccaaccaguucaacagcgccaucggcaagauccaggacagccugagcagcacagcaagcgcccugggaaagcugcaggacguggucaaccagaaugcccaggcacugaacacccuggucaagcagcuguccuccaacuucggcgccaucagcucugugcugaacgauauccugagcagacuggacaaggucgaggccgaggugcagaucgacagacugaucacaggcagacugcagagccuccagacauacgugacccagcagcugaucagagccgccgagauuagagccucugccaaucuggccgccaccaagaugucugagugugugcugggccagagcaagagaguggacuuuugcggcaagggcuaccaccugaugagcuucccucagucugccccucacggcgugguguuucugcacgugacauaugugcccgcucaagagaagaauuucaccaccgcuccagccaucugccacgacggcaaagcccacuuuccuagagaaggcguguucguguccaacggcacccauugguucgugacacagcggaacuucuacgagccccagaucaucaccaccgacaacaccuucguguguggcaacugcgacguugugaucggcauugugaacaauaccguguacgacccucugcagcccgagcuggacagcuucaaagaggaacuggacaaguacuuuaagaaccacacaagccccgacguggaccugggcgauaucagcggaaucaaugccagcgucgugaacauccagaaagagaucgaccggcugaacgagguggccaagaaucugaacgagagccugaucgaccugcaagaacuggggaaguacgagcaguacaucaagggcggaggaucuggcggaggacagaucuacgagggcaagcugacagccgagggccugagauuuggaaucguggccagccgguucaaucacgcccugguggauagacugguggaaggcgccaucgaugccauugucagacacggcggcagagaagaggacaucacccucguuagagugcccggcucuugggagauuccuguggcugcuggcgagcuggcccggaaagaagauaucgacgccguuaucgccaucggcgugcugaucagaggcgccacaccucacuucgacuauaucgccagcgagguguccaaaggccuggccgaucugagccuggaacugagaaagcccaucaccuucggcgugaucaccgcugacacacuggaacaggccauugagagagccggcaccaagcacggcaacaaaggaugggaagccgcucuguccgccaucgagauggccaaccuguucaagagccugcggugaggacuagucccuguucccagagcccacuuuuuuuucuuuuuuugaaauaaaauagccugucuuucagaucucaaaggcucuuuucagagccaccaaaaaaaaaaaaaaaaaaaaaaaaaaaaaaaaaaaaaaaaaaaaaaaaaaaaaaaaaaaaaaaaaaaaaaaaaaaaaaaaaaaaaaaaaaaaaaaaaaaaa

SEQ ID NO: 14153 - RNA, 4412 nt, Artificial Sequence
  SARS-CoV-2/Wuhan/WIV05/2019__EPI_ISL_402128 spike protein mRNA gc mod (1-1211)(N914C_S1123C) Ferritin construct
aggagagucccgcagucggcguccagcggcucugcuuguucgugugugugucguugcaggccuuauucaagcuuaccauguucguguuucuggugcugcugccccugguguccagccagugugugaaccugaccaccagaacacagcugccuccagccuacaccaacagcuucaccagaggcguguacuaccccgacaagguguucagauccagcgugcugcacucuacccaggaccuguuccugccuuucuucagcaacgugaccugguuccacgccauccacguguccggcaccaauggcaccaagagauucgacaaccccgugcugcccuucaacgacgggguguacuuugccagcaccgagaaguccaacaucaucagaggcuggaucuucggcaccacacuggacagcaagacccagagccugcugaucgugaacaacgccaccaacguggucaucaaagugugcgaguuccaguucugcaacgaccccuuccugggcgucuacuaccacaagaacaacaagagcuggauggaaagcgaguuccggguguacagcagcgccaacaacugcaccuucgaguacgugucccagccuuuccugauggaccuggaaggcaagcagggcaacuucaagaaccugcgcgaguucguguucaagaacaucgacggcuacuucaaaaucuacagcaagcacaccccuaucaaccucgugcgggaucugccucagggcuucucugcucuggaaccccugguggaucugcccaucggcaucaacaucacccgguuucagacacugcuggcccugcacagaagcuaccugacaccuggcgauagcagcagcggauggacagcuggugccgccgcuuacuaugugggcuaccugcagccuagaaccuuccugcugaaguacaacgagaacggcaccaucaccgacgccguggauugugcucuggauccucugagcgagacaaagugcacccugaaguccuucaccguggaaaagggcaucuaccagaccagcaacuuccgggugcagcccaccgaauccaucgugcgguuccccaauaucaccaaucugugccccuucggcgagguguucaaugccaccagauucgccucuguguacgccuggaaccggaagcggaucagcaauugcguggccgacuacuccgugcuguacaacuccgccagcuucagcaccuucaagugcuacggcguguccccuaccaagcugaacgaccugugcuucacaaacguguacgccgacagcuucgugauccggggagaugaagugcggcagauugccccuggacagacaggcaagaucgccgacuacaacuacaagcugcccgacgacuucaccggcugugugauugccuggaacagcaacaaccuggacuccaaagucggcggcaacuacaauuaccuguaccggcuguuccggaaguccaaucugaagcccuucgagcgggacaucagcaccgaaaucuaucaggccggcagcaccccuugcaacggcguggaaggcuucaacugcuacuucccacugcaguccuacggcuuucagcccacaaauggcgugggcuaucagcccuacagagugguggugcugagcuucgaacugcugcaugcuccugccacagugugcggcccuaagaaaagcaccaaucucgugaagaacaaaugcgugaacuucaacuucaacggccugaccggcaccggcgugcugacagagagcaacaagaaguuccugccauuccagcaguuuggccgggauaucgccgauaccacagacgccguuagagauccccagacacuggaaauccuggacaucaccccaugcagcuucggcggagugucugugaucaccccuggcaccaacaccagcaaucagguggcagugcuguaccaggacgugaacuguaccgaagugcccguggccauucacgccgaucagcugacaccuacauggcggguguacuccaccggcagcaauguguuucagaccagagccggcugucugaucggagccgagcacgugaacaauagcuacgagugcgacauccccaucggcgcuggcaucugugccagcuaccagacacagacaaacagccccagacgggcuagaagcguggccagccagagcaucauugccuacacaaugucucugggcgccgagaacagcguggccuacuccaacaacucuaucgcuauccccaccaacuucaccaucagcgugaccaccgagauccugccuguguccaugaccaagaccagcguggacugcaccauguacaucugcggcgauuccaccgagugcuccaaccugcugcugcaguacggcagcuucugcacccagcugaauagagcccugacagggaucgccguggaacaggacaagaacacccaagagguguucgcccaagugaagcaaaucuacaagaccccuccuaucaaggacuucggcggcuucaauuucagccagauucugcccgauccuagcaagcccagcaagcggagcuucaucgaggaccugcuguucaacaaagugacacuggccgacgccggcuucaucaagcaguauggcgauugucugggcgacauugccgccagggaucugauuugcgcccagaaguuuaacggacugacagugcugccuccucugcugaccgaugagaugaucgcccaguacacaucugcccugcuggccggcacaaucacaagcggcuggacauuuggagcuggcgccgcucugcagauccccuuugcuaugcagauggccuaccgguucaacggcaucggagugacccagugcgugcuguacgagaaccagaagcugaucgccaaccaguucaacagcgccaucggcaagauccaggacagccugagcagcacagcaagcgcccugggaaagcugcaggacguggucaaccagaaugcccaggcacugaacacccuggucaagcagcuguccuccaacuucggcgccaucagcucugugcugaacgauauccugagcagacuggacaaggucgaggccgaggugcagaucgacagacugaucacaggcagacugcagagccuccagacauacgugacccagcagcugaucagagccgccgagauuagagccucugccaaucuggccgccaccaagaugucugagugugugcugggccagagcaagagaguggacuuuugcggcaagggcuaccaccugaugagcuucccucagucugccccucacggcgugguguuucugcacgugacauaugugcccgcucaagagaagaauuucaccaccgcuccagccaucugccacgacggcaaagcccacuuuccuagagaaggcguguucguguccaacggcacccauugguucgugacacagcggaacuucuacgagccccagaucaucaccaccgacaacaccuucguguguggcaacugcgacguugugaucggcauugugaacaauaccguguacgacccucugcagcccgagcuggacagcuucaaagaggaacuggacaaguacuuuaagaaccacacaagccccgacguggaccugggcgauaucagcggaaucaaugccagcgucgugaacauccagaaagagaucgaccggcugaacgagguggccaagaaucugaacgagagccugaucgaccugcaagaacuggggaaguacgagcaguacaucaagggaggcggaggaucugacaucaucaagcugcugaacgagcaagugaacaaagagaugcagagcagcaaccuguacaugagcaugagcagcuggugcuacacccacagccuugauggcgccggacuguuccuguuugaucacgccgccgaggaauacgagcacgccaagaagcugaucaucuuccugaacgagaacaacgugcccgugcagcugaccagcauuucugccccugagcacaaguucgagggccugacacagaucuuccagaaggccuacgaacacgagcagcacaucagcgagagcaucaacaacaucguggaccacgccauuaagagcaaggaucacgccaccuucaacuuucugcagugguacguggccgaacagcacgaggaagaggugcuguucaaggacauccuggacaagaucgagcugaucggcaacgagaaccacggccuguaucuggccgaccaguacgugaagggaaucgccaagagcagaaagagcugaggacuagucccuguucccagagcccacuuuuuuuucuuuuuuugaaauaaaauagccugucuuucagaucucaaaggcucuuuucagagccaccaaaaaaaaaaaaaaaaaaaaaaaaaaaaaaaaaaaaaaaaaaaaaaaaaaaaaaaaaaaaaaaaaaaaaaaaaaaaaaaaaaaaaaaaaaaaaaaaaaaaa

SEQ ID NO: 14154 - RNA, 3998 nt, Artificial Sequence
  SARS-CoV-2/Wuhan/WIV05/2019__EPI_ISL_402128 spike protein mRNA gc mod (1-1211)(N914C_S1123C) Foldon construct
aggagagucccgcagucggcguccagcggcucugcuuguucgugugugugucguugcaggccuuauucaagcuuaccauguucguguuucuggugcugcugccccugguguccagccagugugugaaccugaccaccagaacacagcugccuccagccuacaccaacagcuucaccagaggcguguacuaccccgacaagguguucagauccagcgugcugcacucuacccaggaccuguuccugccuuucuucagcaacgugaccugguuccacgccauccacguguccggcaccaauggcaccaagagauucgacaaccccgugcugcccuucaacgacgggguguacuuugccagcaccgagaaguccaacaucaucagaggcuggaucuucggcaccacacuggacagcaagacccagagccugcugaucgugaacaacgccaccaacguggucaucaaagugugcgaguuccaguucugcaacgaccccuuccugggcgucuacuaccacaagaacaacaagagcuggauggaaagcgaguuccggguguacagcagcgccaacaacugcaccuucgaguacgugucccagccuuuccugauggaccuggaaggcaagcagggcaacuucaagaaccugcgcgaguucguguucaagaacaucgacggcuacuucaaaaucuacagcaagcacaccccuaucaaccucgugcgggaucugccucagggcuucucugcucuggaaccccugguggaucugcccaucggcaucaacaucacccgguuucagacacugcuggcccugcacagaagcuaccugacaccuggcgauagcagcagcggauggacagcuggugccgccgcuuacuaugugggcuaccugcagccuagaaccuuccugcugaaguacaacgagaacggcaccaucaccgacgccguggauugugcucuggauccucugagcgagacaaagugcacccugaaguccuucaccguggaaaagggcaucuaccagaccagcaacuuccgggugcagcccaccgaauccaucgugcgguuccccaauaucaccaaucugugccccuucggcgagguguucaaugccaccagauucgccucuguguacgccuggaaccggaagcggaucagcaauugcguggccgacuacuccgugcuguacaacuccgccagcuucagcaccuucaagugcuacggcguguccccuaccaagcugaacgaccugugcuucacaaacguguacgccgacagcuucgugauccggggagaugaagugcggcagauugccccuggacagacaggcaagaucgccgacuacaacuacaagcugcccgacgacuucaccggcugugugauugccuggaacagcaacaaccuggacuccaaagucggcggcaacuacaauuaccuguaccggcuguuccggaaguccaaucugaagcccuucgagcgggacaucagcaccgaaaucuaucaggccggcagcaccccuugcaacggcguggaaggcuucaacugcuacuucccacugcaguccuacggcuuucagcccacaaauggcgugggcuaucagcccuacagagugguggugcugagcuucgaacugcugcaugcuccugccacagugugcggcccuaagaaaagcaccaaucucgugaagaacaaaugcgugaacuucaacuucaacggccugaccggcaccggcgugcugacagagagcaacaagaaguuccugccauuccagcaguuuggccgggauaucgccgauaccacagacgccguuagagauccccagacacuggaaauccuggacaucaccccaugcagcuucggcggagugucugugaucaccccuggcaccaacaccagcaaucagguggcagugcuguaccaggacgugaacuguaccgaagugcccguggccauucacgccgaucagcugacaccuacauggcggguguacuccaccggcagcaauguguuucagaccagagccggcugucugaucggagccgagcacgugaacaauagcuacgagugcgacauccccaucggcgcuggcaucugugccagcuaccagacacagacaaacagccccagacgggcuagaagcguggccagccagagcaucauugccuacacaaugucucugggcgccgagaacagcguggccuacuccaacaacucuaucgcuauccccaccaacuucaccaucagcgugaccaccgagauccugccuguguccaugaccaagaccagcguggacugcaccauguacaucugcggcgauuccaccgagugcuccaaccugcugcugcaguacggcagcuucugcacccagcugaauagagcccugacagggaucgccguggaacaggacaagaacacccaagagguguucgcccaagugaagcaaaucuacaagaccccuccuaucaaggacuucggcggcuucaauuucagccagauucugcccgauccuagcaagcccagcaagcggagcuucaucgaggaccugcuguucaacaaagugacacuggccgacgccggcuucaucaagcaguauggcgauugucugggcgacauugccgccagggaucugauuugcgcccagaaguuuaacggacugacagugcugccuccucugcugaccgaugagaugaucgcccaguacacaucugcccugcuggccggcacaaucacaagcggcuggacauuuggagcuggcgccgcucugcagauccccuuugcuaugcagauggccuaccgguucaacggcaucggagugacccagugcgugcuguacgagaaccagaagcugaucgccaaccaguucaacagcgccaucggcaagauccaggacagccugagcagcacagcaagcgcccugggaaagcugcaggacguggucaaccagaaugcccaggcacugaacacccuggucaagcagcuguccuccaacuucggcgccaucagcucugugcugaacgauauccugagcagacuggacaaggucgaggccgaggugcagaucgacagacugaucacaggcagacugcagagccuccagacauacgugacccagcagcugaucagagccgccgagauuagagccucugccaaucuggccgccaccaagaugucugagugugugcugggccagagcaagagaguggacuuuugcggcaagggcuaccaccugaugagcuucccucagucugccccucacggcgugguguuucugcacgugacauaugugcccgcucaagagaagaauuucaccaccgcuccagccaucugccacgacggcaaagcccacuuuccuagagaaggcguguucguguccaacggcacccauugguucgugacacagcggaacuucuacgagccccagaucaucaccaccgacaacaccuucguguguggcaacugcgacguugugaucggcauugugaacaauaccguguacgacccucugcagcccgagcuggacagcuucaaagaggaacuggacaaguacuuuaagaaccacacaagccccgacguggaccugggcgauaucagcggaaucaaugccagcgucgugaacauccagaaagagaucgaccggcugaacgagguggccaagaaucugaacgagagccugaucgaccugcaagaacuggggaaguacgagcaguacaucaagggaggaucuggcuauauccccgaggcuccuagagauggccaggccuauguucggaaggauggcgaaugggugcugcugagcaccuuccuuugaggacuagucccuguucccagagcccacuuuuuuuucuuuuuuugaaauaaaauagccugucuuucagaucucaaaggcucuuuucagagccaccaaaaaaaaaaaaaaaaaaaaaaaaaaaaaaaaaaaaaaaaaaaaaaaaaaaaaaaaaaaaaaaaaaaaaaaaaaaaaaaaaaaaaaaaaaaaaaaaaaaaa

SEQ ID NO: 14155 - RNA, 4370 nt, Artificial Sequence
  SARS-CoV-2/Wuhan/WIV05/2019__EPI_ISL_402128 spike protein mRNA gc mod (1-1211)(N914C_S1123C) WhcAg construct
aggagagucccgcagucggcguccagcggcucugcuuguucgugugugugucguugcaggccuuauucaagcuuaccauguucguguuucuggugcugcugccccugguguccagccagugugugaaccugaccaccagaacacagcugccuccagccuacaccaacagcuucaccagaggcguguacuaccccgacaagguguucagauccagcgugcugcacucuacccaggaccuguuccugccuuucuucagcaacgugaccugguuccacgccauccacguguccggcaccaauggcaccaagagauucgacaaccccgugcugcccuucaacgacgggguguacuuugccagcaccgagaaguccaacaucaucagaggcuggaucuucggcaccacacuggacagcaagacccagagccugcugaucgugaacaacgccaccaacguggucaucaaagugugcgaguuccaguucugcaacgaccccuuccugggcgucuacuaccacaagaacaacaagagcuggauggaaagcgaguuccggguguacagcagcgccaacaacugcaccuucgaguacgugucccagccuuuccugauggaccuggaaggcaagcagggcaacuucaagaaccugcgcgaguucguguucaagaacaucgacggcuacuucaaaaucuacagcaagcacaccccuaucaaccucgugcgggaucugccucagggcuucucugcucuggaaccccugguggaucugcccaucggcaucaacaucacccgguuucagacacugcuggcccugcacagaagcuaccugacaccuggcgauagcagcagcggauggacagcuggugccgccgcuuacuaugugggcuaccugcagccuagaaccuuccugcugaaguacaacgagaacggcaccaucaccgacgccguggauugugcucuggauccucugagcgagacaaagugcacccugaaguccuucaccguggaaaagggcaucuaccagaccagcaacuuccgggugcagcccaccgaauccaucgugcgguuccccaauaucaccaaucugugccccuucggcgagguguucaaugccaccagauucgccucuguguacgccuggaaccggaagcggaucagcaauugcguggccgacuacuccgugcuguacaacuccgccagcuucagcaccuucaagugcuacggcguguccccuaccaagcugaacgaccugugcuucacaaacguguacgccgacagcuucgugauccggggagaugaagugcggcagauugccccuggacagacaggcaagaucgccgacuacaacuacaagcugcccgacgacuucaccggcugugugauugccuggaacagcaacaaccuggacuccaaagucggcggcaacuacaauuaccuguaccggcuguuccggaaguccaaucugaagcccuucgagcgggacaucagcaccgaaaucuaucaggccggcagcaccccuugcaacggcguggaaggcuucaacugcuacuucccacugcaguccuacggcuuucagcccacaaauggcgugggcuaucagcccuacagagugguggugcugagcuucgaacugcugcaugcuccugccacagugugcggcccuaagaaaagcaccaaucucgugaagaacaaaugcgugaacuucaacuucaacggccugaccggcaccggcgugcugacagagagcaacaagaaguuccugccauuccagcaguuuggccgggauaucgccgauaccacagacgccguuagagauccccagacacuggaaauccuggacaucaccccaugcagcuucggcggagugucugugaucaccccuggcaccaacaccagcaaucagguggcagugcuguaccaggacgugaacuguaccgaagugcccguggccauucacgccgaucagcugacaccuacauggcggguguacuccaccggcagcaauguguuucagaccagagccggcugucugaucggagccgagcacgugaacaauagcuacgagugcgacauccccaucggcgcuggcaucugugccagcuaccagacacagacaaacagccccagacgggcuagaagcguggccagccagagcaucauugccuacacaaugucucugggcgccgagaacagcguggccuacuccaacaacucuaucgcuauccccaccaacuucaccaucagcgugaccaccgagauccugccuguguccaugaccaagaccagcguggacugcaccauguacaucugcggcgauuccaccgagugcuccaaccugcugcugcaguacggcagcuucugcacccagcugaauagagcccugacagggaucgccguggaacaggacaagaacacccaagagguguucgcccaagugaagcaaaucuacaagaccccuccuaucaaggacuucggcggcuucaauuucagccagauucugcccgauccuagcaagcccagcaagcggagcuucaucgaggaccugcuguucaacaaagugacacuggccgacgccggcuucaucaagcaguauggcgauugucugggcgacauugccgccagggaucugauuugcgcccagaaguuuaacggacugacagugcugccuccucugcugaccgaugagaugaucgcccaguacacaucugcccugcuggccggcacaaucacaagcggcuggacauuuggagcuggcgccgcucugcagauccccuuugcuaugcagauggccuaccgguucaacggcaucggagugacccagugcgugcuguacgagaaccagaagcugaucgccaaccaguucaacagcgccaucggcaagauccaggacagccugagcagcacagcaagcgcccugggaaagcugcaggacguggucaaccagaaugcccaggcacugaacacccuggucaagcagcuguccuccaacuucggcgccaucagcucugugcugaacgauauccugagcagacuggacaaggucgaggccgaggugcagaucgacagacugaucacaggcagacugcagagccuccagacauacgugacccagcagcugaucagagccgccgagauuagagccucugccaaucuggccgccaccaagaugucugagugugugcugggccagagcaagagaguggacuuuugcggcaagggcuaccaccugaugagcuucccucagucugccccucacggcgugguguuucugcacgugacauaugugcccgcucaagagaagaauuucaccaccgcuccagccaucugccacgacggcaaagcccacuuuccuagagaaggcguguucguguccaacggcacccauugguucgugacacagcggaacuucuacgagccccagaucaucaccaccgacaacaccuucguguguggcaacugcgacguugugaucggcauugugaacaauaccguguacgacccucugcagcccgagcuggacagcuucaaagaggaacuggacaaguacuuuaagaaccacacaagccccgacguggaccugggcgauaucagcggaaucaaugccagcgucgugaacauccagaaagagaucgaccggcugaacgagguggccaagaaucugaacgagagccugaucgaccugcaagaacuggggaaguacgagcaguacaucaagggaggcggaggaucugacaucgaccccuacaaagaguucggcagcagcuaccagcugcugaacuuccugccucuggacuucuuccccgaccugaacgcccugguggauacagccacagcucuguacgaggaagaacugaccggcagagagcacugcagcccucaccacacagccauuagacaggcccucgugugcugggacgagcugacaaaacugaucgccuggaugagcagcaacaucaccagcgagcaagugcggaccaucaucgugaaccacgugaacgauaccuggggccugaaagugcggcagagccugugguuucaccugagcugucugaccuucggccagcacaccgugcaagaguuucugguguccuucggcguguggaucagaaccccugcuccauacagaccuccaaacgcucccauccugagcacccugccugagcacacagugaucuguugaggacuagucccuguucccagagcccacuuuuuuuucuuuuuuugaaauaaaauagccugucuuucagaucucaaaggcucuuuucagagccaccaaaaaaaaaaaaaaaaaaaaaaaaaaaaaaaaaaaaaaaaaaaaaaaaaaaaaaaaaaaaaaaaaaaaaaaaaaaaaaaaaaaaaaaaaaaaaaaaaaaaa

SEQ ID NO: 14156 - RNA, 4196 nt, Artificial Sequence
  SARS-CoV-2/Wuhan/WIV05/2019__EPI_ISL_402128 spike protein mRNA gc mod (1-1147)(N914C_S1123C) LumSynth construct
aggagagucccgcagucggcguccagcggcucugcuuguucgugugugugucguugcaggccuuauucaagcuuaccauguucguguuucuggugcugcugccccugguguccagccagugugugaaccugaccaccagaacacagcugccuccagccuacaccaacagcuucaccagaggcguguacuaccccgacaagguguucagauccagcgugcugcacucuacccaggaccuguuccugccuuucuucagcaacgugaccugguuccacgccauccacguguccggcaccaauggcaccaagagauucgacaaccccgugcugcccuucaacgacgggguguacuuugccagcaccgagaaguccaacaucaucagaggcuggaucuucggcaccacacuggacagcaagacccagagccugcugaucgugaacaacgccaccaacguggucaucaaagugugcgaguuccaguucugcaacgaccccuuccugggcgucuacuaccacaagaacaacaagagcuggauggaaagcgaguuccggguguacagcagcgccaacaacugcaccuucgaguacgugucccagccuuuccugauggaccuggaaggcaagcagggcaacuucaagaaccugcgcgaguucguguucaagaacaucgacggcuacuucaaaaucuacagcaagcacaccccuaucaaccucgugcgggaucugccucagggcuucucugcucuggaaccccugguggaucugcccaucggcaucaacaucacccgguuucagacacugcuggcccugcacagaagcuaccugacaccuggcgauagcagcagcggauggacagcuggugccgccgcuuacuaugugggcuaccugcagccuagaaccuuccugcugaaguacaacgagaacggcaccaucaccgacgccguggauugugcucuggauccucugagcgagacaaagugcacccugaaguccuucaccguggaaaagggcaucuaccagaccagcaacuuccgggugcagcccaccgaauccaucgugcgguuccccaauaucaccaaucugugccccuucggcgagguguucaaugccaccagauucgccucuguguacgccuggaaccggaagcggaucagcaauugcguggccgacuacuccgugcuguacaacuccgccagcuucagcaccuucaagugcuacggcguguccccuaccaagcugaacgaccugugcuucacaaacguguacgccgacagcuucgugauccggggagaugaagugcggcagauugccccuggacagacaggcaagaucgccgacuacaacuacaagcugcccgacgacuucaccggcugugugauugccuggaacagcaacaaccuggacuccaaagucggcggcaacuacaauuaccuguaccggcuguuccggaaguccaaucugaagcccuucgagcgggacaucagcaccgaaaucuaucaggccggcagcaccccuugcaacggcguggaaggcuucaacugcuacuucccacugcaguccuacggcuuucagcccacaaauggcgugggcuaucagcccuacagagugguggugcugagcuucgaacugcugcaugcuccugccacagugugcggcccuaagaaaagcaccaaucucgugaagaacaaaugcgugaacuucaacuucaacggccugaccggcaccggcgugcugacagagagcaacaagaaguuccugccauuccagcaguuuggccgggauaucgccgauaccacagacgccguuagagauccccagacacuggaaauccuggacaucaccccaugcagcuucggcggagugucugugaucaccccuggcaccaacaccagcaaucagguggcagugcuguaccaggacgugaacuguaccgaagugcccguggccauucacgccgaucagcugacaccuacauggcggguguacuccaccggcagcaauguguuucagaccagagccggcugucugaucggagccgagcacgugaacaauagcuacgagugcgacauccccaucggcgcuggcaucugugccagcuaccagacacagacaaacagccccagacgggcuagaagcguggccagccagagcaucauugccuacacaaugucucugggcgccgagaacagcguggccuacuccaacaacucuaucgcuauccccaccaacuucaccaucagcgugaccaccgagauccugccuguguccaugaccaagaccagcguggacugcaccauguacaucugcggcgauuccaccgagugcuccaaccugcugcugcaguacggcagcuucugcacccagcugaauagagcccugacagggaucgccguggaacaggacaagaacacccaagagguguucgcccaagugaagcaaaucuacaagaccccuccuaucaaggacuucggcggcuucaauuucagccagauucugcccgauccuagcaagcccagcaagcggagcuucaucgaggaccugcuguucaacaaagugacacuggccgacgccggcuucaucaagcaguauggcgauugucugggcgacauugccgccagggaucugauuugcgcccagaaguuuaacggacugacagugcugccuccucugcugaccgaugagaugaucgcccaguacacaucugcccugcuggccggcacaaucacaagcggcuggacauuuggagcuggcgccgcucugcagauccccuuugcuaugcagauggccuaccgguucaacggcaucggagugacccagugcgugcuguacgagaaccagaagcugaucgccaaccaguucaacagcgccaucggcaagauccaggacagccugagcagcacagcaagcgcccugggaaagcugcaggacguggucaaccagaaugcccaggcacugaacacccuggucaagcagcuguccuccaacuucggcgccaucagcucugugcugaacgauauccugagcagacuggacaaggucgaggccgaggugcagaucgacagacugaucacaggcagacugcagagccuccagacauacgugacccagcagcugaucagagccgccgagauuagagccucugccaaucuggccgccaccaagaugucugagugugugcugggccagagcaagagaguggacuuuugcggcaagggcuaccaccugaugagcuucccucagucugccccucacggcgugguguuucugcacgugacauaugugcccgcucaagagaagaauuucaccaccgcuccagccaucugccacgacggcaaagcccacuuuccuagagaaggcguguucguguccaacggcacccauugguucgugacacagcggaacuucuacgagccccagaucaucaccaccgacaacaccuucguguguggcaacugcgacguugugaucggcauugugaacaauaccguguacgacccucugcagcccgagcuggacagcggcggaggaucuggcggaggacagaucuacgagggcaagcugacagccgagggccugagauuuggaaucguggccagccgguucaaucacgcccugguggauagacugguggaaggcgccaucgaugccauugucagacacggcggcagagaagaggacaucacccucguuagagugcccggcucuugggagauuccuguggcugcuggcgagcuggcccggaaagaagauaucgacgccguuaucgccaucggcgugcugaucagaggcgccacaccucacuucgacuauaucgccagcgagguguccaaaggccuggccgaucugagccuggaacugagaaagcccaucaccuucggcgugaucaccgcugacacacuggaacaggccauugagagagccggcaccaagcacggcaacaaaggaugggaagccgcucuguccgccaucgagauggccaaccuguucaagagccugcggugaggacuagucccuguucccagagcccacuuuuuuuucuuuuuuugaaauaaaauagccugucuuucagaucucaaaggcucuuuucagagccaccaaaaaaaaaaaaaaaaaaaaaaaaaaaaaaaaaaaaaaaaaaaaaaaaaaaaaaaaaaaaaaaaaaaaaaaaaaaaaaaaaaaaaaaaaaaaaaaaaaaaa

SEQ ID NO: 14157 - RNA, 4220 nt, Artificial Sequence
  SARS-CoV-2/Wuhan/WIV05/2019__EPI_ISL_402128 spike protein mRNA gc mod (1-1147)(N914C_S1123C) Ferritin construct
aggagagucccgcagucggcguccagcggcucugcuuguucgugugugugucguugcaggccuuauucaagcuuaccauguucguguuucuggugcugcugccccugguguccagccagugugugaaccugaccaccagaacacagcugccuccagccuacaccaacagcuucaccagaggcguguacuaccccgacaagguguucagauccagcgugcugcacucuacccaggaccuguuccugccuuucuucagcaacgugaccugguuccacgccauccacguguccggcaccaauggcaccaagagauucgacaaccccgugcugcccuucaacgacgggguguacuuugccagcaccgagaaguccaacaucaucagaggcuggaucuucggcaccacacuggacagcaagacccagagccugcugaucgugaacaacgccaccaacguggucaucaaagugugcgaguuccaguucugcaacgaccccuuccugggcgucuacuaccacaagaacaacaagagcuggauggaaagcgaguuccggguguacagcagcgccaacaacugcaccuucgaguacgugucccagccuuuccugauggaccuggaaggcaagcagggcaacuucaagaaccugcgcgaguucguguucaagaacaucgacggcuacuucaaaaucuacagcaagcacaccccuaucaaccucgugcgggaucugccucagggcuucucugcucuggaaccccugguggaucugcccaucggcaucaacaucacccgguuucagacacugcuggcccugcacagaagcuaccugacaccuggcgauagcagcagcggauggacagcuggugccgccgcuuacuaugugggcuaccugcagccuagaaccuuccugcugaaguacaacgagaacggcaccaucaccgacgccguggauugugcucuggauccucugagcgagacaaagugcacccugaaguccuucaccguggaaaagggcaucuaccagaccagcaacuuccgggugcagcccaccgaauccaucgugcgguuccccaauaucaccaaucugugccccuucggcgagguguucaaugccaccagauucgccucuguguacgccuggaaccggaagcggaucagcaauugcguggccgacuacuccgugcuguacaacuccgccagcuucagcaccuucaagugcuacggcguguccccuaccaagcugaacgaccugugcuucacaaacguguacgccgacagcuucgugauccggggagaugaagugcggcagauugccccuggacagacaggcaagaucgccgacuacaacuacaagcugcccgacgacuucaccggcugugugauugccuggaacagcaacaaccuggacuccaaagucggcggcaacuacaauuaccuguaccggcuguuccggaaguccaaucugaagcccuucgagcgggacaucagcaccgaaaucuaucaggccggcagcaccccuugcaacggcguggaaggcuucaacugcuacuucccacugcaguccuacggcuuucagcccacaaauggcgugggcuaucagcccuacagagugguggugcugagcuucgaacugcugcaugcuccugccacagugugcggcccuaagaaaagcaccaaucucgugaagaacaaaugcgugaacuucaacuucaacggccugaccggcaccggcgugcugacagagagcaacaagaaguuccugccauuccagcaguuuggccgggauaucgccgauaccacagacgccguuagagauccccagacacuggaaauccuggacaucaccccaugcagcuucggcggagugucugugaucaccccuggcaccaacaccagcaaucagguggcagugcuguaccaggacgugaacuguaccgaagugcccguggccauucacgccgaucagcugacaccuacauggcggguguacuccaccggcagcaauguguuucagaccagagccggcugucugaucggagccgagcacgugaacaauagcuacgagugcgacauccccaucggcgcuggcaucugugccagcuaccagacacagacaaacagccccagacgggcuagaagcguggccagccagagcaucauugccuacacaaugucucugggcgccgagaacagcguggccuacuccaacaacucuaucgcuauccccaccaacuucaccaucagcgugaccaccgagauccugccuguguccaugaccaagaccagcguggacugcaccauguacaucugcggcgauuccaccgagugcuccaaccugcugcugcaguacggcagcuucugcacccagcugaauagagcccugacagggaucgccguggaacaggacaagaacacccaagagguguucgcccaagugaagcaaaucuacaagaccccuccuaucaaggacuucggcggcuucaauuucagccagauucugcccgauccuagcaagcccagcaagcggagcuucaucgaggaccugcuguucaacaaagugacacuggccgacgccggcuucaucaagcaguauggcgauugucugggcgacauugccgccagggaucugauuugcgcccagaaguuuaacggacugacagugcugccuccucugcugaccgaugagaugaucgcccaguacacaucugcccugcuggccggcacaaucacaagcggcuggacauuuggagcuggcgccgcucugcagauccccuuugcuaugcagauggccuaccgguucaacggcaucggagugacccagugcgugcuguacgagaaccagaagcugaucgccaaccaguucaacagcgccaucggcaagauccaggacagccugagcagcacagcaagcgcccugggaaagcugcaggacguggucaaccagaaugcccaggcacugaacacccuggucaagcagcuguccuccaacuucggcgccaucagcucugugcugaacgauauccugagcagacuggacaaggucgaggccgaggugcagaucgacagacugaucacaggcagacugcagagccuccagacauacgugacccagcagcugaucagagccgccgagauuagagccucugccaaucuggccgccaccaagaugucugagugugugcugggccagagcaagagaguggacuuuugcggcaagggcuaccaccugaugagcuucccucagucugccccucacggcgugguguuucugcacgugacauaugugcccgcucaagagaagaauuucaccaccgcuccagccaucugccacgacggcaaagcccacuuuccuagagaaggcguguucguguccaacggcacccauugguucgugacacagcggaacuucuacgagccccagaucaucaccaccgacaacaccuucguguguggcaacugcgacguugugaucggcauugugaacaauaccguguacgacccucugcagcccgagcuggacagcggaggcggaggaucugacaucaucaagcugcugaacgagcaagugaacaaagagaugcagagcagcaaccuguacaugagcaugagcagcuggugcuacacccacagccuugauggcgccggacuguuccuguuugaucacgccgccgaggaauacgagcacgccaagaagcugaucaucuuccugaacgagaacaacgugcccgugcagcugaccagcauuucugccccugagcacaaguucgagggccugacacagaucuuccagaaggccuacgaacacgagcagcacaucagcgagagcaucaacaacaucguggaccacgccauuaagagcaaggaucacgccaccuucaacuuucugcagugguacguggccgaacagcacgaggaagaggugcuguucaaggacauccuggacaagaucgagcugaucggcaacgagaaccacggccuguaucuggccgaccaguacgugaagggaaucgccaagagcagaaagagcugaggacuagucccuguucccagagcccacuuuuuuuucuuuuuuugaaauaaaauagccugucuuucagaucucaaaggcucuuuucagagccaccaaaaaaaaaaaaaaaaaaaaaaaaaaaaaaaaaaaaaaaaaaaaaaaaaaaaaaaaaaaaaaaaaaaaaaaaaaaaaaaaaaaaaaaaaaaaaaaaaaaaa

SEQ ID NO: 14158 - RNA, 3806 nt, Artificial Sequence
  SARS-CoV-2/Wuhan/WIV05/2019__EPI_ISL_402128 spike protein mRNA gc mod (1-1147)(N914C_S1123C) Foldon construct
aggagagucccgcagucggcguccagcggcucugcuuguucgugugugugucguugcaggccuuauucaagcuuaccauguucguguuucuggugcugcugccccugguguccagccagugugugaaccugaccaccagaacacagcugccuccagccuacaccaacagcuucaccagaggcguguacuaccccgacaagguguucagauccagcgugcugcacucuacccaggaccuguuccugccuuucuucagcaacgugaccugguuccacgccauccacguguccggcaccaauggcaccaagagauucgacaaccccgugcugcccuucaacgacgggguguacuuugccagcaccgagaaguccaacaucaucagaggcuggaucuucggcaccacacuggacagcaagacccagagccugcugaucgugaacaacgccaccaacguggucaucaaagugugcgaguuccaguucugcaacgaccccuuccugggcgucuacuaccacaagaacaacaagagcuggauggaaagcgaguuccggguguacagcagcgccaacaacugcaccuucgaguacgugucccagccuuuccugauggaccuggaaggcaagcagggcaacuucaagaaccugcgcgaguucguguucaagaacaucgacggcuacuucaaaaucuacagcaagcacaccccuaucaaccucgugcgggaucugccucagggcuucucugcucuggaaccccugguggaucugcccaucggcaucaacaucacccgguuucagacacugcuggcccugcacagaagcuaccugacaccuggcgauagcagcagcggauggacagcuggugccgccgcuuacuaugugggcuaccugcagccuagaaccuuccugcugaaguacaacgagaacggcaccaucaccgacgccguggauugugcucuggauccucugagcgagacaaagugcacccugaaguccuucaccguggaaaagggcaucuaccagaccagcaacuuccgggugcagcccaccgaauccaucgugcgguuccccaauaucaccaaucugugccccuucggcgagguguucaaugccaccagauucgccucuguguacgccuggaaccggaagcggaucagcaauugcguggccgacuacuccgugcuguacaacuccgccagcuucagcaccuucaagugcuacggcguguccccuaccaagcugaacgaccugugcuucacaaacguguacgccgacagcuucgugauccggggagaugaagugcggcagauugccccuggacagacaggcaagaucgccgacuacaacuacaagcugcccgacgacuucaccggcugugugauugccuggaacagcaacaaccuggacuccaaagucggcggcaacuacaauuaccuguaccggcuguuccggaaguccaaucugaagcccuucgagcgggacaucagcaccgaaaucuaucaggccggcagcaccccuugcaacggcguggaaggcuucaacugcuacuucccacugcaguccuacggcuuucagcccacaaauggcgugggcuaucagcccuacagagugguggugcugagcuucgaacugcugcaugcuccugccacagugugcggcccuaagaaaagcaccaaucucgugaagaacaaaugcgugaacuucaacuucaacggccugaccggcaccggcgugcugacagagagcaacaagaaguuccugccauuccagcaguuuggccgggauaucgccgauaccacagacgccguuagagauccccagacacuggaaauccuggacaucaccccaugcagcuucggcggagugucugugaucaccccuggcaccaacaccagcaaucagguggcagugcuguaccaggacgugaacuguaccgaagugcccguggccauucacgccgaucagcugacaccuacauggcggguguacuccaccggcagcaauguguuucagaccagagccggcugucugaucggagccgagcacgugaacaauagcuacgagugcgacauccccaucggcgcuggcaucugugccagcuaccagacacagacaaacagccccagacgggcuagaagcguggccagccagagcaucauugccuacacaaugucucugggcgccgagaacagcguggccuacuccaacaacucuaucgcuauccccaccaacuucaccaucagcgugaccaccgagauccugccuguguccaugaccaagaccagcguggacugcaccauguacaucugcggcgauuccaccgagugcuccaaccugcugcugcaguacggcagcuucugcacccagcugaauagagcccugacagggaucgccguggaacaggacaagaacacccaagagguguucgcccaagugaagcaaaucuacaagaccccuccuaucaaggacuucggcggcuucaauuucagccagauucugcccgauccuagcaagcccagcaagcggagcuucaucgaggaccugcuguucaacaaagugacacuggccgacgccggcuucaucaagcaguauggcgauugucugggcgacauugccgccagggaucugauuugcgcccagaaguuuaacggacugacagugcugccuccucugcugaccgaugagaugaucgcccaguacacaucugcccugcuggccggcacaaucacaagcggcuggacauuuggagcuggcgccgcucugcagauccccuuugcuaugcagauggccuaccgguucaacggcaucggagugacccagugcgugcuguacgagaaccagaagcugaucgccaaccaguucaacagcgccaucggcaagauccaggacagccugagcagcacagcaagcgcccugggaaagcugcaggacguggucaaccagaaugcccaggcacugaacacccuggucaagcagcuguccuccaacuucggcgccaucagcucugugcugaacgauauccugagcagacuggacaaggucgaggccgaggugcagaucgacagacugaucacaggcagacugcagagccuccagacauacgugacccagcagcugaucagagccgccgagauuagagccucugccaaucuggccgccaccaagaugucugagugugugcugggccagagcaagagaguggacuuuugcggcaagggcuaccaccugaugagcuucccucagucugccccucacggcgugguguuucugcacgugacauaugugcccgcucaagagaagaauuucaccaccgcuccagccaucugccacgacggcaaagcccacuuuccuagagaaggcguguucguguccaacggcacccauugguucgugacacagcggaacuucuacgagccccagaucaucaccaccgacaacaccuucguguguggcaacugcgacguugugaucggcauugugaacaauaccguguacgacccucugcagcccgagcuggacagcggaggaucuggcuauauccccgaggcuccuagagauggccaggccuauguucggaaggauggcgaaugggugcugcugagcaccuuccuuugaggacuagucccuguucccagagcccacuuuuuuuucuuuuuuugaaauaaaauagccugucuuucagaucucaaaggcucuuuucagagccaccaaaaaaaaaaaaaaaaaaaaaaaaaaaaaaaaaaaaaaaaaaaaaaaaaaaaaaaaaaaaaaaaaaaaaaaaaaaaaaaaaaaaaaaaaaaaaaaaaaaaa

SEQ ID NO: 14159 - RNA, 4178 nt, Artificial Sequence
  SARS-CoV-2/Wuhan/WIV05/2019__EPI_ISL_402128 spike protein mRNA gc mod (1-1147)(N914C_S1123C) WhcAg construct
aggagagucccgcagucggcguccagcggcucugcuuguucgugugugugucguugcaggccuuauucaagcuuaccauguucguguuucuggugcugcugccccugguguccagccagugugugaaccugaccaccagaacacagcugccuccagccuacaccaacagcuucaccagaggcguguacuaccccgacaagguguucagauccagcgugcugcacucuacccaggaccuguuccugccuuucuucagcaacgugaccugguuccacgccauccacguguccggcaccaauggcaccaagagauucgacaaccccgugcugcccuucaacgacgggguguacuuugccagcaccgagaaguccaacaucaucagaggcuggaucuucggcaccacacuggacagcaagacccagagccugcugaucgugaacaacgccaccaacguggucaucaaagugugcgaguuccaguucugcaacgaccccuuccugggcgucuacuaccacaagaacaacaagagcuggauggaaagcgaguuccggguguacagcagcgccaacaacugcaccuucgaguacgugucccagccuuuccugauggaccuggaaggcaagcagggcaacuucaagaaccugcgcgaguucguguucaagaacaucgacggcuacuucaaaaucuacagcaagcacaccccuaucaaccucgugcgggaucugccucagggcuucucugcucuggaaccccugguggaucugcccaucggcaucaacaucacccgguuucagacacugcuggcccugcacagaagcuaccugacaccuggcgauagcagcagcggauggacagcuggugccgccgcuuacuaugugggcuaccugcagccuagaaccuuccugcugaaguacaacgagaacggcaccaucaccgacgccguggauugugcucuggauccucugagcgagacaaagugcacccugaaguccuucaccguggaaaagggcaucuaccagaccagcaacuuccgggugcagcccaccgaauccaucgugcgguuccccaauaucaccaaucugugccccuucggcgagguguucaaugccaccagauucgccucuguguacgccuggaaccggaagcggaucagcaauugcguggccgacuacuccgugcuguacaacuccgccagcuucagcaccuucaagugcuacggcguguccccuaccaagcugaacgaccugugcuucacaaacguguacgccgacagcuucgugauccggggagaugaagugcggcagauugccccuggacagacaggcaagaucgccgacuacaacuacaagcugcccgacgacuucaccggcugugugauugccuggaacagcaacaaccuggacuccaaagucggcggcaacuacaauuaccuguaccggcuguuccggaaguccaaucugaagcccuucgagcgggacaucagcaccgaaaucuaucaggccggcagcaccccuugcaacggcguggaaggcuucaacugcuacuucccacugcaguccuacggcuuucagcccacaaauggcgugggcuaucagcccuacagagugguggugcugagcuucgaacugcugcaugcuccugccacagugugcggcccuaagaaaagcaccaaucucgugaagaacaaaugcgugaacuucaacuucaacggccugaccggcaccggcgugcugacagagagcaacaagaaguuccugccauuccagcaguuuggccgggauaucgccgauaccacagacgccguuagagauccccagacacuggaaauccuggacaucaccccaugcagcuucggcggagugucugugaucaccccuggcaccaacaccagcaaucagguggcagugcuguaccaggacgugaacuguaccgaagugcccguggccauucacgccgaucagcugacaccuacauggcggguguacuccaccggcagcaauguguuucagaccagagccggcugucugaucggagccgagcacgugaacaauagcuacgagugcgacauccccaucggcgcuggcaucugugccagcuaccagacacagacaaacagccccagacgggcuagaagcguggccagccagagcaucauugccuacacaaugucucugggcgccgagaacagcguggccuacuccaacaacucuaucgcuauccccaccaacuucaccaucagcgugaccaccgagauccugccuguguccaugaccaagaccagcguggacugcaccauguacaucugcggcgauuccaccgagugcuccaaccugcugcugcaguacggcagcuucugcacccagcugaauagagcccugacagggaucgccguggaacaggacaagaacacccaagagguguucgcccaagugaagcaaaucuacaagaccccuccuaucaaggacuucggcggcuucaauuucagccagauucugcccgauccuagcaagcccagcaagcggagcuucaucgaggaccugcuguucaacaaagugacacuggccgacgccggcuucaucaagcaguauggcgauugucugggcgacauugccgccagggaucugauuugcgcccagaaguuuaacggacugacagugcugccuccucugcugaccgaugagaugaucgcccaguacacaucugcccugcuggccggcacaaucacaagcggcuggacauuuggagcuggcgccgcucugcagauccccuuugcuaugcagauggccuaccgguucaacggcaucggagugacccagugcgugcuguacgagaaccagaagcugaucgccaaccaguucaacagcgccaucggcaagauccaggacagccugagcagcacagcaagcgcccugggaaagcugcaggacguggucaaccagaaugcccaggcacugaacacccuggucaagcagcuguccuccaacuucggcgccaucagcucugugcugaacgauauccugagcagacuggacaaggucgaggccgaggugcagaucgacagacugaucacaggcagacugcagagccuccagacauacgugacccagcagcugaucagagccgccgagauuagagccucugccaaucuggccgccaccaagaugucugagugugugcugggccagagcaagagaguggacuuuugcggcaagggcuaccaccugaugagcuucccucagucugccccucacggcgugguguuucugcacgugacauaugugcccgcucaagagaagaauuucaccaccgcuccagccaucugccacgacggcaaagcccacuuuccuagagaaggcguguucguguccaacggcacccauugguucgugacacagcggaacuucuacgagccccagaucaucaccaccgacaacaccuucguguguggcaacugcgacguugugaucggcauugugaacaauaccguguacgacccucugcagcccgagcuggacagcggaggcggaggaucugacaucgaccccuacaaagaguucggcagcagcuaccagcugcugaacuuccugccucuggacuucuuccccgaccugaacgcccugguggauacagccacagcucuguacgaggaagaacugaccggcagagagcacugcagcccucaccacacagccauuagacaggcccucgugugcugggacgagcugacaaaacugaucgccuggaugagcagcaacaucaccagcgagcaagugcggaccaucaucgugaaccacgugaacgauaccuggggccugaaagugcggcagagccugugguuucaccugagcugucugaccuucggccagcacaccgugcaagaguuucugguguccuucggcguguggaucagaaccccugcuccauacagaccuccaaacgcucccauccugagcacccugccugagcacacagugaucuguugaggacuagucccuguucccagagcccacuuuuuuuucuuuuuuugaaauaaaauagccugucuuucagaucucaaaggcucuuuucagagccaccaaaaaaaaaaaaaaaaaaaaaaaaaaaaaaaaaaaaaaaaaaaaaaaaaaaaaaaaaaaaaaaaaaaaaaaaaaaaaaaaaaaaaaaaaaaaaaaaaaaaa

SEQ ID NO: 14160 - RNA, 4039 nt, Artificial Sequence
  SARS-CoV-2/Wuhan/WIV05/2019__EPI_ISL_402128 spike protein mRNA gc (1-1273)(N914C_S1123C)
aggagaaagcuuaccauguucguguuccugguccuccugccccuggugagcucccagugcgugaaccucaccacccgcacgcagcugccgcccgccuacaccaacagcuucacccggggcgucuacuaccccgacaagguguuccgcuccagcgugcugcacuccacccaggaccucuuccugcccuucuucagcaacgucacgugguuccacgccauccacguguccgggaccaacggcaccaagcgguucgacaacccggugcugcccuucaacgacggggucuacuucgcgagcaccgagaaguccaacaucauccgcggcuggaucuucgggacgacccucgacagcaagacccagucccugcugaucgugaacaacgccaccaacguggucaucaaggugugcgaguuccaguucugcaacgaccccuuccucggcguguacuaccacaagaacaacaagagcuggauggaguccgaguuccgggucuacagcuccgccaacaacugcacguucgaguacgugagccagcccuuccugauggaccuggagggcaagcaggggaacuucaagaaccuccgcgaguucguguucaagaacaucgacggcuacuucaagaucuacuccaagcacaccccgaucaaccugguccgggaccugccccagggguucagcgcccucgagccccugguggaccugcccaucggcaucaacaucacccgcuuccagacccuccuggcccugcaccgguccuaccucacgccgggggacagcagcuccggcuggaccgcgggcgccgccgccuacuacgugggguaccugcagccccgcaccuuccugcucaaguacaacgagaacggcaccaucacggacgcggucgacugcgcccuggacccccugagcgagaccaagugcacccucaaguccuucaccguggagaaggggaucuaccagacgagcaacuuccgggugcagcccaccgaguccaucguccgcuucccgaacaucaccaaccugugccccuucggcgagguguucaacgccacccgguucgccagcgucuacgccuggaaccgcaagcggaucuccaacugcguggcggacuacagcgugcuguacaacuccgccagcuucuccacguucaagugcuacggcgucagccccaccaagcucaacgaccugugcuucaccaacguguacgccgacuccuucgugauccgcggggacgagguccggcagaucgcccccggccagaccgggaagaucgccgacuacaacuacaagcugccggacgacuucacgggcugcgugaucgcguggaacagcaacaaccucgacuccaaggucgggggcaacuacaacuaccuguaccgccuguuccgcaagagcaaccucaagcccuucgagcgggacaucuccaccgagaucuaccaggccggcagcacccccugcaacgggguggagggcuucaacugcuacuucccccugcaguccuacggguuccagccgaccaacggcgugggguaccagcccuaccggguggucgugcugagcuucgagcuccugcacgcccccgccacggugugcggccccaagaaguccaccaaccuggucaagaacaagugcgugaacuucaacuucaacggccucaccgggaccggcgugcugaccgagagcaacaagaaguuccugccguuccagcaguucgggcgcgacaucgccgacacgaccgacgcgguccgcgacccccagacccuggagauccucgacaucacccccugcagcuucggcgggguguccgugaucacgccgggcaccaacaccagcaaccaggucgccgugcuguaccaggacgugaacugcaccgagguccccguggccauccacgccgaccagcugacgcccaccuggcggguguacuccaccggcagcaacgucuuccagacccgcgccgggugccucaucggcgcggagcacgugaacaacuccuacgagugcgacauccccaucggggccggcaucugcgccagcuaccagacgcagaccaacuccccgcggcgcgcccggagcguggcgucccagagcaucaucgccuacaccaugucccugggcgccgagaacagcgucgccuacuccaacaacagcaucgccauccccaccaacuucacgaucuccgugaccaccgagauccugcccgugagcaugaccaagacgagcgucgacugcaccauguacaucugcggggacuccaccgagugcagcaaccuccugcugcaguacggcuccuucugcacccagcucaaccgcgcgcugacggggaucgccguggagcaggacaagaacacccaggagguguucgcccaggucaagcagaucuacaagacgcccccgaucaaggacuucggcggguucaacuucagccagauccugcccgaccccuccaagcccagcaagcgguccuucaucgaggaccuccuguucaacaaggugacccuggccgacgccggcuucaucaagcaguacggcgacugccucggggacaucgcggcccgcgaccugaucugcgcccagaaguucaacggccugaccgugcucccgccccugcugaccgacgagaugaucgcccaguacaccagcgcccuccuggcggggaccaucacguccggcuggaccuucggggccggcgccgcccugcagauccccuucgcgaugcagauggccuaccgguucaacggcaucggggucacccagugcgugcucuacgagaaccagaagcugaucgccaaccaguucaacagcgccaucggcaagauccaggacucccugagcuccaccgccagcgcgcucgggaagcugcaggacguggucaaccagaacgcccaggcccugaacacgcucgugaagcagcuguccagcaacuucggcgccaucuccagcgugcugaacgacauccucucccgccuggacaaggucgaggccgaggugcagaucgaccggcugaucaccgggcgccuccagagccugcagaccuacgugacccagcagcugauccgggcggccgagauccgcgccagcgccaaccucgccgcgaccaagauguccgagugcguccugggccagagcaagcggguggacuucugcggcaagggguaccaccugauguccuucccccagagcgccccgcacggcguggucuuccuccacgugacguacguccccgcccaggagaagaacuucaccaccgcccccgcgaucugccacgacgggaaggcccacuucccccgcgagggcguguucguguccaacgggacccacugguucgucacgcagcggaacuucuacgagccgcagaucaucaccaccgacaacaccuucgugugcggcaacugcgacguggucaucggcaucgugaacaacacgguguacgacccccugcagcccgagcuggacuccuucaaggaggagcucgacaaguacuucaagaaccacaccagccccgacgucgaccugggggacaucuccggcaucaacgccagcguggugaacauccagaaggagaucgaccgccugaacgaggucgccaagaaccucaacgagucccugaucgaccugcaggagcucgggaaguacgagcaguacaucaaguggccgugguacaucuggcugggcuucaucgccggccugaucgcgaucgugauggugaccaucaugcucugcugcaugaccagcugcugcuccugccugaaggggugcugcagcugcggcuccugcugcaaguucgacgaggacgacagcgagcccguccugaagggggugaagcuccacuacacgugaggacuaguuauaagacugacuagcccgaugggccucccaacgggcccuccuccccuccuugcaccgagauuaauaaaaaaaaaaaaaaaaaaaaaaaaaaaaaaaaaaaaaaaaaaaaaaaaaaaaaaaaaaaaaaaaugcaucccccccccccccccccccccccccccccccaaaggcucuuuucagagccaccagaauu

SEQ ID NO: 14161 - RNA, 4333 nt, Artificial Sequence
  SARS-CoV-2/Wuhan/WIV05/2019__EPI_ISL_402128 spike protein mRNA gc (1-1211)(N914C_S1123C) LumSynth construct
aggagaaagcuuaccauguucguguuccugguccuccugccccuggugagcucccagugcgugaaccucaccacccgcacgcagcugccgcccgccuacaccaacagcuucacccggggcgucuacuaccccgacaagguguuccgcuccagcgugcugcacuccacccaggaccucuuccugcccuucuucagcaacgucacgugguuccacgccauccacguguccgggaccaacggcaccaagcgguucgacaacccggugcugcccuucaacgacggggucuacuucgcgagcaccgagaaguccaacaucauccgcggcuggaucuucgggacgacccucgacagcaagacccagucccugcugaucgugaacaacgccaccaacguggucaucaaggugugcgaguuccaguucugcaacgaccccuuccucggcguguacuaccacaagaacaacaagagcuggauggaguccgaguuccgggucuacagcuccgccaacaacugcacguucgaguacgugagccagcccuuccugauggaccuggagggcaagcaggggaacuucaagaaccuccgcgaguucguguucaagaacaucgacggcuacuucaagaucuacuccaagcacaccccgaucaaccugguccgggaccugccccagggguucagcgcccucgagccccugguggaccugcccaucggcaucaacaucacccgcuuccagacccuccuggcccugcaccgguccuaccucacgccgggggacagcagcuccggcuggaccgcgggcgccgccgccuacuacgugggguaccugcagccccgcaccuuccugcucaaguacaacgagaacggcaccaucacggacgcggucgacugcgcccuggacccccugagcgagaccaagugcacccucaaguccuucaccguggagaaggggaucuaccagacgagcaacuuccgggugcagcccaccgaguccaucguccgcuucccgaacaucaccaaccugugccccuucggcgagguguucaacgccacccgguucgccagcgucuacgccuggaaccgcaagcggaucuccaacugcguggcggacuacagcgugcuguacaacuccgccagcuucuccacguucaagugcuacggcgucagccccaccaagcucaacgaccugugcuucaccaacguguacgccgacuccuucgugauccgcggggacgagguccggcagaucgcccccggccagaccgggaagaucgccgacuacaacuacaagcugccggacgacuucacgggcugcgugaucgcguggaacagcaacaaccucgacuccaaggucgggggcaacuacaacuaccuguaccgccuguuccgcaagagcaaccucaagcccuucgagcgggacaucuccaccgagaucuaccaggccggcagcacccccugcaacgggguggagggcuucaacugcuacuucccccugcaguccuacggguuccagccgaccaacggcgugggguaccagcccuaccggguggucgugcugagcuucgagcuccugcacgcccccgccacggugugcggccccaagaaguccaccaaccuggucaagaacaagugcgugaacuucaacuucaacggccucaccgggaccggcgugcugaccgagagcaacaagaaguuccugccguuccagcaguucgggcgcgacaucgccgacacgaccgacgcgguccgcgacccccagacccuggagauccucgacaucacccccugcagcuucggcgggguguccgugaucacgccgggcaccaacaccagcaaccaggucgccgugcuguaccaggacgugaacugcaccgagguccccguggccauccacgccgaccagcugacgcccaccuggcggguguacuccaccggcagcaacgucuuccagacccgcgccgggugccucaucggcgcggagcacgugaacaacuccuacgagugcgacauccccaucggggccggcaucugcgccagcuaccagacgcagaccaacuccccgcggcgcgcccggagcguggcgucccagagcaucaucgccuacaccaugucccugggcgccgagaacagcgucgccuacuccaacaacagcaucgccauccccaccaacuucacgaucuccgugaccaccgagauccugcccgugagcaugaccaagacgagcgucgacugcaccauguacaucugcggggacuccaccgagugcagcaaccuccugcugcaguacggcuccuucugcacccagcucaaccgcgcgcugacggggaucgccguggagcaggacaagaacacccaggagguguucgcccaggucaagcagaucuacaagacgcccccgaucaaggacuucggcggguucaacuucagccagauccugcccgaccccuccaagcccagcaagcgguccuucaucgaggaccuccuguucaacaaggugacccuggccgacgccggcuucaucaagcaguacggcgacugccucggggacaucgcggcccgcgaccugaucugcgcccagaaguucaacggccugaccgugcucccgccccugcugaccgacgagaugaucgcccaguacaccagcgcccuccuggcggggaccaucacguccggcuggaccuucggggccggcgccgcccugcagauccccuucgcgaugcagauggccuaccgguucaacggcaucggggucacccagugcgugcucuacgagaaccagaagcugaucgccaaccaguucaacagcgccaucggcaagauccaggacucccugagcuccaccgccagcgcgcucgggaagcugcaggacguggucaaccagaacgcccaggcccugaacacgcucgugaagcagcuguccagcaacuucggcgccaucuccagcgugcugaacgacauccucucccgccuggacaaggucgaggccgaggugcagaucgaccggcugaucaccgggcgccuccagagccugcagaccuacgugacccagcagcugauccgggcggccgagauccgcgccagcgccaaccucgccgcgaccaagauguccgagugcguccugggccagagcaagcggguggacuucugcggcaagggguaccaccugauguccuucccccagagcgccccgcacggcguggucuuccuccacgugacguacguccccgcccaggagaagaacuucaccaccgcccccgcgaucugccacgacgggaaggcccacuucccccgcgagggcguguucguguccaacgggacccacugguucgucacgcagcggaacuucuacgagccgcagaucaucaccaccgacaacaccuucgugugcggcaacugcgacguggucaucggcaucgugaacaacacgguguacgacccccugcagcccgagcuggacuccuucaaggaggagcucgacaaguacuucaagaaccacaccagccccgacgucgaccugggggacaucuccggcaucaacgccagcguggugaacauccagaaggagaucgaccgccugaacgaggucgccaagaaccucaacgagucccugaucgaccugcaggagcucgggaaguacgagcaguacaucaagggcggcgggagcgggggcgggcagaucuacgagggcaagcugaccgccgaggggcuccgcuucggcaucguggccagccgguucaaccacgcgcuggucgaccgccugguggagggggccaucgacgccaucgugcggcacggcgggcgcgaggaggacaucacccucguccgggugcccggcuccugggagaucccgguggccgccggcgagcuggcccgcaaggaggacaucgacgcggucaucgccaucggggugcugauccggggcgccacgccccacuucgacuacaucgccagcgagguguccaaggggcucgcggaccugagccuggagcuccgcaagcccaucaccuucggcgucaucaccgccgacacccuggagcaggccaucgagcgggccgggacgaagcacggcaacaagggcugggaggccgcgcuguccgccaucgagauggccaaccucuucaagagccugcgcugaggacuaguuauaagacugacuagcccgaugggccucccaacgggcccuccuccccuccuugcaccgagauuaauaaaaaaaaaaaaaaaaaaaaaaaaaaaaaaaaaaaaaaaaaaaaaaaaaaaaaaaaaaaaaaaaugcaucccccccccccccccccccccccccccccccaaaggcucuuuucagagccaccagaauu

SEQ ID NO: 14162 - RNA, 4357 nt, Artificial Sequence
  SARS-CoV-2/Wuhan/WIV05/2019__EPI_ISL_402128 spike protein mRNA gc (1-1211)(N914C_S1123C) Ferritin construct
aggagaaagcuuaccauguucguguuccugguccuccugccccuggugagcucccagugcgugaaccucaccacccgcacgcagcugccgcccgccuacaccaacagcuucacccggggcgucuacuaccccgacaagguguuccgcuccagcgugcugcacuccacccaggaccucuuccugcccuucuucagcaacgucacgugguuccacgccauccacguguccgggaccaacggcaccaagcgguucgacaacccggugcugcccuucaacgacggggucuacuucgcgagcaccgagaaguccaacaucauccgcggcuggaucuucgggacgacccucgacagcaagacccagucccugcugaucgugaacaacgccaccaacguggucaucaaggugugcgaguuccaguucugcaacgaccccuuccucggcguguacuaccacaagaacaacaagagcuggauggaguccgaguuccgggucuacagcuccgccaacaacugcacguucgaguacgugagccagcccuuccugauggaccuggagggcaagcaggggaacuucaagaaccuccgcgaguucguguucaagaacaucgacggcuacuucaagaucuacuccaagcacaccccgaucaaccugguccgggaccugccccagggguucagcgcccucgagccccugguggaccugcccaucggcaucaacaucacccgcuuccagacccuccuggcccugcaccgguccuaccucacgccgggggacagcagcuccggcuggaccgcgggcgccgccgccuacuacgugggguaccugcagccccgcaccuuccugcucaaguacaacgagaacggcaccaucacggacgcggucgacugcgcccuggacccccugagcgagaccaagugcacccucaaguccuucaccguggagaaggggaucuaccagacgagcaacuuccgggugcagcccaccgaguccaucguccgcuucccgaacaucaccaaccugugccccuucggcgagguguucaacgccacccgguucgccagcgucuacgccuggaaccgcaagcggaucuccaacugcguggcggacuacagcgugcuguacaacuccgccagcuucuccacguucaagugcuacggcgucagccccaccaagcucaacgaccugugcuucaccaacguguacgccgacuccuucgugauccgcggggacgagguccggcagaucgcccccggccagaccgggaagaucgccgacuacaacuacaagcugccggacgacuucacgggcugcgugaucgcguggaacagcaacaaccucgacuccaaggucgggggcaacuacaacuaccuguaccgccuguuccgcaagagcaaccucaagcccuucgagcgggacaucuccaccgagaucuaccaggccggcagcacccccugcaacgggguggagggcuucaacugcuacuucccccugcaguccuacggguuccagccgaccaacggcgugggguaccagcccuaccggguggucgugcugagcuucgagcuccugcacgcccccgccacggugugcggccccaagaaguccaccaaccuggucaagaacaagugcgugaacuucaacuucaacggccucaccgggaccggcgugcugaccgagagcaacaagaaguuccugccguuccagcaguucgggcgcgacaucgccgacacgaccgacgcgguccgcgacccccagacccuggagauccucgacaucacccccugcagcuucggcgggguguccgugaucacgccgggcaccaacaccagcaaccaggucgccgugcuguaccaggacgugaacugcaccgagguccccguggccauccacgccgaccagcugacgcccaccuggcggguguacuccaccggcagcaacgucuuccagacccgcgccgggugccucaucggcgcggagcacgugaacaacuccuacgagugcgacauccccaucggggccggcaucugcgccagcuaccagacgcagaccaacuccccgcggcgcgcccggagcguggcgucccagagcaucaucgccuacaccaugucccugggcgccgagaacagcgucgccuacuccaacaacagcaucgccauccccaccaacuucacgaucuccgugaccaccgagauccugcccgugagcaugaccaagacgagcgucgacugcaccauguacaucugcggggacuccaccgagugcagcaaccuccugcugcaguacggcuccuucugcacccagcucaaccgcgcgcugacggggaucgccguggagcaggacaagaacacccaggagguguucgcccaggucaagcagaucuacaagacgcccccgaucaaggacuucggcggguucaacuucagccagauccugcccgaccccuccaagcccagcaagcgguccuucaucgaggaccuccuguucaacaaggugacccuggccgacgccggcuucaucaagcaguacggcgacugccucggggacaucgcggcccgcgaccugaucugcgcccagaaguucaacggccugaccgugcucccgccccugcugaccgacgagaugaucgcccaguacaccagcgcccuccuggcggggaccaucacguccggcuggaccuucggggccggcgccgcccugcagauccccuucgcgaugcagauggccuaccgguucaacggcaucggggucacccagugcgugcucuacgagaaccagaagcugaucgccaaccaguucaacagcgccaucggcaagauccaggacucccugagcuccaccgccagcgcgcucgggaagcugcaggacguggucaaccagaacgcccaggcccugaacacgcucgugaagcagcuguccagcaacuucggcgccaucuccagcgugcugaacgacauccucucccgccuggacaaggucgaggccgaggugcagaucgaccggcugaucaccgggcgccuccagagccugcagaccuacgugacccagcagcugauccgggcggccgagauccgcgccagcgccaaccucgccgcgaccaagauguccgagugcguccugggccagagcaagcggguggacuucugcggcaagggguaccaccugauguccuucccccagagcgccccgcacggcguggucuuccuccacgugacguacguccccgcccaggagaagaacuucaccaccgcccccgcgaucugccacgacgggaaggcccacuucccccgcgagggcguguucguguccaacgggacccacugguucgucacgcagcggaacuucuacgagccgcagaucaucaccaccgacaacaccuucgugugcggcaacugcgacguggucaucggcaucgugaacaacacgguguacgacccccugcagcccgagcuggacuccuucaaggaggagcucgacaaguacuucaagaaccacaccagccccgacgucgaccugggggacaucuccggcaucaacgccagcguggugaacauccagaaggagaucgaccgccugaacgaggucgccaagaaccucaacgagucccugaucgaccugcaggagcucgggaaguacgagcaguacaucaagggcgggggcgggagcgacaucaucaagcuccugaacgagcaggucaacaaggagaugcaguccagcaaccuguacauguccaugagcuccuggugcuacacccacagccucgacggcgccgggcuguuccuguucgaccacgccgcggaggaguacgagcacgccaagaagcucaucaucuuccugaacgagaacaacgugcccgugcagcugaccuccaucagcgccccggagcacaaguucgagggccucacgcagaucuuccagaaggccuacgagcacgagcagcacaucuccgagagcaucaacaacaucguggaccacgccaucaaguccaaggaccacgcgaccuucaacuuccugcagugguacgucgccgagcagcacgaggaggaggugcuguucaaggacauccucgacaagaucgagcugaucgggaacgagaaccacggccuguaccucgccgaccaguacgugaaggggaucgccaagagccgcaaguccugaggacuaguuauaagacugacuagcccgaugggccucccaacgggcccuccuccccuccuugcaccgagauuaauaaaaaaaaaaaaaaaaaaaaaaaaaaaaaaaaaaaaaaaaaaaaaaaaaaaaaaaaaaaaaaaaugcaucccccccccccccccccccccccccccccccaaaggcucuuuucagagccaccagaauu

SEQ ID NO: 14163 - RNA, 3943 nt, Artificial Sequence
  SARS-CoV-2/Wuhan/WIV05/2019__EPI_ISL_402128 spike protein mRNA gc (1-1211)(N914C_S1123C) Foldon construct
aggagaaagcuuaccauguucguguuccugguccuccugccccuggugagcucccagugcgugaaccucaccacccgcacgcagcugccgcccgccuacaccaacagcuucacccggggcgucuacuaccccgacaagguguuccgcuccagcgugcugcacuccacccaggaccucuuccugcccuucuucagcaacgucacgugguuccacgccauccacguguccgggaccaacggcaccaagcgguucgacaacccggugcugcccuucaacgacggggucuacuucgcgagcaccgagaaguccaacaucauccgcggcuggaucuucgggacgacccucgacagcaagacccagucccugcugaucgugaacaacgccaccaacguggucaucaaggugugcgaguuccaguucugcaacgaccccuuccucggcguguacuaccacaagaacaacaagagcuggauggaguccgaguuccgggucuacagcuccgccaacaacugcacguucgaguacgugagccagcccuuccugauggaccuggagggcaagcaggggaacuucaagaaccuccgcgaguucguguucaagaacaucgacggcuacuucaagaucuacuccaagcacaccccgaucaaccugguccgggaccugccccagggguucagcgcccucgagccccugguggaccugcccaucggcaucaacaucacccgcuuccagacccuccuggcccugcaccgguccuaccucacgccgggggacagcagcuccggcuggaccgcgggcgccgccgccuacuacgugggguaccugcagccccgcaccuuccugcucaaguacaacgagaacggcaccaucacggacgcggucgacugcgcccuggacccccugagcgagaccaagugcacccucaaguccuucaccguggagaaggggaucuaccagacgagcaacuuccgggugcagcccaccgaguccaucguccgcuucccgaacaucaccaaccugugccccuucggcgagguguucaacgccacccgguucgccagcgucuacgccuggaaccgcaagcggaucuccaacugcguggcggacuacagcgugcuguacaacuccgccagcuucuccacguucaagugcuacggcgucagccccaccaagcucaacgaccugugcuucaccaacguguacgccgacuccuucgugauccgcggggacgagguccggcagaucgcccccggccagaccgggaagaucgccgacuacaacuacaagcugccggacgacuucacgggcugcgugaucgcguggaacagcaacaaccucgacuccaaggucgggggcaacuacaacuaccuguaccgccuguuccgcaagagcaaccucaagcccuucgagcgggacaucuccaccgagaucuaccaggccggcagcacccccugcaacgggguggagggcuucaacugcuacuucccccugcaguccuacggguuccagccgaccaacggcgugggguaccagcccuaccggguggucgugcugagcuucgagcuccugcacgcccccgccacggugugcggccccaagaaguccaccaaccuggucaagaacaagugcgugaacuucaacuucaacggccucaccgggaccggcgugcugaccgagagcaacaagaaguuccugccguuccagcaguucgggcgcgacaucgccgacacgaccgacgcgguccgcgacccccagacccuggagauccucgacaucacccccugcagcuucggcgggguguccgugaucacgccgggcaccaacaccagcaaccaggucgccgugcuguaccaggacgugaacugcaccgagguccccguggccauccacgccgaccagcugacgcccaccuggcggguguacuccaccggcagcaacgucuuccagacccgcgccgggugccucaucggcgcggagcacgugaacaacuccuacgagugcgacauccccaucggggccggcaucugcgccagcuaccagacgcagaccaacuccccgcggcgcgcccggagcguggcgucccagagcaucaucgccuacaccaugucccugggcgccgagaacagcgucgccuacuccaacaacagcaucgccauccccaccaacuucacgaucuccgugaccaccgagauccugcccgugagcaugaccaagacgagcgucgacugcaccauguacaucugcggggacuccaccgagugcagcaaccuccugcugcaguacggcuccuucugcacccagcucaaccgcgcgcugacggggaucgccguggagcaggacaagaacacccaggagguguucgcccaggucaagcagaucuacaagacgcccccgaucaaggacuucggcggguucaacuucagccagauccugcccgaccccuccaagcccagcaagcgguccuucaucgaggaccuccuguucaacaaggugacccuggccgacgccggcuucaucaagcaguacggcgacugccucggggacaucgcggcccgcgaccugaucugcgcccagaaguucaacggccugaccgugcucccgccccugcugaccgacgagaugaucgcccaguacaccagcgcccuccuggcggggaccaucacguccggcuggaccuucggggccggcgccgcccugcagauccccuucgcgaugcagauggccuaccgguucaacggcaucggggucacccagugcgugcucuacgagaaccagaagcugaucgccaaccaguucaacagcgccaucggcaagauccaggacucccugagcuccaccgccagcgcgcucgggaagcugcaggacguggucaaccagaacgcccaggcccugaacacgcucgugaagcagcuguccagcaacuucggcgccaucuccagcgugcugaacgacauccucucccgccuggacaaggucgaggccgaggugcagaucgaccggcugaucaccgggcgccuccagagccugcagaccuacgugacccagcagcugauccgggcggccgagauccgcgccagcgccaaccucgccgcgaccaagauguccgagugcguccugggccagagcaagcggguggacuucugcggcaagggguaccaccugauguccuucccccagagcgccccgcacggcguggucuuccuccacgugacguacguccccgcccaggagaagaacuucaccaccgcccccgcgaucugccacgacgggaaggcccacuucccccgcgagggcguguucguguccaacgggacccacugguucgucacgcagcggaacuucuacgagccgcagaucaucaccaccgacaacaccuucgugugcggcaacugcgacguggucaucggcaucgugaacaacacgguguacgacccccugcagcccgagcuggacuccuucaaggaggagcucgacaaguacuucaagaaccacaccagccccgacgucgaccugggggacaucuccggcaucaacgccagcguggugaacauccagaaggagaucgaccgccugaacgaggucgccaagaaccucaacgagucccugaucgaccugcaggagcucgggaaguacgagcaguacaucaagggcgggagcggcuacauccccgaggccccgcgcgacgggcaggccuacgugcggaaggacggcgaguggguccugcucagcaccuuccugugaggacuaguuauaagacugacuagcccgaugggccucccaacgggcccuccuccccuccuugcaccgagauuaauaaaaaaaaaaaaaaaaaaaaaaaaaaaaaaaaaaaaaaaaaaaaaaaaaaaaaaaaaaaaaaaaugcaucccccccccccccccccccccccccccccccaaaggcucuuuucagagccaccagaauu

SEQ ID NO: 14164 - RNA, 4315 nt, Artificial Sequence
  SARS-CoV-2/Wuhan/WIV05/2019__EPI_ISL_402128 spike protein mRNA gc (1-1211)(N914C_S1123C) WhcAg construct
aggagaaagcuuaccauguucguguuccugguccuccugccccuggugagcucccagugcgugaaccucaccacccgcacgcagcugccgcccgccuacaccaacagcuucacccggggcgucuacuaccccgacaagguguuccgcuccagcgugcugcacuccacccaggaccucuuccugcccuucuucagcaacgucacgugguuccacgccauccacguguccgggaccaacggcaccaagcgguucgacaacccggugcugcccuucaacgacggggucuacuucgcgagcaccgagaaguccaacaucauccgcggcuggaucuucgggacgacccucgacagcaagacccagucccugcugaucgugaacaacgccaccaacguggucaucaaggugugcgaguuccaguucugcaacgaccccuuccucggcguguacuaccacaagaacaacaagagcuggauggaguccgaguuccgggucuacagcuccgccaacaacugcacguucgaguacgugagccagcccuuccugauggaccuggagggcaagcaggggaacuucaagaaccuccgcgaguucguguucaagaacaucgacggcuacuucaagaucuacuccaagcacaccccgaucaaccugguccgggaccugccccagggguucagcgcccucgagccccugguggaccugcccaucggcaucaacaucacccgcuuccagacccuccuggcccugcaccgguccuaccucacgccgggggacagcagcuccggcuggaccgcgggcgccgccgccuacuacgugggguaccugcagccccgcaccuuccugcucaaguacaacgagaacggcaccaucacggacgcggucgacugcgcccuggacccccugagcgagaccaagugcacccucaaguccuucaccguggagaaggggaucuaccagacgagcaacuuccgggugcagcccaccgaguccaucguccgcuucccgaacaucaccaaccugugccccuucggcgagguguucaacgccacccgguucgccagcgucuacgccuggaaccgcaagcggaucuccaacugcguggcggacuacagcgugcuguacaacuccgccagcuucuccacguucaagugcuacggcgucagccccaccaagcucaacgaccugugcuucaccaacguguacgccgacuccuucgugauccgcggggacgagguccggcagaucgcccccggccagaccgggaagaucgccgacuacaacuacaagcugccggacgacuucacgggcugcgugaucgcguggaacagcaacaaccucgacuccaaggucgggggcaacuacaacuaccuguaccgccuguuccgcaagagcaaccucaagcccuucgagcgggacaucuccaccgagaucuaccaggccggcagcacccccugcaacgggguggagggcuucaacugcuacuucccccugcaguccuacggguuccagccgaccaacggcgugggguaccagcccuaccggguggucgugcugagcuucgagcuccugcacgcccccgccacggugugcggccccaagaaguccaccaaccuggucaagaacaagugcgugaacuucaacuucaacggccucaccgggaccggcgugcugaccgagagcaacaagaaguuccugccguuccagcaguucgggcgcgacaucgccgacacgaccgacgcgguccgcgacccccagacccuggagauccucgacaucacccccugcagcuucggcgggguguccgugaucacgccgggcaccaacaccagcaaccaggucgccgugcuguaccaggacgugaacugcaccgagguccccguggccauccacgccgaccagcugacgcccaccuggcggguguacuccaccggcagcaacgucuuccagacccgcgccgggugccucaucggcgcggagcacgugaacaacuccuacgagugcgacauccccaucggggccggcaucugcgccagcuaccagacgcagaccaacuccccgcggcgcgcccggagcguggcgucccagagcaucaucgccuacaccaugucccugggcgccgagaacagcgucgccuacuccaacaacagcaucgccauccccaccaacuucacgaucuccgugaccaccgagauccugcccgugagcaugaccaagacgagcgucgacugcaccauguacaucugcggggacuccaccgagugcagcaaccuccugcugcaguacggcuccuucugcacccagcucaaccgcgcgcugacggggaucgccguggagcaggacaagaacacccaggagguguucgcccaggucaagcagaucuacaagacgcccccgaucaaggacuucggcggguucaacuucagccagauccugcccgaccccuccaagcccagcaagcgguccuucaucgaggaccuccuguucaacaaggugacccuggccgacgccggcuucaucaagcaguacggcgacugccucggggacaucgcggcccgcgaccugaucugcgcccagaaguucaacggccugaccgugcucccgccccugcugaccgacgagaugaucgcccaguacaccagcgcccuccuggcggggaccaucacguccggcuggaccuucggggccggcgccgcccugcagauccccuucgcgaugcagauggccuaccgguucaacggcaucggggucacccagugcgugcucuacgagaaccagaagcugaucgccaaccaguucaacagcgccaucggcaagauccaggacucccugagcuccaccgccagcgcgcucgggaagcugcaggacguggucaaccagaacgcccaggcccugaacacgcucgugaagcagcuguccagcaacuucggcgccaucuccagcgugcugaacgacauccucucccgccuggacaaggucgaggccgaggugcagaucgaccggcugaucaccgggcgccuccagagccugcagaccuacgugacccagcagcugauccgggcggccgagauccgcgccagcgccaaccucgccgcgaccaagauguccgagugcguccugggccagagcaagcggguggacuucugcggcaagggguaccaccugauguccuucccccagagcgccccgcacggcguggucuuccuccacgugacguacguccccgcccaggagaagaacuucaccaccgcccccgcgaucugccacgacgggaaggcccacuucccccgcgagggcguguucguguccaacgggacccacugguucgucacgcagcggaacuucuacgagccgcagaucaucaccaccgacaacaccuucgugugcggcaacugcgacguggucaucggcaucgugaacaacacgguguacgacccccugcagcccgagcuggacuccuucaaggaggagcucgacaaguacuucaagaaccacaccagccccgacgucgaccugggggacaucuccggcaucaacgccagcguggugaacauccagaaggagaucgaccgccugaacgaggucgccaagaaccucaacgagucccugaucgaccugcaggagcucgggaaguacgagcaguacaucaagggcgggggcgggagcgacaucgaccccuacaaggaguucggcagcuccuaccagcugcucaacuuccugccccuggacuucuuccccgaccucaacgcccugguggacaccgccaccgcgcuguacgaggaggagcucacggggcgcgagcacugcagcccccaccacaccgccauccggcaggcccuggucugcugggacgagcugaccaagcucaucgccuggauguccagcaacaucaccuccgagcagguccgcacgaucaucgugaaccacgucaacgacaccuggggccugaaggugcggcagagccugugguuccaccucuccugccugaccuucgggcagcacaccgugcaggaguuccuggucagcuucggcguguggauccgcacgcccgccccguaccggccgcccaacgcgccgauccucuccacccugccggagcacaccgugaucugcugaggacuaguuauaagacugacuagcccgaugggccucccaacgggcccuccuccccuccuugcaccgagauuaauaaaaaaaaaaaaaaaaaaaaaaaaaaaaaaaaaaaaaaaaaaaaaaaaaaaaaaaaaaaaaaaaugcaucccccccccccccccccccccccccccccccaaaggcucuuuucagagccaccagaauu

SEQ ID NO: 14165 - RNA, 4141 nt, Artificial Sequence
  SARS-CoV-2/Wuhan/WIV05/2019__EPI_ISL_402128 spike protein mRNA gc (1-1147)(N914C_S1123C) LumSynth construct
aggagaaagcuuaccauguucguguuccugguccuccugccccuggugagcucccagugcgugaaccucaccacccgcacgcagcugccgcccgccuacaccaacagcuucacccggggcgucuacuaccccgacaagguguuccgcuccagcgugcugcacuccacccaggaccucuuccugcccuucuucagcaacgucacgugguuccacgccauccacguguccgggaccaacggcaccaagcgguucgacaacccggugcugcccuucaacgacggggucuacuucgcgagcaccgagaaguccaacaucauccgcggcuggaucuucgggacgacccucgacagcaagacccagucccugcugaucgugaacaacgccaccaacguggucaucaaggugugcgaguuccaguucugcaacgaccccuuccucggcguguacuaccacaagaacaacaagagcuggauggaguccgaguuccgggucuacagcuccgccaacaacugcacguucgaguacgugagccagcccuuccugauggaccuggagggcaagcaggggaacuucaagaaccuccgcgaguucguguucaagaacaucgacggcuacuucaagaucuacuccaagcacaccccgaucaaccugguccgggaccugccccagggguucagcgcccucgagccccugguggaccugcccaucggcaucaacaucacccgcuuccagacccuccuggcccugcaccgguccuaccucacgccgggggacagcagcuccggcuggaccgcgggcgccgccgccuacuacgugggguaccugcagccccgcaccuuccugcucaaguacaacgagaacggcaccaucacggacgcggucgacugcgcccuggacccccugagcgagaccaagugcacccucaaguccuucaccguggagaaggggaucuaccagacgagcaacuuccgggugcagcccaccgaguccaucguccgcuucccgaacaucaccaaccugugccccuucggcgagguguucaacgccacccgguucgccagcgucuacgccuggaaccgcaagcggaucuccaacugcguggcggacuacagcgugcuguacaacuccgccagcuucuccacguucaagugcuacggcgucagccccaccaagcucaacgaccugugcuucaccaacguguacgccgacuccuucgugauccgcggggacgagguccggcagaucgcccccggccagaccgggaagaucgccgacuacaacuacaagcugccggacgacuucacgggcugcgugaucgcguggaacagcaacaaccucgacuccaaggucgggggcaacuacaacuaccuguaccgccuguuccgcaagagcaaccucaagcccuucgagcgggacaucuccaccgagaucuaccaggccggcagcacccccugcaacgggguggagggcuucaacugcuacuucccccugcaguccuacggguuccagccgaccaacggcgugggguaccagcccuaccggguggucgugcugagcuucgagcuccugcacgcccccgccacggugugcggccccaagaaguccaccaaccuggucaagaacaagugcgugaacuucaacuucaacggccucaccgggaccggcgugcugaccgagagcaacaagaaguuccugccguuccagcaguucgggcgcgacaucgccgacacgaccgacgcgguccgcgacccccagacccuggagauccucgacaucacccccugcagcuucggcgggguguccgugaucacgccgggcaccaacaccagcaaccaggucgccgugcuguaccaggacgugaacugcaccgagguccccguggccauccacgccgaccagcugacgcccaccuggcggguguacuccaccggcagcaacgucuuccagacccgcgccgggugccucaucggcgcggagcacgugaacaacuccuacgagugcgacauccccaucggggccggcaucugcgccagcuaccagacgcagaccaacuccccgcggcgcgcccggagcguggcgucccagagcaucaucgccuacaccaugucccugggcgccgagaacagcgucgccuacuccaacaacagcaucgccauccccaccaacuucacgaucuccgugaccaccgagauccugcccgugagcaugaccaagacgagcgucgacugcaccauguacaucugcggggacuccaccgagugcagcaaccuccugcugcaguacggcuccuucugcacccagcucaaccgcgcgcugacggggaucgccguggagcaggacaagaacacccaggagguguucgcccaggucaagcagaucuacaagacgcccccgaucaaggacuucggcggguucaacuucagccagauccugcccgaccccuccaagcccagcaagcgguccuucaucgaggaccuccuguucaacaaggugacccuggccgacgccggcuucaucaagcaguacggcgacugccucggggacaucgcggcccgcgaccugaucugcgcccagaaguucaacggccugaccgugcucccgccccugcugaccgacgagaugaucgcccaguacaccagcgcccuccuggcggggaccaucacguccggcuggaccuucggggccggcgccgcccugcagauccccuucgcgaugcagauggccuaccgguucaacggcaucggggucacccagugcgugcucuacgagaaccagaagcugaucgccaaccaguucaacagcgccaucggcaagauccaggacucccugagcuccaccgccagcgcgcucgggaagcugcaggacguggucaaccagaacgcccaggcccugaacacgcucgugaagcagcuguccagcaacuucggcgccaucuccagcgugcugaacgacauccucucccgccuggacaaggucgaggccgaggugcagaucgaccggcugaucaccgggcgccuccagagccugcagaccuacgugacccagcagcugauccgggcggccgagauccgcgccagcgccaaccucgccgcgaccaagauguccgagugcguccugggccagagcaagcggguggacuucugcggcaagggguaccaccugauguccuucccccagagcgccccgcacggcguggucuuccuccacgugacguacguccccgcccaggagaagaacuucaccaccgcccccgcgaucugccacgacgggaaggcccacuucccccgcgagggcguguucguguccaacgggacccacugguucgucacgcagcggaacuucuacgagccgcagaucaucaccaccgacaacaccuucgugugcggcaacugcgacguggucaucggcaucgugaacaacacgguguacgacccccugcagcccgagcuggacuccggcggcgggagcgggggcgggcagaucuacgagggcaagcugaccgccgaggggcuccgcuucggcaucguggccagccgguucaaccacgcgcuggucgaccgccugguggagggggccaucgacgccaucgugcggcacggcgggcgcgaggaggacaucacccucguccgggugcccggcuccugggagaucccgguggccgccggcgagcuggcccgcaaggaggacaucgacgcggucaucgccaucggggugcugauccggggcgccacgccccacuucgacuacaucgccagcgagguguccaaggggcucgcggaccugagccuggagcuccgcaagcccaucaccuucggcgucaucaccgccgacacccuggagcaggccaucgagcgggccgggacgaagcacggcaacaagggcugggaggccgcgcuguccgccaucgagauggccaaccucuucaagagccugcgcugaggacuaguuauaagacugacuagcccgaugggccucccaacgggcccuccuccccuccuugcaccgagauuaauaaaaaaaaaaaaaaaaaaaaaaaaaaaaaaaaaaaaaaaaaaaaaaaaaaaaaaaaaaaaaaaaugcaucccccccccccccccccccccccccccccccaaaggcucuuuucagagccaccagaauu

SEQ ID NO: 14166 - RNA, 4165 nt, Artificial Sequence
  SARS-CoV-2/Wuhan/WIV05/2019__EPI_ISL_402128 spike protein mRNA gc (1-1147)(N914C_S1123C) Ferritin construct
aggagaaagcuuaccauguucguguuccugguccuccugccccuggugagcucccagugcgugaaccucaccacccgcacgcagcugccgcccgccuacaccaacagcuucacccggggcgucuacuaccccgacaagguguuccgcuccagcgugcugcacuccacccaggaccucuuccugcccuucuucagcaacgucacgugguuccacgccauccacguguccgggaccaacggcaccaagcgguucgacaacccggugcugcccuucaacgacggggucuacuucgcgagcaccgagaaguccaacaucauccgcggcuggaucuucgggacgacccucgacagcaagacccagucccugcugaucgugaacaacgccaccaacguggucaucaaggugugcgaguuccaguucugcaacgaccccuuccucggcguguacuaccacaagaacaacaagagcuggauggaguccgaguuccgggucuacagcuccgccaacaacugcacguucgaguacgugagccagcccuuccugauggaccuggagggcaagcaggggaacuucaagaaccuccgcgaguucguguucaagaacaucgacggcuacuucaagaucuacuccaagcacaccccgaucaaccugguccgggaccugccccagggguucagcgcccucgagccccugguggaccugcccaucggcaucaacaucacccgcuuccagacccuccuggcccugcaccgguccuaccucacgccgggggacagcagcuccggcuggaccgcgggcgccgccgccuacuacgugggguaccugcagccccgcaccuuccugcucaaguacaacgagaacggcaccaucacggacgcggucgacugcgcccuggacccccugagcgagaccaagugcacccucaaguccuucaccguggagaaggggaucuaccagacgagcaacuuccgggugcagcccaccgaguccaucguccgcuucccgaacaucaccaaccugugccccuucggcgagguguucaacgccacccgguucgccagcgucuacgccuggaaccgcaagcggaucuccaacugcguggcggacuacagcgugcuguacaacuccgccagcuucuccacguucaagugcuacggcgucagccccaccaagcucaacgaccugugcuucaccaacguguacgccgacuccuucgugauccgcggggacgagguccggcagaucgcccccggccagaccgggaagaucgccgacuacaacuacaagcugccggacgacuucacgggcugcgugaucgcguggaacagcaacaaccucgacuccaaggucgggggcaacuacaacuaccuguaccgccuguuccgcaagagcaaccucaagcccuucgagcgggacaucuccaccgagaucuaccaggccggcagcacccccugcaacgggguggagggcuucaacugcuacuucccccugcaguccuacggguuccagccgaccaacggcgugggguaccagcccuaccggguggucgugcugagcuucgagcuccugcacgcccccgccacggugugcggccccaagaaguccaccaaccuggucaagaacaagugcgugaacuucaacuucaacggccucaccgggaccggcgugcugaccgagagcaacaagaaguuccugccguuccagcaguucgggcgcgacaucgccgacacgaccgacgcgguccgcgacccccagacccuggagauccucgacaucacccccugcagcuucggcgggguguccgugaucacgccgggcaccaacaccagcaaccaggucgccgugcuguaccaggacgugaacugcaccgagguccccguggccauccacgccgaccagcugacgcccaccuggcggguguacuccaccggcagcaacgucuuccagacccgcgccgggugccucaucggcgcggagcacgugaacaacuccuacgagugcgacauccccaucggggccggcaucugcgccagcuaccagacgcagaccaacuccccgcggcgcgcccggagcguggcgucccagagcaucaucgccuacaccaugucccugggcgccgagaacagcgucgccuacuccaacaacagcaucgccauccccaccaacuucacgaucuccgugaccaccgagauccugcccgugagcaugaccaagacgagcgucgacugcaccauguacaucugcggggacuccaccgagugcagcaaccuccugcugcaguacggcuccuucugcacccagcucaaccgcgcgcugacggggaucgccguggagcaggacaagaacacccaggagguguucgcccaggucaagcagaucuacaagacgcccccgaucaaggacuucggcggguucaacuucagccagauccugcccgaccccuccaagcccagcaagcgguccuucaucgaggaccuccuguucaacaaggugacccuggccgacgccggcuucaucaagcaguacggcgacugccucggggacaucgcggcccgcgaccugaucugcgcccagaaguucaacggccugaccgugcucccgccccugcugaccgacgagaugaucgcccaguacaccagcgcccuccuggcggggaccaucacguccggcuggaccuucggggccggcgccgcccugcagauccccuucgcgaugcagauggccuaccgguucaacggcaucggggucacccagugcgugcucuacgagaaccagaagcugaucgccaaccaguucaacagcgccaucggcaagauccaggacucccugagcuccaccgccagcgcgcucgggaagcugcaggacguggucaaccagaacgcccaggcccugaacacgcucgugaagcagcuguccagcaacuucggcgccaucuccagcgugcugaacgacauccucucccgccuggacaaggucgaggccgaggugcagaucgaccggcugaucaccgggcgccuccagagccugcagaccuacgugacccagcagcugauccgggcggccgagauccgcgccagcgccaaccucgccgcgaccaagauguccgagugcguccugggccagagcaagcggguggacuucugcggcaagggguaccaccugauguccuucccccagagcgccccgcacggcguggucuuccuccacgugacguacguccccgcccaggagaagaacuucaccaccgcccccgcgaucugccacgacgggaaggcccacuucccccgcgagggcguguucguguccaacgggacccacugguucgucacgcagcggaacuucuacgagccgcagaucaucaccaccgacaacaccuucgugugcggcaacugcgacguggucaucggcaucgugaacaacacgguguacgacccccugcagcccgagcuggacuccggcgggggcgggagcgacaucaucaagcuccugaacgagcaggucaacaaggagaugcaguccagcaaccuguacauguccaugagcuccuggugcuacacccacagccucgacggcgccgggcuguuccuguucgaccacgccgcggaggaguacgagcacgccaagaagcucaucaucuuccugaacgagaacaacgugcccgugcagcugaccuccaucagcgccccggagcacaaguucgagggccucacgcagaucuuccagaaggccuacgagcacgagcagcacaucuccgagagcaucaacaacaucguggaccacgccaucaaguccaaggaccacgcgaccuucaacuuccugcagugguacgucgccgagcagcacgaggaggaggugcuguucaaggacauccucgacaagaucgagcugaucgggaacgagaaccacggccuguaccucgccgaccaguacgugaaggggaucgccaagagccgcaaguccugaggacuaguuauaagacugacuagcccgaugggccucccaacgggcccuccuccccuccuugcaccgagauuaauaaaaaaaaaaaaaaaaaaaaaaaaaaaaaaaaaaaaaaaaaaaaaaaaaaaaaaaaaaaaaaaaugcaucccccccccccccccccccccccccccccccaaaggcucuuuucagagccaccagaauu

SEQ ID NO: 14167 - RNA, 3751 nt, Artificial Sequence
  SARS-CoV-2/Wuhan/WIV05/2019__EPI_ISL_402128 spike protein mRNA gc (1-1147)(N914C_S1123C) Foldon construct
aggagaaagcuuaccauguucguguuccugguccuccugccccuggugagcucccagugcgugaaccucaccacccgcacgcagcugccgcccgccuacaccaacagcuucacccggggcgucuacuaccccgacaagguguuccgcuccagcgugcugcacuccacccaggaccucuuccugcccuucuucagcaacgucacgugguuccacgccauccacguguccgggaccaacggcaccaagcgguucgacaacccggugcugcccuucaacgacggggucuacuucgcgagcaccgagaaguccaacaucauccgcggcuggaucuucgggacgacccucgacagcaagacccagucccugcugaucgugaacaacgccaccaacguggucaucaaggugugcgaguuccaguucugcaacgaccccuuccucggcguguacuaccacaagaacaacaagagcuggauggaguccgaguuccgggucuacagcuccgccaacaacugcacguucgaguacgugagccagcccuuccugauggaccuggagggcaagcaggggaacuucaagaaccuccgcgaguucguguucaagaacaucgacggcuacuucaagaucuacuccaagcacaccccgaucaaccugguccgggaccugccccagggguucagcgcccucgagccccugguggaccugcccaucggcaucaacaucacccgcuuccagacccuccuggcccugcaccgguccuaccucacgccgggggacagcagcuccggcuggaccgcgggcgccgccgccuacuacgugggguaccugcagccccgcaccuuccugcucaaguacaacgagaacggcaccaucacggacgcggucgacugcgcccuggacccccugagcgagaccaagugcacccucaaguccuucaccguggagaaggggaucuaccagacgagcaacuuccgggugcagcccaccgaguccaucguccgcuucccgaacaucaccaaccugugccccuucggcgagguguucaacgccacccgguucgccagcgucuacgccuggaaccgcaagcggaucuccaacugcguggcggacuacagcgugcuguacaacuccgccagcuucuccacguucaagugcuacggcgucagccccaccaagcucaacgaccugugcuucaccaacguguacgccgacuccuucgugauccgcggggacgagguccggcagaucgcccccggccagaccgggaagaucgccgacuacaacuacaagcugccggacgacuucacgggcugcgugaucgcguggaacagcaacaaccucgacuccaaggucgggggcaacuacaacuaccuguaccgccuguuccgcaagagcaaccucaagcccuucgagcgggacaucuccaccgagaucuaccaggccggcagcacccccugcaacgggguggagggcuucaacugcuacuucccccugcaguccuacggguuccagccgaccaacggcgugggguaccagcccuaccggguggucgugcugagcuucgagcuccugcacgcccccgccacggugugcggccccaagaaguccaccaaccuggucaagaacaagugcgugaacuucaacuucaacggccucaccgggaccggcgugcugaccgagagcaacaagaaguuccugccguuccagcaguucgggcgcgacaucgccgacacgaccgacgcgguccgcgacccccagacccuggagauccucgacaucacccccugcagcuucggcgggguguccgugaucacgccgggcaccaacaccagcaaccaggucgccgugcuguaccaggacgugaacugcaccgagguccccguggccauccacgccgaccagcugacgcccaccuggcggguguacuccaccggcagcaacgucuuccagacccgcgccgggugccucaucggcgcggagcacgugaacaacuccuacgagugcgacauccccaucggggccggcaucugcgccagcuaccagacgcagaccaacuccccgcggcgcgcccggagcguggcgucccagagcaucaucgccuacaccaugucccugggcgccgagaacagcgucgccuacuccaacaacagcaucgccauccccaccaacuucacgaucuccgugaccaccgagauccugcccgugagcaugaccaagacgagcgucgacugcaccauguacaucugcggggacuccaccgagugcagcaaccuccugcugcaguacggcuccuucugcacccagcucaaccgcgcgcugacggggaucgccguggagcaggacaagaacacccaggagguguucgcccaggucaagcagaucuacaagacgcccccgaucaaggacuucggcggguucaacuucagccagauccugcccgaccccuccaagcccagcaagcgguccuucaucgaggaccuccuguucaacaaggugacccuggccgacgccggcuucaucaagcaguacggcgacugccucggggacaucgcggcccgcgaccugaucugcgcccagaaguucaacggccugaccgugcucccgccccugcugaccgacgagaugaucgcccaguacaccagcgcccuccuggcggggaccaucacguccggcuggaccuucggggccggcgccgcccugcagauccccuucgcgaugcagauggccuaccgguucaacggcaucggggucacccagugcgugcucuacgagaaccagaagcugaucgccaaccaguucaacagcgccaucggcaagauccaggacucccugagcuccaccgccagcgcgcucgggaagcugcaggacguggucaaccagaacgcccaggcccugaacacgcucgugaagcagcuguccagcaacuucggcgccaucuccagcgugcugaacgacauccucucccgccuggacaaggucgaggccgaggugcagaucgaccggcugaucaccgggcgccuccagagccugcagaccuacgugacccagcagcugauccgggcggccgagauccgcgccagcgccaaccucgccgcgaccaagauguccgagugcguccugggccagagcaagcggguggacuucugcggcaagggguaccaccugauguccuucccccagagcgccccgcacggcguggucuuccuccacgugacguacguccccgcccaggagaagaacuucaccaccgcccccgcgaucugccacgacgggaaggcccacuucccccgcgagggcguguucguguccaacgggacccacugguucgucacgcagcggaacuucuacgagccgcagaucaucaccaccgacaacaccuucgugugcggcaacugcgacguggucaucggcaucgugaacaacacgguguacgacccccugcagcccgagcuggacuccggcgggagcggcuacauccccgaggccccgcgcgacgggcaggccuacgugcggaaggacggcgaguggguccugcucagcaccuuccugugaggacuaguuauaagacugacuagcccgaugggccucccaacgggcccuccuccccuccuugcaccgagauuaauaaaaaaaaaaaaaaaaaaaaaaaaaaaaaaaaaaaaaaaaaaaaaaaaaaaaaaaaaaaaaaaaugcaucccccccccccccccccccccccccccccccaaaggcucuuuucagagccaccagaauu

SEQ ID NO: 14168 - RNA, 4123 nt, Artificial Sequence
  SARS-CoV-2/Wuhan/WIV05/2019__EPI_ISL_402128 spike protein mRNA gc (1-1147)(N914C_S1123C) WhcAg construct
aggagaaagcuuaccauguucguguuccugguccuccugccccuggugagcucccagugcgugaaccucaccacccgcacgcagcugccgcccgccuacaccaacagcuucacccggggcgucuacuaccccgacaagguguuccgcuccagcgugcugcacuccacccaggaccucuuccugcccuucuucagcaacgucacgugguuccacgccauccacguguccgggaccaacggcaccaagcgguucgacaacccggugcugcccuucaacgacggggucuacuucgcgagcaccgagaaguccaacaucauccgcggcuggaucuucgggacgacccucgacagcaagacccagucccugcugaucgugaacaacgccaccaacguggucaucaaggugugcgaguuccaguucugcaacgaccccuuccucggcguguacuaccacaagaacaacaagagcuggauggaguccgaguuccgggucuacagcuccgccaacaacugcacguucgaguacgugagccagcccuuccugauggaccuggagggcaagcaggggaacuucaagaaccuccgcgaguucguguucaagaacaucgacggcuacuucaagaucuacuccaagcacaccccgaucaaccugguccgggaccugccccagggguucagcgcccucgagccccugguggaccugcccaucggcaucaacaucacccgcuuccagacccuccuggcccugcaccgguccuaccucacgccgggggacagcagcuccggcuggaccgcgggcgccgccgccuacuacgugggguaccugcagccccgcaccuuccugcucaaguacaacgagaacggcaccaucacggacgcggucgacugcgcccuggacccccugagcgagaccaagugcacccucaaguccuucaccguggagaaggggaucuaccagacgagcaacuuccgggugcagcccaccgaguccaucguccgcuucccgaacaucaccaaccugugccccuucggcgagguguucaacgccacccgguucgccagcgucuacgccuggaaccgcaagcggaucuccaacugcguggcggacuacagcgugcuguacaacuccgccagcuucuccacguucaagugcuacggcgucagccccaccaagcucaacgaccugugcuucaccaacguguacgccgacuccuucgugauccgcggggacgagguccggcagaucgcccccggccagaccgggaagaucgccgacuacaacuacaagcugccggacgacuucacgggcugcgugaucgcguggaacagcaacaaccucgacuccaaggucgggggcaacuacaacuaccuguaccgccuguuccgcaagagcaaccucaagcccuucgagcgggacaucuccaccgagaucuaccaggccggcagcacccccugcaacgggguggagggcuucaacugcuacuucccccugcaguccuacggguuccagccgaccaacggcgugggguaccagcccuaccggguggucgugcugagcuucgagcuccugcacgcccccgccacggugugcggccccaagaaguccaccaaccuggucaagaacaagugcgugaacuucaacuucaacggccucaccgggaccggcgugcugaccgagagcaacaagaaguuccugccguuccagcaguucgggcgcgacaucgccgacacgaccgacgcgguccgcgacccccagacccuggagauccucgacaucacccccugcagcuucggcgggguguccgugaucacgccgggcaccaacaccagcaaccaggucgccgugcuguaccaggacgugaacugcaccgagguccccguggccauccacgccgaccagcugacgcccaccuggcggguguacuccaccggcagcaacgucuuccagacccgcgccgggugccucaucggcgcggagcacgugaacaacuccuacgagugcgacauccccaucggggccggcaucugcgccagcuaccagacgcagaccaacuccccgcggcgcgcccggagcguggcgucccagagcaucaucgccuacaccaugucccugggcgccgagaacagcgucgccuacuccaacaacagcaucgccauccccaccaacuucacgaucuccgugaccaccgagauccugcccgugagcaugaccaagacgagcgucgacugcaccauguacaucugcggggacuccaccgagugcagcaaccuccugcugcaguacggcuccuucugcacccagcucaaccgcgcgcugacggggaucgccguggagcaggacaagaacacccaggagguguucgcccaggucaagcagaucuacaagacgcccccgaucaaggacuucggcggguucaacuucagccagauccugcccgaccccuccaagcccagcaagcgguccuucaucgaggaccuccuguucaacaaggugacccuggccgacgccggcuucaucaagcaguacggcgacugccucggggacaucgcggcccgcgaccugaucugcgcccagaaguucaacggccugaccgugcucccgccccugcugaccgacgagaugaucgcccaguacaccagcgcccuccuggcggggaccaucacguccggcuggaccuucggggccggcgccgcccugcagauccccuucgcgaugcagauggccuaccgguucaacggcaucggggucacccagugcgugcucuacgagaaccagaagcugaucgccaaccaguucaacagcgccaucggcaagauccaggacucccugagcuccaccgccagcgcgcucgggaagcugcaggacguggucaaccagaacgcccaggcccugaacacgcucgugaagcagcuguccagcaacuucggcgccaucuccagcgugcugaacgacauccucucccgccuggacaaggucgaggccgaggugcagaucgaccggcugaucaccgggcgccuccagagccugcagaccuacgugacccagcagcugauccgggcggccgagauccgcgccagcgccaaccucgccgcgaccaagauguccgagugcguccugggccagagcaagcggguggacuucugcggcaagggguaccaccugauguccuucccccagagcgccccgcacggcguggucuuccuccacgugacguacguccccgcccaggagaagaacuucaccaccgcccccgcgaucugccacgacgggaaggcccacuucccccgcgagggcguguucguguccaacgggacccacugguucgucacgcagcggaacuucuacgagccgcagaucaucaccaccgacaacaccuucgugugcggcaacugcgacguggucaucggcaucgugaacaacacgguguacgacccccugcagcccgagcuggacuccggcgggggcgggagcgacaucgaccccuacaaggaguucggcagcuccuaccagcugcucaacuuccugccccuggacuucuuccccgaccucaacgcccugguggacaccgccaccgcgcuguacgaggaggagcucacggggcgcgagcacugcagcccccaccacaccgccauccggcaggcccuggucugcugggacgagcugaccaagcucaucgccuggauguccagcaacaucaccuccgagcagguccgcacgaucaucgugaaccacgucaacgacaccuggggccugaaggugcggcagagccugugguuccaccucuccugccugaccuucgggcagcacaccgugcaggaguuccuggucagcuucggcguguggauccgcacgcccgccccguaccggccgcccaacgcgccgauccucuccacccugccggagcacaccgugaucugcugaggacuaguuauaagacugacuagcccgaugggccucccaacgggcccuccuccccuccuugcaccgagauuaauaaaaaaaaaaaaaaaaaaaaaaaaaaaaaaaaaaaaaaaaaaaaaaaaaaaaaaaaaaaaaaaaugcaucccccccccccccccccccccccccccccccaaaggcucuuuucagagccaccagaauu

SEQ ID NO: 14169 - RNA, 4039 nt, Artificial Sequence
  SARS-CoV-2/Wuhan/WIV05/2019__EPI_ISL_402128 spike protein mRNA gc mod (1-1273)(N914C_S1123C)
aggagaaagcuuaccauguucguguuucuggugcugcugccccugguguccagccagugugugaaccugaccaccagaacacagcugccuccagccuacaccaacagcuucaccagaggcguguacuaccccgacaagguguucagauccagcgugcugcacucuacccaggaccuguuccugccuuucuucagcaacgugaccugguuccacgccauccacguguccggcaccaauggcaccaagagauucgacaaccccgugcugcccuucaacgacgggguguacuuugccagcaccgagaaguccaacaucaucagaggcuggaucuucggcaccacacuggacagcaagacccagagccugcugaucgugaacaacgccaccaacguggucaucaaagugugcgaguuccaguucugcaacgaccccuuccugggcgucuacuaccacaagaacaacaagagcuggauggaaagcgaguuccggguguacagcagcgccaacaacugcaccuucgaguacgugucccagccuuuccugauggaccuggaaggcaagcagggcaacuucaagaaccugcgcgaguucguguucaagaacaucgacggcuacuucaaaaucuacagcaagcacaccccuaucaaccucgugcgggaucugccucagggcuucucugcucuggaaccccugguggaucugcccaucggcaucaacaucacccgguuucagacacugcuggcccugcacagaagcuaccugacaccuggcgauagcagcagcggauggacagcuggugccgccgcuuacuaugugggcuaccugcagccuagaaccuuccugcugaaguacaacgagaacggcaccaucaccgacgccguggauugugcucuggauccucugagcgagacaaagugcacccugaaguccuucaccguggaaaagggcaucuaccagaccagcaacuuccgggugcagcccaccgaauccaucgugcgguuccccaauaucaccaaucugugccccuucggcgagguguucaaugccaccagauucgccucuguguacgccuggaaccggaagcggaucagcaauugcguggccgacuacuccgugcuguacaacuccgccagcuucagcaccuucaagugcuacggcguguccccuaccaagcugaacgaccugugcuucacaaacguguacgccgacagcuucgugauccggggagaugaagugcggcagauugccccuggacagacaggcaagaucgccgacuacaacuacaagcugcccgacgacuucaccggcugugugauugccuggaacagcaacaaccuggacuccaaagucggcggcaacuacaauuaccuguaccggcuguuccggaaguccaaucugaagcccuucgagcgggacaucagcaccgaaaucuaucaggccggcagcaccccuugcaacggcguggaaggcuucaacugcuacuucccacugcaguccuacggcuuucagcccacaaauggcgugggcuaucagcccuacagagugguggugcugagcuucgaacugcugcaugcuccugccacagugugcggcccuaagaaaagcaccaaucucgugaagaacaaaugcgugaacuucaacuucaacggccugaccggcaccggcgugcugacagagagcaacaagaaguuccugccauuccagcaguuuggccgggauaucgccgauaccacagacgccguuagagauccccagacacuggaaauccuggacaucaccccaugcagcuucggcggagugucugugaucaccccuggcaccaacaccagcaaucagguggcagugcuguaccaggacgugaacuguaccgaagugcccguggccauucacgccgaucagcugacaccuacauggcggguguacuccaccggcagcaauguguuucagaccagagccggcugucugaucggagccgagcacgugaacaauagcuacgagugcgacauccccaucggcgcuggcaucugugccagcuaccagacacagacaaacagccccagacgggcuagaagcguggccagccagagcaucauugccuacacaaugucucugggcgccgagaacagcguggccuacuccaacaacucuaucgcuauccccaccaacuucaccaucagcgugaccaccgagauccugccuguguccaugaccaagaccagcguggacugcaccauguacaucugcggcgauuccaccgagugcuccaaccugcugcugcaguacggcagcuucugcacccagcugaauagagcccugacagggaucgccguggaacaggacaagaacacccaagagguguucgcccaagugaagcaaaucuacaagaccccuccuaucaaggacuucggcggcuucaauuucagccagauucugcccgauccuagcaagcccagcaagcggagcuucaucgaggaccugcuguucaacaaagugacacuggccgacgccggcuucaucaagcaguauggcgauugucugggcgacauugccgccagggaucugauuugcgcccagaaguuuaacggacugacagugcugccuccucugcugaccgaugagaugaucgcccaguacacaucugcccugcuggccggcacaaucacaagcggcuggacauuuggagcuggcgccgcucugcagauccccuuugcuaugcagauggccuaccgguucaacggcaucggagugacccagugcgugcuguacgagaaccagaagcugaucgccaaccaguucaacagcgccaucggcaagauccaggacagccugagcagcacagcaagcgcccugggaaagcugcaggacguggucaaccagaaugcccaggcacugaacacccuggucaagcagcuguccuccaacuucggcgccaucagcucugugcugaacgauauccugagcagacuggacaaggucgaggccgaggugcagaucgacagacugaucacaggcagacugcagagccuccagacauacgugacccagcagcugaucagagccgccgagauuagagccucugccaaucuggccgccaccaagaugucugagugugugcugggccagagcaagagaguggacuuuugcggcaagggcuaccaccugaugagcuucccucagucugccccucacggcgugguguuucugcacgugacauaugugcccgcucaagagaagaauuucaccaccgcuccagccaucugccacgacggcaaagcccacuuuccuagagaaggcguguucguguccaacggcacccauugguucgugacacagcggaacuucuacgagccccagaucaucaccaccgacaacaccuucguguguggcaacugcgacguugugaucggcauugugaacaauaccguguacgacccucugcagcccgagcuggacagcuucaaagaggaacuggacaaguacuuuaagaaccacacaagccccgacguggaccugggcgauaucagcggaaucaaugccagcgucgugaacauccagaaagagaucgaccggcugaacgagguggccaagaaucugaacgagagccugaucgaccugcaagaacuggggaaguacgagcaguacaucaaguggcccugguacaucuggcugggcuuuaucgccggacugauugccaucgugauggucacaaucaugcuguguugcaugaccagcugcuguagcugccugaagggcuguuguagcuguggcagcugcugcaaguucgacgaggacgauucugagcccgugcugaagggcgugaaacugcacuacaccugaggacuaguuauaagacugacuagcccgaugggccucccaacgggcccuccuccccuccuugcaccgagauuaauaaaaaaaaaaaaaaaaaaaaaaaaaaaaaaaaaaaaaaaaaaaaaaaaaaaaaaaaaaaaaaaaugcaucccccccccccccccccccccccccccccccaaaggcucuuuucagagccaccagaauu

SEQ ID NO: 14170 - RNA, 4333 nt, Artificial Sequence
  SARS-CoV-2/Wuhan/WIV05/2019__EPI_ISL_402128 spike protein mRNA gc mod (1-1211)(N914C_S1123C) LumSynth construct
aggagaaagcuuaccauguucguguuucuggugcugcugccccugguguccagccagugugugaaccugaccaccagaacacagcugccuccagccuacaccaacagcuucaccagaggcguguacuaccccgacaagguguucagauccagcgugcugcacucuacccaggaccuguuccugccuuucuucagcaacgugaccugguuccacgccauccacguguccggcaccaauggcaccaagagauucgacaaccccgugcugcccuucaacgacgggguguacuuugccagcaccgagaaguccaacaucaucagaggcuggaucuucggcaccacacuggacagcaagacccagagccugcugaucgugaacaacgccaccaacguggucaucaaagugugcgaguuccaguucugcaacgaccccuuccugggcgucuacuaccacaagaacaacaagagcuggauggaaagcgaguuccggguguacagcagcgccaacaacugcaccuucgaguacgugucccagccuuuccugauggaccuggaaggcaagcagggcaacuucaagaaccugcgcgaguucguguucaagaacaucgacggcuacuucaaaaucuacagcaagcacaccccuaucaaccucgugcgggaucugccucagggcuucucugcucuggaaccccugguggaucugcccaucggcaucaacaucacccgguuucagacacugcuggcccugcacagaagcuaccugacaccuggcgauagcagcagcggauggacagcuggugccgccgcuuacuaugugggcuaccugcagccuagaaccuuccugcugaaguacaacgagaacggcaccaucaccgacgccguggauugugcucuggauccucugagcgagacaaagugcacccugaaguccuucaccguggaaaagggcaucuaccagaccagcaacuuccgggugcagcccaccgaauccaucgugcgguuccccaauaucaccaaucugugccccuucggcgagguguucaaugccaccagauucgccucuguguacgccuggaaccggaagcggaucagcaauugcguggccgacuacuccgugcuguacaacuccgccagcuucagcaccuucaagugcuacggcguguccccuaccaagcugaacgaccugugcuucacaaacguguacgccgacagcuucgugauccggggagaugaagugcggcagauugccccuggacagacaggcaagaucgccgacuacaacuacaagcugcccgacgacuucaccggcugugugauugccuggaacagcaacaaccuggacuccaaagucggcggcaacuacaauuaccuguaccggcuguuccggaaguccaaucugaagcccuucgagcgggacaucagcaccgaaaucuaucaggccggcagcaccccuugcaacggcguggaaggcuucaacugcuacuucccacugcaguccuacggcuuucagcccacaaauggcgugggcuaucagcccuacagagugguggugcugagcuucgaacugcugcaugcuccugccacagugugcggcccuaagaaaagcaccaaucucgugaagaacaaaugcgugaacuucaacuucaacggccugaccggcaccggcgugcugacagagagcaacaagaaguuccugccauuccagcaguuuggccgggauaucgccgauaccacagacgccguuagagauccccagacacuggaaauccuggacaucaccccaugcagcuucggcggagugucugugaucaccccuggcaccaacaccagcaaucagguggcagugcuguaccaggacgugaacuguaccgaagugcccguggccauucacgccgaucagcugacaccuacauggcggguguacuccaccggcagcaauguguuucagaccagagccggcugucugaucggagccgagcacgugaacaauagcuacgagugcgacauccccaucggcgcuggcaucugugccagcuaccagacacagacaaacagccccagacgggcuagaagcguggccagccagagcaucauugccuacacaaugucucugggcgccgagaacagcguggccuacuccaacaacucuaucgcuauccccaccaacuucaccaucagcgugaccaccgagauccugccuguguccaugaccaagaccagcguggacugcaccauguacaucugcggcgauuccaccgagugcuccaaccugcugcugcaguacggcagcuucugcacccagcugaauagagcccugacagggaucgccguggaacaggacaagaacacccaagagguguucgcccaagugaagcaaaucuacaagaccccuccuaucaaggacuucggcggcuucaauuucagccagauucugcccgauccuagcaagcccagcaagcggagcuucaucgaggaccugcuguucaacaaagugacacuggccgacgccggcuucaucaagcaguauggcgauugucugggcgacauugccgccagggaucugauuugcgcccagaaguuuaacggacugacagugcugccuccucugcugaccgaugagaugaucgcccaguacacaucugcccugcuggccggcacaaucacaagcggcuggacauuuggagcuggcgccgcucugcagauccccuuugcuaugcagauggccuaccgguucaacggcaucggagugacccagugcgugcuguacgagaaccagaagcugaucgccaaccaguucaacagcgccaucggcaagauccaggacagccugagcagcacagcaagcgcccugggaaagcugcaggacguggucaaccagaaugcccaggcacugaacacccuggucaagcagcuguccuccaacuucggcgccaucagcucugugcugaacgauauccugagcagacuggacaaggucgaggccgaggugcagaucgacagacugaucacaggcagacugcagagccuccagacauacgugacccagcagcugaucagagccgccgagauuagagccucugccaaucuggccgccaccaagaugucugagugugugcugggccagagcaagagaguggacuuuugcggcaagggcuaccaccugaugagcuucccucagucugccccucacggcgugguguuucugcacgugacauaugugcccgcucaagagaagaauuucaccaccgcuccagccaucugccacgacggcaaagcccacuuuccuagagaaggcguguucguguccaacggcacccauugguucgugacacagcggaacuucuacgagccccagaucaucaccaccgacaacaccuucguguguggcaacugcgacguugugaucggcauugugaacaauaccguguacgacccucugcagcccgagcuggacagcuucaaagaggaacuggacaaguacuuuaagaaccacacaagccccgacguggaccugggcgauaucagcggaaucaaugccagcgucgugaacauccagaaagagaucgaccggcugaacgagguggccaagaaucugaacgagagccugaucgaccugcaagaacuggggaaguacgagcaguacaucaagggcggaggaucuggcggaggacagaucuacgagggcaagcugacagccgagggccugagauuuggaaucguggccagccgguucaaucacgcccugguggauagacugguggaaggcgccaucgaugccauugucagacacggcggcagagaagaggacaucacccucguuagagugcccggcucuugggagauuccuguggcugcuggcgagcuggcccggaaagaagauaucgacgccguuaucgccaucggcgugcugaucagaggcgccacaccucacuucgacuauaucgccagcgagguguccaaaggccuggccgaucugagccuggaacugagaaagcccaucaccuucggcgugaucaccgcugacacacuggaacaggccauugagagagccggcaccaagcacggcaacaaaggaugggaagccgcucuguccgccaucgagauggccaaccuguucaagagccugcggugaggacuaguuauaagacugacuagcccgaugggccucccaacgggcccuccuccccuccuugcaccgagauuaauaaaaaaaaaaaaaaaaaaaaaaaaaaaaaaaaaaaaaaaaaaaaaaaaaaaaaaaaaaaaaaaaugcaucccccccccccccccccccccccccccccccaaaggcucuuuucagagccaccagaauu

SEQ ID NO: 14171 - RNA, 4357 nt, Artificial Sequence
  SARS-CoV-2/Wuhan/WIV05/2019__EPI_ISL_402128 spike protein mRNA gc mod (1-1211)(N914C_S1123C) Ferritin construct
aggagaaagcuuaccauguucguguuucuggugcugcugccccugguguccagccagugugugaaccugaccaccagaacacagcugccuccagccuacaccaacagcuucaccagaggcguguacuaccccgacaagguguucagauccagcgugcugcacucuacccaggaccuguuccugccuuucuucagcaacgugaccugguuccacgccauccacguguccggcaccaauggcaccaagagauucgacaaccccgugcugcccuucaacgacgggguguacuuugccagcaccgagaaguccaacaucaucagaggcuggaucuucggcaccacacuggacagcaagacccagagccugcugaucgugaacaacgccaccaacguggucaucaaagugugcgaguuccaguucugcaacgaccccuuccugggcgucuacuaccacaagaacaacaagagcuggauggaaagcgaguuccggguguacagcagcgccaacaacugcaccuucgaguacgugucccagccuuuccugauggaccuggaaggcaagcagggcaacuucaagaaccugcgcgaguucguguucaagaacaucgacggcuacuucaaaaucuacagcaagcacaccccuaucaaccucgugcgggaucugccucagggcuucucugcucuggaaccccugguggaucugcccaucggcaucaacaucacccgguuucagacacugcuggcccugcacagaagcuaccugacaccuggcgauagcagcagcggauggacagcuggugccgccgcuuacuaugugggcuaccugcagccuagaaccuuccugcugaaguacaacgagaacggcaccaucaccgacgccguggauugugcucuggauccucugagcgagacaaagugcacccugaaguccuucaccguggaaaagggcaucuaccagaccagcaacuuccgggugcagcccaccgaauccaucgugcgguuccccaauaucaccaaucugugccccuucggcgagguguucaaugccaccagauucgccucuguguacgccuggaaccggaagcggaucagcaauugcguggccgacuacuccgugcuguacaacuccgccagcuucagcaccuucaagugcuacggcguguccccuaccaagcugaacgaccugugcuucacaaacguguacgccgacagcuucgugauccggggagaugaagugcggcagauugccccuggacagacaggcaagaucgccgacuacaacuacaagcugcccgacgacuucaccggcugugugauugccuggaacagcaacaaccuggacuccaaagucggcggcaacuacaauuaccuguaccggcuguuccggaaguccaaucugaagcccuucgagcgggacaucagcaccgaaaucuaucaggccggcagcaccccuugcaacggcguggaaggcuucaacugcuacuucccacugcaguccuacggcuuucagcccacaaauggcgugggcuaucagcccuacagagugguggugcugagcuucgaacugcugcaugcuccugccacagugugcggcccuaagaaaagcaccaaucucgugaagaacaaaugcgugaacuucaacuucaacggccugaccggcaccggcgugcugacagagagcaacaagaaguuccugccauuccagcaguuuggccgggauaucgccgauaccacagacgccguuagagauccccagacacuggaaauccuggacaucaccccaugcagcuucggcggagugucugugaucaccccuggcaccaacaccagcaaucagguggcagugcuguaccaggacgugaacuguaccgaagugcccguggccauucacgccgaucagcugacaccuacauggcggguguacuccaccggcagcaauguguuucagaccagagccggcugucugaucggagccgagcacgugaacaauagcuacgagugcgacauccccaucggcgcuggcaucugugccagcuaccagacacagacaaacagccccagacgggcuagaagcguggccagccagagcaucauugccuacacaaugucucugggcgccgagaacagcguggccuacuccaacaacucuaucgcuauccccaccaacuucaccaucagcgugaccaccgagauccugccuguguccaugaccaagaccagcguggacugcaccauguacaucugcggcgauuccaccgagugcuccaaccugcugcugcaguacggcagcuucugcacccagcugaauagagcccugacagggaucgccguggaacaggacaagaacacccaagagguguucgcccaagugaagcaaaucuacaagaccccuccuaucaaggacuucggcggcuucaauuucagccagauucugcccgauccuagcaagcccagcaagcggagcuucaucgaggaccugcuguucaacaaagugacacuggccgacgccggcuucaucaagcaguauggcgauugucugggcgacauugccgccagggaucugauuugcgcccagaaguuuaacggacugacagugcugccuccucugcugaccgaugagaugaucgcccaguacacaucugcccugcuggccggcacaaucacaagcggcuggacauuuggagcuggcgccgcucugcagauccccuuugcuaugcagauggccuaccgguucaacggcaucggagugacccagugcgugcuguacgagaaccagaagcugaucgccaaccaguucaacagcgccaucggcaagauccaggacagccugagcagcacagcaagcgcccugggaaagcugcaggacguggucaaccagaaugcccaggcacugaacacccuggucaagcagcuguccuccaacuucggcgccaucagcucugugcugaacgauauccugagcagacuggacaaggucgaggccgaggugcagaucgacagacugaucacaggcagacugcagagccuccagacauacgugacccagcagcugaucagagccgccgagauuagagccucugccaaucuggccgccaccaagaugucugagugugugcugggccagagcaagagaguggacuuuugcggcaagggcuaccaccugaugagcuucccucagucugccccucacggcgugguguuucugcacgugacauaugugcccgcucaagagaagaauuucaccaccgcuccagccaucugccacgacggcaaagcccacuuuccuagagaaggcguguucguguccaacggcacccauugguucgugacacagcggaacuucuacgagccccagaucaucaccaccgacaacaccuucguguguggcaacugcgacguugugaucggcauugugaacaauaccguguacgacccucugcagcccgagcuggacagcuucaaagaggaacuggacaaguacuuuaagaaccacacaagccccgacguggaccugggcgauaucagcggaaucaaugccagcgucgugaacauccagaaagagaucgaccggcugaacgagguggccaagaaucugaacgagagccugaucgaccugcaagaacuggggaaguacgagcaguacaucaagggaggcggaggaucugacaucaucaagcugcugaacgagcaagugaacaaagagaugcagagcagcaaccuguacaugagcaugagcagcuggugcuacacccacagccuugauggcgccggacuguuccuguuugaucacgccgccgaggaauacgagcacgccaagaagcugaucaucuuccugaacgagaacaacgugcccgugcagcugaccagcauuucugccccugagcacaaguucgagggccugacacagaucuuccagaaggccuacgaacacgagcagcacaucagcgagagcaucaacaacaucguggaccacgccauuaagagcaaggaucacgccaccuucaacuuucugcagugguacguggccgaacagcacgaggaagaggugcuguucaaggacauccuggacaagaucgagcugaucggcaacgagaaccacggccuguaucuggccgaccaguacgugaagggaaucgccaagagcagaaagagcugaggacuaguuauaagacugacuagcccgaugggccucccaacgggcccuccuccccuccuugcaccgagauuaauaaaaaaaaaaaaaaaaaaaaaaaaaaaaaaaaaaaaaaaaaaaaaaaaaaaaaaaaaaaaaaaaugcaucccccccccccccccccccccccccccccccaaaggcucuuuucagagccaccagaauu

SEQ ID NO: 14172 - RNA, 3943 nt, Artificial Sequence
  SARS-CoV-2/Wuhan/WIV05/2019__EPI_ISL_402128 spike protein mRNA gc mod (1-1211)(N914C_S1123C) Foldon construct
aggagaaagcuuaccauguucguguuucuggugcugcugccccugguguccagccagugugugaaccugaccaccagaacacagcugccuccagccuacaccaacagcuucaccagaggcguguacuaccccgacaagguguucagauccagcgugcugcacucuacccaggaccuguuccugccuuucuucagcaacgugaccugguuccacgccauccacguguccggcaccaauggcaccaagagauucgacaaccccgugcugcccuucaacgacgggguguacuuugccagcaccgagaaguccaacaucaucagaggcuggaucuucggcaccacacuggacagcaagacccagagccugcugaucgugaacaacgccaccaacguggucaucaaagugugcgaguuccaguucugcaacgaccccuuccugggcgucuacuaccacaagaacaacaagagcuggauggaaagcgaguuccggguguacagcagcgccaacaacugcaccuucgaguacgugucccagccuuuccugauggaccuggaaggcaagcagggcaacuucaagaaccugcgcgaguucguguucaagaacaucgacggcuacuucaaaaucuacagcaagcacaccccuaucaaccucgugcgggaucugccucagggcuucucugcucuggaaccccugguggaucugcccaucggcaucaacaucacccgguuucagacacugcuggcccugcacagaagcuaccugacaccuggcgauagcagcagcggauggacagcuggugccgccgcuuacuaugugggcuaccugcagccuagaaccuuccugcugaaguacaacgagaacggcaccaucaccgacgccguggauugugcucuggauccucugagcgagacaaagugcacccugaaguccuucaccguggaaaagggcaucuaccagaccagcaacuuccgggugcagcccaccgaauccaucgugcgguuccccaauaucaccaaucugugccccuucggcgagguguucaaugccaccagauucgccucuguguacgccuggaaccggaagcggaucagcaauugcguggccgacuacuccgugcuguacaacuccgccagcuucagcaccuucaagugcuacggcguguccccuaccaagcugaacgaccugugcuucacaaacguguacgccgacagcuucgugauccggggagaugaagugcggcagauugccccuggacagacaggcaagaucgccgacuacaacuacaagcugcccgacgacuucaccggcugugugauugccuggaacagcaacaaccuggacuccaaagucggcggcaacuacaauuaccuguaccggcuguuccggaaguccaaucugaagcccuucgagcgggacaucagcaccgaaaucuaucaggccggcagcaccccuugcaacggcguggaaggcuucaacugcuacuucccacugcaguccuacggcuuucagcccacaaauggcgugggcuaucagcccuacagagugguggugcugagcuucgaacugcugcaugcuccugccacagugugcggcccuaagaaaagcaccaaucucgugaagaacaaaugcgugaacuucaacuucaacggccugaccggcaccggcgugcugacagagagcaacaagaaguuccugccauuccagcaguuuggccgggauaucgccgauaccacagacgccguuagagauccccagacacuggaaauccuggacaucaccccaugcagcuucggcggagugucugugaucaccccuggcaccaacaccagcaaucagguggcagugcuguaccaggacgugaacuguaccgaagugcccguggccauucacgccgaucagcugacaccuacauggcggguguacuccaccggcagcaauguguuucagaccagagccggcugucugaucggagccgagcacgugaacaauagcuacgagugcgacauccccaucggcgcuggcaucugugccagcuaccagacacagacaaacagccccagacgggcuagaagcguggccagccagagcaucauugccuacacaaugucucugggcgccgagaacagcguggccuacuccaacaacucuaucgcuauccccaccaacuucaccaucagcgugaccaccgagauccugccuguguccaugaccaagaccagcguggacugcaccauguacaucugcggcgauuccaccgagugcuccaaccugcugcugcaguacggcagcuucugcacccagcugaauagagcccugacagggaucgccguggaacaggacaagaacacccaagagguguucgcccaagugaagcaaaucuacaagaccccuccuaucaaggacuucggcggcuucaauuucagccagauucugcccgauccuagcaagcccagcaagcggagcuucaucgaggaccugcuguucaacaaagugacacuggccgacgccggcuucaucaagcaguauggcgauugucugggcgacauugccgccagggaucugauuugcgcccagaaguuuaacggacugacagugcugccuccucugcugaccgaugagaugaucgcccaguacacaucugcccugcuggccggcacaaucacaagcggcuggacauuuggagcuggcgccgcucugcagauccccuuugcuaugcagauggccuaccgguucaacggcaucggagugacccagugcgugcuguacgagaaccagaagcugaucgccaaccaguucaacagcgccaucggcaagauccaggacagccugagcagcacagcaagcgcccugggaaagcugcaggacguggucaaccagaaugcccaggcacugaacacccuggucaagcagcuguccuccaacuucggcgccaucagcucugugcugaacgauauccugagcagacuggacaaggucgaggccgaggugcagaucgacagacugaucacaggcagacugcagagccuccagacauacgugacccagcagcugaucagagccgccgagauuagagccucugccaaucuggccgccaccaagaugucugagugugugcugggccagagcaagagaguggacuuuugcggcaagggcuaccaccugaugagcuucccucagucugccccucacggcgugguguuucugcacgugacauaugugcccgcucaagagaagaauuucaccaccgcuccagccaucugccacgacggcaaagcccacuuuccuagagaaggcguguucguguccaacggcacccauugguucgugacacagcggaacuucuacgagccccagaucaucaccaccgacaacaccuucguguguggcaacugcgacguugugaucggcauugugaacaauaccguguacgacccucugcagcccgagcuggacagcuucaaagaggaacuggacaaguacuuuaagaaccacacaagccccgacguggaccugggcgauaucagcggaaucaaugccagcgucgugaacauccagaaagagaucgaccggcugaacgagguggccaagaaucugaacgagagccugaucgaccugcaagaacuggggaaguacgagcaguacaucaagggaggaucuggcuauauccccgaggcuccuagagauggccaggccuauguucggaaggauggcgaaugggugcugcugagcaccuuccuuugaggacuaguuauaagacugacuagcccgaugggccucccaacgggcccuccuccccuccuugcaccgagauuaauaaaaaaaaaaaaaaaaaaaaaaaaaaaaaaaaaaaaaaaaaaaaaaaaaaaaaaaaaaaaaaaaugcaucccccccccccccccccccccccccccccccaaaggcucuuuucagagccaccagaauu

SEQ ID NO: 14173 - RNA, 4315 nt, Artificial Sequence
  SARS-CoV-2/Wuhan/WIV05/2019__EPI_ISL_402128 spike protein mRNA gc mod (1-1211)(N914C_S1123C) WhcAg construct
aggagaaagcuuaccauguucguguuucuggugcugcugccccugguguccagccagugugugaaccugaccaccagaacacagcugccuccagccuacaccaacagcuucaccagaggcguguacuaccccgacaagguguucagauccagcgugcugcacucuacccaggaccuguuccugccuuucuucagcaacgugaccugguuccacgccauccacguguccggcaccaauggcaccaagagauucgacaaccccgugcugcccuucaacgacgggguguacuuugccagcaccgagaaguccaacaucaucagaggcuggaucuucggcaccacacuggacagcaagacccagagccugcugaucgugaacaacgccaccaacguggucaucaaagugugcgaguuccaguucugcaacgaccccuuccugggcgucuacuaccacaagaacaacaagagcuggauggaaagcgaguuccggguguacagcagcgccaacaacugcaccuucgaguacgugucccagccuuuccugauggaccuggaaggcaagcagggcaacuucaagaaccugcgcgaguucguguucaagaacaucgacggcuacuucaaaaucuacagcaagcacaccccuaucaaccucgugcgggaucugccucagggcuucucugcucuggaaccccugguggaucugcccaucggcaucaacaucacccgguuucagacacugcuggcccugcacagaagcuaccugacaccuggcgauagcagcagcggauggacagcuggugccgccgcuuacuaugugggcuaccugcagccuagaaccuuccugcugaaguacaacgagaacggcaccaucaccgacgccguggauugugcucuggauccucugagcgagacaaagugcacccugaaguccuucaccguggaaaagggcaucuaccagaccagcaacuuccgggugcagcccaccgaauccaucgugcgguuccccaauaucaccaaucugugccccuucggcgagguguucaaugccaccagauucgccucuguguacgccuggaaccggaagcggaucagcaauugcguggccgacuacuccgugcuguacaacuccgccagcuucagcaccuucaagugcuacggcguguccccuaccaagcugaacgaccugugcuucacaaacguguacgccgacagcuucgugauccggggagaugaagugcggcagauugccccuggacagacaggcaagaucgccgacuacaacuacaagcugcccgacgacuucaccggcugugugauugccuggaacagcaacaaccuggacuccaaagucggcggcaacuacaauuaccuguaccggcuguuccggaaguccaaucugaagcccuucgagcgggacaucagcaccgaaaucuaucaggccggcagcaccccuugcaacggcguggaaggcuucaacugcuacuucccacugcaguccuacggcuuucagcccacaaauggcgugggcuaucagcccuacagagugguggugcugagcuucgaacugcugcaugcuccugccacagugugcggcccuaagaaaagcaccaaucucgugaagaacaaaugcgugaacuucaacuucaacggccugaccggcaccggcgugcugacagagagcaacaagaaguuccugccauuccagcaguuuggccgggauaucgccgauaccacagacgccguuagagauccccagacacuggaaauccuggacaucaccccaugcagcuucggcggagugucugugaucaccccuggcaccaacaccagcaaucagguggcagugcuguaccaggacgugaacuguaccgaagugcccguggccauucacgccgaucagcugacaccuacauggcggguguacuccaccggcagcaauguguuucagaccagagccggcugucugaucggagccgagcacgugaacaauagcuacgagugcgacauccccaucggcgcuggcaucugugccagcuaccagacacagacaaacagccccagacgggcuagaagcguggccagccagagcaucauugccuacacaaugucucugggcgccgagaacagcguggccuacuccaacaacucuaucgcuauccccaccaacuucaccaucagcgugaccaccgagauccugccuguguccaugaccaagaccagcguggacugcaccauguacaucugcggcgauuccaccgagugcuccaaccugcugcugcaguacggcagcuucugcacccagcugaauagagcccugacagggaucgccguggaacaggacaagaacacccaagagguguucgcccaagugaagcaaaucuacaagaccccuccuaucaaggacuucggcggcuucaauuucagccagauucugcccgauccuagcaagcccagcaagcggagcuucaucgaggaccugcuguucaacaaagugacacuggccgacgccggcuucaucaagcaguauggcgauugucugggcgacauugccgccagggaucugauuugcgcccagaaguuuaacggacugacagugcugccuccucugcugaccgaugagaugaucgcccaguacacaucugcccugcuggccggcacaaucacaagcggcuggacauuuggagcuggcgccgcucugcagauccccuuugcuaugcagauggccuaccgguucaacggcaucggagugacccagugcgugcuguacgagaaccagaagcugaucgccaaccaguucaacagcgccaucggcaagauccaggacagccugagcagcacagcaagcgcccugggaaagcugcaggacguggucaaccagaaugcccaggcacugaacacccuggucaagcagcuguccuccaacuucggcgccaucagcucugugcugaacgauauccugagcagacuggacaaggucgaggccgaggugcagaucgacagacugaucacaggcagacugcagagccuccagacauacgugacccagcagcugaucagagccgccgagauuagagccucugccaaucuggccgccaccaagaugucugagugugugcugggccagagcaagagaguggacuuuugcggcaagggcuaccaccugaugagcuucccucagucugccccucacggcgugguguuucugcacgugacauaugugcccgcucaagagaagaauuucaccaccgcuccagccaucugccacgacggcaaagcccacuuuccuagagaaggcguguucguguccaacggcacccauugguucgugacacagcggaacuucuacgagccccagaucaucaccaccgacaacaccuucguguguggcaacugcgacguugugaucggcauugugaacaauaccguguacgacccucugcagcccgagcuggacagcuucaaagaggaacuggacaaguacuuuaagaaccacacaagccccgacguggaccugggcgauaucagcggaaucaaugccagcgucgugaacauccagaaagagaucgaccggcugaacgagguggccaagaaucugaacgagagccugaucgaccugcaagaacuggggaaguacgagcaguacaucaagggaggcggaggaucugacaucgaccccuacaaagaguucggcagcagcuaccagcugcugaacuuccugccucuggacuucuuccccgaccugaacgcccugguggauacagccacagcucuguacgaggaagaacugaccggcagagagcacugcagcccucaccacacagccauuagacaggcccucgugugcugggacgagcugacaaaacugaucgccuggaugagcagcaacaucaccagcgagcaagugcggaccaucaucgugaaccacgugaacgauaccuggggccugaaagugcggcagagccugugguuucaccugagcugucugaccuucggccagcacaccgugcaagaguuucugguguccuucggcguguggaucagaaccccugcuccauacagaccuccaaacgcucccauccugagcacccugccugagcacacagugaucuguugaggacuaguuauaagacugacuagcccgaugggccucccaacgggcccuccuccccuccuugcaccgagauuaauaaaaaaaaaaaaaaaaaaaaaaaaaaaaaaaaaaaaaaaaaaaaaaaaaaaaaaaaaaaaaaaaugcaucccccccccccccccccccccccccccccccaaaggcucuuuucagagccaccagaauu

SEQ ID NO: 14174 - RNA, 4141 nt, Artificial Sequence
  SARS-CoV-2/Wuhan/WIV05/2019__EPI_ISL_402128 spike protein mRNA gc mod (1-1147)(N914C_S1123C) LumSynth construct
aggagaaagcuuaccauguucguguuucuggugcugcugccccugguguccagccagugugugaaccugaccaccagaacacagcugccuccagccuacaccaacagcuucaccagaggcguguacuaccccgacaagguguucagauccagcgugcugcacucuacccaggaccuguuccugccuuucuucagcaacgugaccugguuccacgccauccacguguccggcaccaauggcaccaagagauucgacaaccccgugcugcccuucaacgacgggguguacuuugccagcaccgagaaguccaacaucaucagaggcuggaucuucggcaccacacuggacagcaagacccagagccugcugaucgugaacaacgccaccaacguggucaucaaagugugcgaguuccaguucugcaacgaccccuuccugggcgucuacuaccacaagaacaacaagagcuggauggaaagcgaguuccggguguacagcagcgccaacaacugcaccuucgaguacgugucccagccuuuccugauggaccuggaaggcaagcagggcaacuucaagaaccugcgcgaguucguguucaagaacaucgacggcuacuucaaaaucuacagcaagcacaccccuaucaaccucgugcgggaucugccucagggcuucucugcucuggaaccccugguggaucugcccaucggcaucaacaucacccgguuucagacacugcuggcccugcacagaagcuaccugacaccuggcgauagcagcagcggauggacagcuggugccgccgcuuacuaugugggcuaccugcagccuagaaccuuccugcugaaguacaacgagaacggcaccaucaccgacgccguggauugugcucuggauccucugagcgagacaaagugcacccugaaguccuucaccguggaaaagggcaucuaccagaccagcaacuuccgggugcagcccaccgaauccaucgugcgguuccccaauaucaccaaucugugccccuucggcgagguguucaaugccaccagauucgccucuguguacgccuggaaccggaagcggaucagcaauugcguggccgacuacuccgugcuguacaacuccgccagcuucagcaccuucaagugcuacggcguguccccuaccaagcugaacgaccugugcuucacaaacguguacgccgacagcuucgugauccggggagaugaagugcggcagauugccccuggacagacaggcaagaucgccgacuacaacuacaagcugcccgacgacuucaccggcugugugauugccuggaacagcaacaaccuggacuccaaagucggcggcaacuacaauuaccuguaccggcuguuccggaaguccaaucugaagcccuucgagcgggacaucagcaccgaaaucuaucaggccggcagcaccccuugcaacggcguggaaggcuucaacugcuacuucccacugcaguccuacggcuuucagcccacaaauggcgugggcuaucagcccuacagagugguggugcugagcuucgaacugcugcaugcuccugccacagugugcggcccuaagaaaagcaccaaucucgugaagaacaaaugcgugaacuucaacuucaacggccugaccggcaccggcgugcugacagagagcaacaagaaguuccugccauuccagcaguuuggccgggauaucgccgauaccacagacgccguuagagauccccagacacuggaaauccuggacaucaccccaugcagcuucggcggagugucugugaucaccccuggcaccaacaccagcaaucagguggcagugcuguaccaggacgugaacuguaccgaagugcccguggccauucacgccgaucagcugacaccuacauggcggguguacuccaccggcagcaauguguuucagaccagagccggcugucugaucggagccgagcacgugaacaauagcuacgagugcgacauccccaucggcgcuggcaucugugccagcuaccagacacagacaaacagccccagacgggcuagaagcguggccagccagagcaucauugccuacacaaugucucugggcgccgagaacagcguggccuacuccaacaacucuaucgcuauccccaccaacuucaccaucagcgugaccaccgagauccugccuguguccaugaccaagaccagcguggacugcaccauguacaucugcggcgauuccaccgagugcuccaaccugcugcugcaguacggcagcuucugcacccagcugaauagagcccugacagggaucgccguggaacaggacaagaacacccaagagguguucgcccaagugaagcaaaucuacaagaccccuccuaucaaggacuucggcggcuucaauuucagccagauucugcccgauccuagcaagcccagcaagcggagcuucaucgaggaccugcuguucaacaaagugacacuggccgacgccggcuucaucaagcaguauggcgauugucugggcgacauugccgccagggaucugauuugcgcccagaaguuuaacggacugacagugcugccuccucugcugaccgaugagaugaucgcccaguacacaucugcccugcuggccggcacaaucacaagcggcuggacauuuggagcuggcgccgcucugcagauccccuuugcuaugcagauggccuaccgguucaacggcaucggagugacccagugcgugcuguacgagaaccagaagcugaucgccaaccaguucaacagcgccaucggcaagauccaggacagccugagcagcacagcaagcgcccugggaaagcugcaggacguggucaaccagaaugcccaggcacugaacacccuggucaagcagcuguccuccaacuucggcgccaucagcucugugcugaacgauauccugagcagacuggacaaggucgaggccgaggugcagaucgacagacugaucacaggcagacugcagagccuccagacauacgugacccagcagcugaucagagccgccgagauuagagccucugccaaucuggccgccaccaagaugucugagugugugcugggccagagcaagagaguggacuuuugcggcaagggcuaccaccugaugagcuucccucagucugccccucacggcgugguguuucugcacgugacauaugugcccgcucaagagaagaauuucaccaccgcuccagccaucugccacgacggcaaagcccacuuuccuagagaaggcguguucguguccaacggcacccauugguucgugacacagcggaacuucuacgagccccagaucaucaccaccgacaacaccuucguguguggcaacugcgacguugugaucggcauugugaacaauaccguguacgacccucugcagcccgagcuggacagcggcggaggaucuggcggaggacagaucuacgagggcaagcugacagccgagggccugagauuuggaaucguggccagccgguucaaucacgcccugguggauagacugguggaaggcgccaucgaugccauugucagacacggcggcagagaagaggacaucacccucguuagagugcccggcucuugggagauuccuguggcugcuggcgagcuggcccggaaagaagauaucgacgccguuaucgccaucggcgugcugaucagaggcgccacaccucacuucgacuauaucgccagcgagguguccaaaggccuggccgaucugagccuggaacugagaaagcccaucaccuucggcgugaucaccgcugacacacuggaacaggccauugagagagccggcaccaagcacggcaacaaaggaugggaagccgcucuguccgccaucgagauggccaaccuguucaagagccugcggugaggacuaguuauaagacugacuagcccgaugggccucccaacgggcccuccuccccuccuugcaccgagauuaauaaaaaaaaaaaaaaaaaaaaaaaaaaaaaaaaaaaaaaaaaaaaaaaaaaaaaaaaaaaaaaaaugcaucccccccccccccccccccccccccccccccaaaggcucuuuucagagccaccagaauu

SEQ ID NO: 14175 - RNA, 4165 nt, Artificial Sequence
  SARS-CoV-2/Wuhan/WIV05/2019__EPI_ISL_402128 spike protein mRNA gc mod (1-1147)(N914C_S1123C) Ferritin construct
aggagaaagcuuaccauguucguguuucuggugcugcugccccugguguccagccagugugugaaccugaccaccagaacacagcugccuccagccuacaccaacagcuucaccagaggcguguacuaccccgacaagguguucagauccagcgugcugcacucuacccaggaccuguuccugccuuucuucagcaacgugaccugguuccacgccauccacguguccggcaccaauggcaccaagagauucgacaaccccgugcugcccuucaacgacgggguguacuuugccagcaccgagaaguccaacaucaucagaggcuggaucuucggcaccacacuggacagcaagacccagagccugcugaucgugaacaacgccaccaacguggucaucaaagugugcgaguuccaguucugcaacgaccccuuccugggcgucuacuaccacaagaacaacaagagcuggauggaaagcgaguuccggguguacagcagcgccaacaacugcaccuucgaguacgugucccagccuuuccugauggaccuggaaggcaagcagggcaacuucaagaaccugcgcgaguucguguucaagaacaucgacggcuacuucaaaaucuacagcaagcacaccccuaucaaccucgugcgggaucugccucagggcuucucugcucuggaaccccugguggaucugcccaucggcaucaacaucacccgguuucagacacugcuggcccugcacagaagcuaccugacaccuggcgauagcagcagcggauggacagcuggugccgccgcuuacuaugugggcuaccugcagccuagaaccuuccugcugaaguacaacgagaacggcaccaucaccgacgccguggauugugcucuggauccucugagcgagacaaagugcacccugaaguccuucaccguggaaaagggcaucuaccagaccagcaacuuccgggugcagcccaccgaauccaucgugcgguuccccaauaucaccaaucugugccccuucggcgagguguucaaugccaccagauucgccucuguguacgccuggaaccggaagcggaucagcaauugcguggccgacuacuccgugcuguacaacuccgccagcuucagcaccuucaagugcuacggcguguccccuaccaagcugaacgaccugugcuucacaaacguguacgccgacagcuucgugauccggggagaugaagugcggcagauugccccuggacagacaggcaagaucgccgacuacaacuacaagcugcccgacgacuucaccggcugugugauugccuggaacagcaacaaccuggacuccaaagucggcggcaacuacaauuaccuguaccggcuguuccggaaguccaaucugaagcccuucgagcgggacaucagcaccgaaaucuaucaggccggcagcaccccuugcaacggcguggaaggcuucaacugcuacuucccacugcaguccuacggcuuucagcccacaaauggcgugggcuaucagcccuacagagugguggugcugagcuucgaacugcugcaugcuccugccacagugugcggcccuaagaaaagcaccaaucucgugaagaacaaaugcgugaacuucaacuucaacggccugaccggcaccggcgugcugacagagagcaacaagaaguuccugccauuccagcaguuuggccgggauaucgccgauaccacagacgccguuagagauccccagacacuggaaauccuggacaucaccccaugcagcuucggcggagugucugugaucaccccuggcaccaacaccagcaaucagguggcagugcuguaccaggacgugaacuguaccgaagugcccguggccauucacgccgaucagcugacaccuacauggcggguguacuccaccggcagcaauguguuucagaccagagccggcugucugaucggagccgagcacgugaacaauagcuacgagugcgacauccccaucggcgcuggcaucugugccagcuaccagacacagacaaacagccccagacgggcuagaagcguggccagccagagcaucauugccuacacaaugucucugggcgccgagaacagcguggccuacuccaacaacucuaucgcuauccccaccaacuucaccaucagcgugaccaccgagauccugccuguguccaugaccaagaccagcguggacugcaccauguacaucugcggcgauuccaccgagugcuccaaccugcugcugcaguacggcagcuucugcacccagcugaauagagcccugacagggaucgccguggaacaggacaagaacacccaagagguguucgcccaagugaagcaaaucuacaagaccccuccuaucaaggacuucggcggcuucaauuucagccagauucugcccgauccuagcaagcccagcaagcggagcuucaucgaggaccugcuguucaacaaagugacacuggccgacgccggcuucaucaagcaguauggcgauugucugggcgacauugccgccagggaucugauuugcgcccagaaguuuaacggacugacagugcugccuccucugcugaccgaugagaugaucgcccaguacacaucugcccugcuggccggcacaaucacaagcggcuggacauuuggagcuggcgccgcucugcagauccccuuugcuaugcagauggccuaccgguucaacggcaucggagugacccagugcgugcuguacgagaaccagaagcugaucgccaaccaguucaacagcgccaucggcaagauccaggacagccugagcagcacagcaagcgcccugggaaagcugcaggacguggucaaccagaaugcccaggcacugaacacccuggucaagcagcuguccuccaacuucggcgccaucagcucugugcugaacgauauccugagcagacuggacaaggucgaggccgaggugcagaucgacagacugaucacaggcagacugcagagccuccagacauacgugacccagcagcugaucagagccgccgagauuagagccucugccaaucuggccgccaccaagaugucugagugugugcugggccagagcaagagaguggacuuuugcggcaagggcuaccaccugaugagcuucccucagucugccccucacggcgugguguuucugcacgugacauaugugcccgcucaagagaagaauuucaccaccgcuccagccaucugccacgacggcaaagcccacuuuccuagagaaggcguguucguguccaacggcacccauugguucgugacacagcggaacuucuacgagccccagaucaucaccaccgacaacaccuucguguguggcaacugcgacguugugaucggcauugugaacaauaccguguacgacccucugcagcccgagcuggacagcggaggcggaggaucugacaucaucaagcugcugaacgagcaagugaacaaagagaugcagagcagcaaccuguacaugagcaugagcagcuggugcuacacccacagccuugauggcgccggacuguuccuguuugaucacgccgccgaggaauacgagcacgccaagaagcugaucaucuuccugaacgagaacaacgugcccgugcagcugaccagcauuucugccccugagcacaaguucgagggccugacacagaucuuccagaaggccuacgaacacgagcagcacaucagcgagagcaucaacaacaucguggaccacgccauuaagagcaaggaucacgccaccuucaacuuucugcagugguacguggccgaacagcacgaggaagaggugcuguucaaggacauccuggacaagaucgagcugaucggcaacgagaaccacggccuguaucuggccgaccaguacgugaagggaaucgccaagagcagaaagagcugaggacuaguuauaagacugacuagcccgaugggccucccaacgggcccuccuccccuccuugcaccgagauuaauaaaaaaaaaaaaaaaaaaaaaaaaaaaaaaaaaaaaaaaaaaaaaaaaaaaaaaaaaaaaaaaaugcaucccccccccccccccccccccccccccccccaaaggcucuuuucagagccaccagaauu

SEQ ID NO: 14176 - RNA, 3751 nt, Artificial Sequence
  SARS-CoV-2/Wuhan/WIV05/2019__EPI_ISL_402128 spike protein mRNA gc mod (1-1147)(N914C_S1123C) Foldon construct
aggagaaagcuuaccauguucguguuucuggugcugcugccccugguguccagccagugugugaaccugaccaccagaacacagcugccuccagccuacaccaacagcuucaccagaggcguguacuaccccgacaagguguucagauccagcgugcugcacucuacccaggaccuguuccugccuuucuucagcaacgugaccugguuccacgccauccacguguccggcaccaauggcaccaagagauucgacaaccccgugcugcccuucaacgacgggguguacuuugccagcaccgagaaguccaacaucaucagaggcuggaucuucggcaccacacuggacagcaagacccagagccugcugaucgugaacaacgccaccaacguggucaucaaagugugcgaguuccaguucugcaacgaccccuuccugggcgucuacuaccacaagaacaacaagagcuggauggaaagcgaguuccggguguacagcagcgccaacaacugcaccuucgaguacgugucccagccuuuccugauggaccuggaaggcaagcagggcaacuucaagaaccugcgcgaguucguguucaagaacaucgacggcuacuucaaaaucuacagcaagcacaccccuaucaaccucgugcgggaucugccucagggcuucucugcucuggaaccccugguggaucugcccaucggcaucaacaucacccgguuucagacacugcuggcccugcacagaagcuaccugacaccuggcgauagcagcagcggauggacagcuggugccgccgcuuacuaugugggcuaccugcagccuagaaccuuccugcugaaguacaacgagaacggcaccaucaccgacgccguggauugugcucuggauccucugagcgagacaaagugcacccugaaguccuucaccguggaaaagggcaucuaccagaccagcaacuuccgggugcagcccaccgaauccaucgugcgguuccccaauaucaccaaucugugccccuucggcgagguguucaaugccaccagauucgccucuguguacgccuggaaccggaagcggaucagcaauugcguggccgacuacuccgugcuguacaacuccgccagcuucagcaccuucaagugcuacggcguguccccuaccaagcugaacgaccugugcuucacaaacguguacgccgacagcuucgugauccggggagaugaagugcggcagauugccccuggacagacaggcaagaucgccgacuacaacuacaagcugcccgacgacuucaccggcugugugauugccuggaacagcaacaaccuggacuccaaagucggcggcaacuacaauuaccuguaccggcuguuccggaaguccaaucugaagcccuucgagcgggacaucagcaccgaaaucuaucaggccggcagcaccccuugcaacggcguggaaggcuucaacugcuacuucccacugcaguccuacggcuuucagcccacaaauggcgugggcuaucagcccuacagagugguggugcugagcuucgaacugcugcaugcuccugccacagugugcggcccuaagaaaagcaccaaucucgugaagaacaaaugcgugaacuucaacuucaacggccugaccggcaccggcgugcugacagagagcaacaagaaguuccugccauuccagcaguuuggccgggauaucgccgauaccacagacgccguuagagauccccagacacuggaaauccuggacaucaccccaugcagcuucggcggagugucugugaucaccccuggcaccaacaccagcaaucagguggcagugcuguaccaggacgugaacuguaccgaagugcccguggccauucacgccgaucagcugacaccuacauggcggguguacuccaccggcagcaauguguuucagaccagagccggcugucugaucggagccgagcacgugaacaauagcuacgagugcgacauccccaucggcgcuggcaucugugccagcuaccagacacagacaaacagccccagacgggcuagaagcguggccagccagagcaucauugccuacacaaugucucugggcgccgagaacagcguggccuacuccaacaacucuaucgcuauccccaccaacuucaccaucagcgugaccaccgagauccugccuguguccaugaccaagaccagcguggacugcaccauguacaucugcggcgauuccaccgagugcuccaaccugcugcugcaguacggcagcuucugcacccagcugaauagagcccugacagggaucgccguggaacaggacaagaacacccaagagguguucgcccaagugaagcaaaucuacaagaccccuccuaucaaggacuucggcggcuucaauuucagccagauucugcccgauccuagcaagcccagcaagcggagcuucaucgaggaccugcuguucaacaaagugacacuggccgacgccggcuucaucaagcaguauggcgauugucugggcgacauugccgccagggaucugauuugcgcccagaaguuuaacggacugacagugcugccuccucugcugaccgaugagaugaucgcccaguacacaucugcccugcuggccggcacaaucacaagcggcuggacauuuggagcuggcgccgcucugcagauccccuuugcuaugcagauggccuaccgguucaacggcaucggagugacccagugcgugcuguacgagaaccagaagcugaucgccaaccaguucaacagcgccaucggcaagauccaggacagccugagcagcacagcaagcgcccugggaaagcugcaggacguggucaaccagaaugcccaggcacugaacacccuggucaagcagcuguccuccaacuucggcgccaucagcucugugcugaacgauauccugagcagacuggacaaggucgaggccgaggugcagaucgacagacugaucacaggcagacugcagagccuccagacauacgugacccagcagcugaucagagccgccgagauuagagccucugccaaucuggccgccaccaagaugucugagugugugcugggccagagcaagagaguggacuuuugcggcaagggcuaccaccugaugagcuucccucagucugccccucacggcgugguguuucugcacgugacauaugugcccgcucaagagaagaauuucaccaccgcuccagccaucugccacgacggcaaagcccacuuuccuagagaaggcguguucguguccaacggcacccauugguucgugacacagcggaacuucuacgagccccagaucaucaccaccgacaacaccuucguguguggcaacugcgacguugugaucggcauugugaacaauaccguguacgacccucugcagcccgagcuggacagcggaggaucuggcuauauccccgaggcuccuagagauggccaggccuauguucggaaggauggcgaaugggugcugcugagcaccuuccuuugaggacuaguuauaagacugacuagcccgaugggccucccaacgggcccuccuccccuccuugcaccgagauuaauaaaaaaaaaaaaaaaaaaaaaaaaaaaaaaaaaaaaaaaaaaaaaaaaaaaaaaaaaaaaaaaaugcaucccccccccccccccccccccccccccccccaaaggcucuuuucagagccaccagaauu

SEQ ID NO: 14177 - RNA, 4123 nt, Artificial Sequence
  SARS-CoV-2/Wuhan/WIV05/2019__EPI_ISL_402128 spike protein mRNA gc mod (1-1147)(N914C_S1123C) WhcAg construct
aggagaaagcuuaccauguucguguuucuggugcugcugccccugguguccagccagugugugaaccugaccaccagaacacagcugccuccagccuacaccaacagcuucaccagaggcguguacuaccccgacaagguguucagauccagcgugcugcacucuacccaggaccuguuccugccuuucuucagcaacgugaccugguuccacgccauccacguguccggcaccaauggcaccaagagauucgacaaccccgugcugcccuucaacgacgggguguacuuugccagcaccgagaaguccaacaucaucagaggcuggaucuucggcaccacacuggacagcaagacccagagccugcugaucgugaacaacgccaccaacguggucaucaaagugugcgaguuccaguucugcaacgaccccuuccugggcgucuacuaccacaagaacaacaagagcuggauggaaagcgaguuccggguguacagcagcgccaacaacugcaccuucgaguacgugucccagccuuuccugauggaccuggaaggcaagcagggcaacuucaagaaccugcgcgaguucguguucaagaacaucgacggcuacuucaaaaucuacagcaagcacaccccuaucaaccucgugcgggaucugccucagggcuucucugcucuggaaccccugguggaucugcccaucggcaucaacaucacccgguuucagacacugcuggcccugcacagaagcuaccugacaccuggcgauagcagcagcggauggacagcuggugccgccgcuuacuaugugggcuaccugcagccuagaaccuuccugcugaaguacaacgagaacggcaccaucaccgacgccguggauugugcucuggauccucugagcgagacaaagugcacccugaaguccuucaccguggaaaagggcaucuaccagaccagcaacuuccgggugcagcccaccgaauccaucgugcgguuccccaauaucaccaaucugugccccuucggcgagguguucaaugccaccagauucgccucuguguacgccuggaaccggaagcggaucagcaauugcguggccgacuacuccgugcuguacaacuccgccagcuucagcaccuucaagugcuacggcguguccccuaccaagcugaacgaccugugcuucacaaacguguacgccgacagcuucgugauccggggagaugaagugcggcagauugccccuggacagacaggcaagaucgccgacuacaacuacaagcugcccgacgacuucaccggcugugugauugccuggaacagcaacaaccuggacuccaaagucggcggcaacuacaauuaccuguaccggcuguuccggaaguccaaucugaagcccuucgagcgggacaucagcaccgaaaucuaucaggccggcagcaccccuugcaacggcguggaaggcuucaacugcuacuucccacugcaguccuacggcuuucagcccacaaauggcgugggcuaucagcccuacagagugguggugcugagcuucgaacugcugcaugcuccugccacagugugcggcccuaagaaaagcaccaaucucgugaagaacaaaugcgugaacuucaacuucaacggccugaccggcaccggcgugcugacagagagcaacaagaaguuccugccauuccagcaguuuggccgggauaucgccgauaccacagacgccguuagagauccccagacacuggaaauccuggacaucaccccaugcagcuucggcggagugucugugaucaccccuggcaccaacaccagcaaucagguggcagugcuguaccaggacgugaacuguaccgaagugcccguggccauucacgccgaucagcugacaccuacauggcggguguacuccaccggcagcaauguguuucagaccagagccggcugucugaucggagccgagcacgugaacaauagcuacgagugcgacauccccaucggcgcuggcaucugugccagcuaccagacacagacaaacagccccagacgggcuagaagcguggccagccagagcaucauugccuacacaaugucucugggcgccgagaacagcguggccuacuccaacaacucuaucgcuauccccaccaacuucaccaucagcgugaccaccgagauccugccuguguccaugaccaagaccagcguggacugcaccauguacaucugcggcgauuccaccgagugcuccaaccugcugcugcaguacggcagcuucugcacccagcugaauagagcccugacagggaucgccguggaacaggacaagaacacccaagagguguucgcccaagugaagcaaaucuacaagaccccuccuaucaaggacuucggcggcuucaauuucagccagauucugcccgauccuagcaagcccagcaagcggagcuucaucgaggaccugcuguucaacaaagugacacuggccgacgccggcuucaucaagcaguauggcgauugucugggcgacauugccgccagggaucugauuugcgcccagaaguuuaacggacugacagugcugccuccucugcugaccgaugagaugaucgcccaguacacaucugcccugcuggccggcacaaucacaagcggcuggacauuuggagcuggcgccgcucugcagauccccuuugcuaugcagauggccuaccgguucaacggcaucggagugacccagugcgugcuguacgagaaccagaagcugaucgccaaccaguucaacagcgccaucggcaagauccaggacagccugagcagcacagcaagcgcccugggaaagcugcaggacguggucaaccagaaugcccaggcacugaacacccuggucaagcagcuguccuccaacuucggcgccaucagcucugugcugaacgauauccugagcagacuggacaaggucgaggccgaggugcagaucgacagacugaucacaggcagacugcagagccuccagacauacgugacccagcagcugaucagagccgccgagauuagagccucugccaaucuggccgccaccaagaugucugagugugugcugggccagagcaagagaguggacuuuugcggcaagggcuaccaccugaugagcuucccucagucugccccucacggcgugguguuucugcacgugacauaugugcccgcucaagagaagaauuucaccaccgcuccagccaucugccacgacggcaaagcccacuuuccuagagaaggcguguucguguccaacggcacccauugguucgugacacagcggaacuucuacgagccccagaucaucaccaccgacaacaccuucguguguggcaacugcgacguugugaucggcauugugaacaauaccguguacgacccucugcagcccgagcuggacagcggaggcggaggaucugacaucgaccccuacaaagaguucggcagcagcuaccagcugcugaacuuccugccucuggacuucuuccccgaccugaacgcccugguggauacagccacagcucuguacgaggaagaacugaccggcagagagcacugcagcccucaccacacagccauuagacaggcccucgugugcugggacgagcugacaaaacugaucgccuggaugagcagcaacaucaccagcgagcaagugcggaccaucaucgugaaccacgugaacgauaccuggggccugaaagugcggcagagccugugguuucaccugagcugucugaccuucggccagcacaccgugcaagaguuucugguguccuucggcguguggaucagaaccccugcuccauacagaccuccaaacgcucccauccugagcacccugccugagcacacagugaucuguugaggacuaguuauaagacugacuagcccgaugggccucccaacgggcccuccuccccuccuugcaccgagauuaauaaaaaaaaaaaaaaaaaaaaaaaaaaaaaaaaaaaaaaaaaaaaaaaaaaaaaaaaaaaaaaaaugcaucccccccccccccccccccccccccccccccaaaggcucuuuucagagccaccagaauu

SEQ ID NO: 14178 - protein, 566 aa, Artificial Sequence
  FLUAV/H1N1/A/California/7/2009__ACP41953 hemagglutinin (HA)
MKAILVVLLYTFATANADTLCIGYHANNSTDTVDTVLEKNVTVTHSVNLLEDKHNGKLCKLRGVAPLHLGKCNIAGWILGNPECESLSTASSWSYIVETPSSDNGTCYPGDFIDYEELREQLSSVSSFERFEIFPKTSSWPNHDSNKGVTAACPHAGAKSFYKNLIWLVKKGNSYPKLSKSYINDKGKEVLVLWGIHHPSTSADQQSLYQNADAYVFVGSSRYSKKFKPEIAIRPKVRDQEGRMNYYWTLVEPGDKITFEATGNLVVPRYAFAMERNAGSGIIISDTPVHDCNTTCQTPKGAINTSLPFQNIHPITIGKCPKYVKSTKLRLATGLRNIPSIQSRGLFGAIAGFIEGGWTGMVDGWYGYHHQNEQGSGYAADLKSTQNAIDEITNKVNSVIEKMNTQFTAVGKEFNHLEKRIENLNKKVDDGFLDIWTYNAELLVLLENERTLDYHDSNVKNLYEKVRSQLKNNAKEIGNGCFEFYHKCDNTCMESVKNGTYDYPKYSEEAKLNREEIDGVKLESTRIYQILAIYSTVASSLVLVVSLGAISFWMCSNGSLQCRICI

SEQ ID NO: 14179 - protein, 566 aa, Artificial Sequence
  FLUAV/H1N1/A/Michigan/45/2015__EPI662594 hemagglutinin (HA)
MKAILVVLLYTFTTANADTLCIGYHANNSTDTVDTVLEKNVTVTHSVNLLEDKHNGKLCKLRGVAPLHLGKCNIAGWILGNPECESLSTASSWSYIVETSNSDNGTCYPGDFINYEELREQLSSVSSFERFEIFPKTSSWPNHDSNKGVTAACPHAGAKSFYKNLIWLVKKGNSYPKLNQSYINDKGKEVLVLWGIHHPSTTADQQSLYQNADAYVFVGTSRYSKKFKPEIATRPKVRDQEGRMNYYWTLVEPGDKITFEATGNLVVPRYAFTMERNAGSGIIISDTPVHDCNTTCQTPEGAINTSLPFQNIHPITIGKCPKYVKSTKLRLATGLRNVPSIQSRGLFGAIAGFIEGGWTGMVDGWYGYHHQNEQGSGYAADLKSTQNAIDKITNKVNSVIEKMNTQFTAVGKEFNHLEKRIENLNKKVDDGFLDIWTYNAELLVLLENERTLDYHDSNVKNLYEKVRNQLKNNAKEIGNGCFEFYHKCDNTCMESVKNGTYDYPKYSEEAKLNREKIDGVKLESTRIYQILAIYSTVASSLVLVVSLGAISFWMCSNGSLQCRICI

SEQ ID NO: 14180 - protein, 566 aa, Artificial Sequence
  FLUAV/H1N1/A/Netherlands/602/2009__ACQ45338 hemagglutinin (HA)
MKAILVVLLYTFATANADTLCIGYHANNSTDTVDTVLEKNVTVTHSVNLLEDKHNGKLCKLRGVAPLHLGKCNIAGWILGNPECESLSTASSWSYIVETSSSDNGTCYPGDFIDYEELREQLSSVSSFERFEIFPKTSSWPNHDSNKGVTAACPHAGAKSFYKNLIWLVKKGNSYPKLSKSYINDKGKEVLVLWGIHHPSTSADQQSLYQNADAYVFVGSSRYSKKFKPEIAIRPKVRDQEGRMNYYWTLVEPGDKITFEATGNLVVPRYAFAMERNAGSGIIISDTPVHDCNTTCQTPKGAINTSLPFQNIHPITIGKCPKYVKSTKLRLATGLRNVPSIQSRGLFGAIAGFIEGGWTGMVDGWYGYHHQNEQGSGYAADLKSTQNAIDEITNKVNSVIEKMNTQFTAVGKEFNHLEKRIENLNKKVDDGFLDIWTYNAELLVLLENERTLDYHDSNVKNLYEKVRSQLKNNAKEIGNGCFEFYHKCDNTCMESVKNGTYDYPKYSEEAKLNREEIDGVKLESTRIYQILAIYSTVASSLVLVVSLGAISFWMCSNGSLQCRICI

SEQ ID NO: 14181 - protein, 566 aa, Artificial Sequence
  FLUAV/H3N2/A/Hong Kong/4801/2014__EPI643118 hemagglutinin (HA)
MKTIIALSYILCLVFAQKIPGNDNSTATLCLGHHAVPNGTIVKTITNDRIEVTNATELVQNSSIGEICDSPHQILDGENCTLIDALLGDPQCDGFQNKKWDLFVERSKAYSNCYPYDVPDYASLRSLVASSGTLEFNNESFNWTGVTQNGTSSACIRRSSSSFFSRLNWLTHLNYKYPALNVTMPNNEQFDKLYIWGVHHPGTDKDQIFPYAQSSGRIIVSTKRSQQAVIPNIGSRPRIRDIPSRISIYWTIVKPGDILLINSTGNLIAPRGYFKLRSGKSSIMRSDAPIGKCKSECITPNGSIPNDKPFQNVNRITYGACPRYVKHSTLKLATGMRNVPEKQTRGIFGAIAGFIENGWEGMVDGWYGFRHQNSEGRGQAADLKSTQAAIDQINGKLNRLIGKTNEKFHQIEKEFSEVEGRIQDLEKYVEDTKIDLWSYNAELLVALENQHTIDLTDSEMNKLFEKTKKQLRENAEDMGNGCFKIYHKCDNACIGSIRNGTYDHNVYRDEALNNRFQIKGVELKSGYKDWILWISFAISCFLLCVALLGFIMWACQKGNIRCNICI

SEQ ID NO: 14182 - protein, 585 aa, Artificial Sequence
  FLUBV/H0N0/B/Brisbane/60/2008__FJ766840 hemagglutinin (HA)
MKAIIVLLMVVTSNADRICTGITSSNSPHVVKTATQGEVNVTGVIPLTTTPTKSHFANLKGTETRGKLCPKCLNCTDLDVALGRPKCTGKIPSARVSILHEVRPVTSGCFPIMHDRTKIRQLPNLLRGYEHIRLSTHNVINAENAPGGPYKIGTSGSCPNITNGNGFFATMAWAVPKNDKNKTATNPLTIEVPYICTEGEDQITVWGFHSDNETQMAKLYGDSKPQKFTSSANGVTTHYVSQIGGFPNQTEDGGLPQSGRIVVDYMVQKSGKTGTITYQRGILLPQKVWCASGRSKVIKGSLPLIGEADCLHEKYGGLNKSKPYYTGEHAKAIGNCPIWVKTPLKLANGTKYRPPAKLLKERGFFGAIAGFLEGGWEGMIAGWHGYTSHGAHGVAVAADLKSTQEAINKITKNLNSLSELEVKNLQRLSGAMDELHNEILELDEKVDDLRADTISSQIELAVLLSNEGIINSEDEHLLALERKLKKMLGPSAVEIGNGCFETKHKCNQTCLDRIAAGTFDAGEFSLPTFDSLNITAASLNDDGLDNHTILLYYSTAASSLAVTLMIAIFVVYMVSRDNVSCSICL

SEQ ID NO: 14183 - protein, 584 aa, Artificial Sequence
  FLUBV/H0N0/B/Phuket/3073/2013__EPI540671 hemagglutinin (HA)
MKAIIVLLMVVTSNADRICTGITSSNSPHVVKTATQGEVNVTGVIPLTTTPTKSYFANLKGTRTRGKLCPDCLNCTDLDVALGRPMCVGTTPSAKASILHEVRPVTSGCFPIMHDRTKIRQLPNLLRGYEKIRLSTQNVIDAEKAPGGPYRLGTSGSCPNATSKIGFFATMAWAVPKDNYKNATNPLTVEVPYICTEGEDQITVWGFHSDNKTQMKSLYGDSNPQKFTSSANGVTTHYVSQIGDFPDQTEDGGLPQSGRIVVDYMMQKPGKTGTIVYQRGVLLPQKVWCASGRSKVIKGSLPLIGEADCLHEEYGGLNKSKPYYTGKHAKAIGNCPIWVKTPLKLANGTKYRPPAKLLKERGFFGAIAGFLEGGWEGMIAGWHGYTSHGAHGVAVAADLKSTQEAINKITKNLNSLSELEVKNLQRLSGAMDELHNEILELDEKVDDLRADTISSQIELAVLLSNEGIINSEDEHLLALERKLKKMLGPSAVDIGNGCFETKHKCNQTCLDRIAAGTFNAGEFSLPTFDSLNITAASLNDDGLDNHTILLYYSTAASSLAVTLMLAIFIVYMVSRDNVSCSICL

SEQ ID NO: 14184 - protein, 564 aa, Artificial Sequence
  FLUAV/H1N1/A/Brisbane/02/2018__EPI1212834 hemagglutinin (HA)
MKAILVVLLYTFTTANADTLCIGYHANNSTDTVDTVLEKNVTVTHSVNLLEDKHNGKLCKLGGVAPLHLGKCNIAGWILGNPECESLSTARSWSYIVETSNSDNGTCYPGDFINYEELREQLSSVSSFERFEIFPKTSSWPNHDSNKGVTAACPHAGAKSFYKNLIWLVKKGNSYPKLNQTYINDKGKEVLVLWGIHHPPTTADQQSLYQNADAYVFVGTSRYSKKFKPEIATRPKVRDREGRMNYYWTLVEPGDKITFEATGNLVVPRYAFTMERNAGSGIIISDTPVHDCNTTCQTAEGAINTSLPFQNVHPVTIGKCPKYVKSTKLRLATGLRNVPSIQSRGLFGAIAGFIEGGWTGMVDGWYGYHHQNEQGSGYAADLKSNAIDKITNKVNSVIEKMNTQFTAVGKEFNHLEKRIENLNKKVDDGFLDIWTYNAELLVLLENERTLDYHDSNVKNLYEKVRNQLKNNAKEIGNGCFEFYHKCDNTCMESVKNGTYDYPKYSEEAKLNREKIDGVKLESTRIYQILAIYSTVASSLVLVVSLGAISFWMCSNGSLQCRICI

SEQ ID NO: 14185 - protein, 564 aa, Artificial Sequence
  FLUAV/H1N1/A/Brisbane/02/2018__EPI1671767 hemagglutinin (HA)
MKAILVVLLYTFTTANADTLCIGYHANNSTDTVDTVLEKNVTVTHSVNLLEDKHNGKLCKLGGVAPLHLGKCNIAGWILGNPECESLSTARSWSYIVETSNSDNGTCYPGDFINYEELREQLSSVSSFERFEIFPKTSSWPNHDSNKGVTAACPHAGAKSFYKNLIWLVKKGNSYPKLNQTYINDKGKEVLVLWGIHHPPTTADQQSLYQNADAYVFVGTSRYSKKFKPEIATRPKVRDQEGRMNYYWTLVEPGDKITFEATGNLVVPRYAFTMERNAGSGIIISDTPVHDCNTTCQTAEGAINTSLPFQNVHPVTIGKCPKYVKSTKLRLATGLRNVPSIQSRGLFGAIAGFIEGGWTGMVDGWYGYHHQNEQGSGYAADLKSNAIDKITNKVNSVIEKMNTQFTAVGKEFNHLEKRIENLNKKVDDGFLDIWTYNAELLVLLENERTLDYHDSNVKNLYEKVRNQLKNNAKEIGNGCFEFYHKCDNTCMESVKNGTYDYPKYSEEAKLNREKIDGVKLESTRIYQILAIYSTVASSLVLVVSLGAISFWMCSNGSLQCRICI

SEQ ID NO: 14186 - protein, 564 aa, Artificial Sequence
  FLUAV/H1N1/A/Guangdong-Maonan/SWL1536/2019__EPI1542570 hemagglutinin (HA)
MKAILVVLLYTFTTANADTLCIGYHANNSTDTVDTVLEKNVTVTHSVNLLEDKHNGKLCKLRGVAPLHLGKCNIAGWILGNPECESLSTARSWSYIVETSNSDNGTCYPGDFINYEELREQLSSVSSFERFEIFPKTSSWPNHDSDKGVTAACPHAGAKSFYKNLIWLVKKGNSYPKLNQTYINDKGKEVLVLWGIHHPPTIAAQESLYQNADAYVFVGTSRYSKKFKPEIATRPKVRDQEGRMNYYWTLVEPGDKITFEATGNLVVPRYAFTMERDAGSGIIISDTPVHDCNTTCQTPEGAINTSLPFQNVHPITIGKCPKYVKSTKLRLATGLRNVPSIQSRGLFGAIAGFIEGGWTGMVDGWYGYHHQNEQGSGYAADLKSNAIDKITNKVNSVIEKMNTQFTAVGKEFNHLEKRIENLNKKVDDGFLDIWTYNAELLVLLENERTLDYHDSNVKNLYEKVRNQLKNNAKEIGNGCFEFYHKCDNTCMESVKNGTYDYPKYSEEAKLNREKIDGVKLESTRIYQILAIYSTVASSLVLVVSLGAISFWMCSNGSLQCRICI

SEQ ID NO: 14187 - protein, 564 aa, Artificial Sequence
  FLUAV/H1N1/A/Guangdong-Maonan/SWL1536/2019__EPI1590725 hemagglutinin (HA)
MKAILVVLLYTFTTANADTLCIGYHANNSTDTVDTVLEKNVTVTHSVNLLEDKHNGKLCKLRGVAPLHLGKCNIAGWILGNPECESLSTARSWSYIVETSNSDNGTCYPGDFINYEELREQLSSVSSFERFEIFPKTSSWPNHDSDKGVTAACPHAGAKSFYKNLIWLVKKGNSYPKLNQTYINDKGKEVLVLWGIHHPPTIAVQESLYQNADAYVFVGTSRYSKKFKPEIATRPKVRDQEGRMNYYWTLVEPGDKITFEATGNLVVPRYAFTMERDAGSGIIISDTPVHDCNTTCQTPEGAINTSLPFQNVHPITIGKCPKYVKSTKLRLATGLRNVPSIQSRGLFGAIAGFIEGGWTGMVDGWYGYHHQNEQGSGYAADLKSNAIDKITNKVNSVIEKMNTQFTAVGKEFNHLEKRIENLNKKVDDGFLDIWTYNAELLVLLENERTLDYHDSNVKNLYEKVRNQLKNNAKEIGNGCFEFYHKCDNTCMESVKNGTYDYPKYSEEAKLNREKIDGVKLESTRIYQILAIYSTVASSLVLVVSLGAISFWMCSNGSLQCRICI

SEQ ID NO: 14188 - protein, 566 aa, Artificial Sequence
  FLUAV/H3N2/A/Singapore/INFIMH-16-0019/2016__EPI1106227 hemagglutinin (HA)
MKTIIALSYILCLVFAQKIPGNDNSTATLCLGHHAVPNGTIVKTITNDRIEVTNATELVQNSSIGEICDSPHQILDGENCTLIDALLGDPQCDGFQNKKWDLFVERSKAYSNCYPYDVPDYASLRSLVASSGTLEFKNESFNWTGVTQNGTSSACIRGSSSSFFSRLNWLTHLNYTYPALNVTMPNKEQFDKLYIWGVHHPGTDKDQIFLYAQSSGRITVSTKRSQQAVIPNIGSRPRIRDIPSRISIYWTIVKPGDILLINSTGNLIAPRGYFKIRSGKSSIMRSDAPIGKCKSECITPNGSIPNDKPFQNVNRITYGACPRYVKHSTLKLATGMRNVPEKQTRGIFGAIAGFIENGWEGMVDGWYGFRHQNSEGRGQAADLKSTQAAIDQINGKLNRLIGKTNEKFHQIEKEFSEVEGRVQDLEKYVEDTKIDLWSYNAELLVALENQHTIDLTDSEMNKLFEKTKKQLRENAEDMGNGCFKIYHKCDNACIESIRNETYDHNVYRDEALNNRFQIKGVELKSGYKDWILWISFAISCFLLCVALLGFIMWACQKGNIRCNICI

SEQ ID NO: 14189 - protein, 566 aa, Artificial Sequence
  FLUAV/H3N2/A/Singapore/INFIMH-16-0019/2016__EPI1341068 hemagglutinin (HA)
MKTIIALSYILCLVFAQKIPGNDNSTATLCLGHHAVPNGTIVKTITNDRIEVTNATELVQNSSIGEICDSPHQILDGENCTLIDALLGDPQCDGFQNKKWDLFVERSKAYSNCYPYDVPDYASLRSLVASSGTLEFKNESFNWTGVTQNGTSSACIRGSSSSFFSRLNWLTHLNYKYPALNVTMPNKEQFDKLYIWGVHHPGTDKDQIFPYAQSSGRITVSTKRSQQAVIPNIGSRPRIRGIPSRISIYWTIVKPGDILLINSTGNLIAPRGYFKIRSGKSSIMRSDAPIGKCKSECITPNGSIPNDKPFQNVNRITYGACPRYVKHSTLKLATGMRNVPEKQTRGIFGAIAGFIENGWEGMVDGWYGFRHQNSEGRGQAADLKSTQAAIDQINGKLNRLIGKTNEKFHQIEKEFSEVEGRVQDLEKYVEDTKIDLWSYNAELLVALENQHTIDLTDSEMNKLFEKTKKQLRENAEDMGNGCFKIYHKCDNACIESIRNETYDHNVYRDEALNNRFQIKGVELKSGYKDWILWISFAISCFLLCVALLGFIMWACQKGNIRCNICI

SEQ ID NO: 14190 - protein, 566 aa, Artificial Sequence
  FLUAV/H3N2/A/Singapore/INFIMH-16-0019/2016 NYMC-X-307__EPI1259099 hemagglutinin (HA)
MKTIIALSYILCLVFAQKIPGNDNSTATLCLGHHAVPNGTIVKTITNDRIEVTNATELVQNSSIGEICDSPHQILDGENCTLIDALLGDPQCDGFQNKKWDLFVERSKAYSNCYPYDVPDYASLRSLVASSGTLEFKNESFNWTGVTQNGTSSACIRGSSSSFFSRLNWLTHLNYKYPALNVTMPNKEQFDKLYIWGVHHPGTDKDQIFPYAQSSGRITVSTKRSQQAVIPNIGSRPRIRGIPSRISIYWTIVKPGDILLINSTGNLIAPRGYFKIRSGKSSIMRSDAPIGKCKSECITPNGSIPNDKPFQNVNKITYGACPRYVKHSTLKLATGMRNVPEKQTRGIFGAIAGFIENGWEGMVDGWYGFRHQNSEGRGQAADLKSTQAAIDQINGKLNRLIGKTNEKFHQIEKEFSEVEGRVQDLEKYVEDTKIDLWSYNAELLVALENQHTIDLTDSEMNKLFEKTKKQLRENAEDMGNGCFKIYHKCDNACIESIRNETYDHNVYRDEALNNRFQIKGVELKSGYKDWILWISFAISCFLLCVALLGFIMWACQKGNIRCNICI

SEQ ID NO: 14191 - protein, 566 aa, Artificial Sequence
  FLUAV/H3N2/A/Singapore/INFIMH-16-0019/2016-CDC-LV18A__EPI1583318 hemagglutinin (HA)
MKTIIALSYILCLVFAQKIPGNDNSTATLCLGHHAVPNGTIVKTITNDRIEVTNATELVQNSSIGEICDSPHQILDGENCTLIDALLGDPQCDGFQNKKWDLFVERSKAYSNCYPYDVPDYASLRSLVASSGTLEFKNESFNWTGVTQNGTSSACIRGSSSSFFSRLNWLTHLNYKYPALNVTMPNKEQFDKLYIWGVHHPGTDKDQIFPYAQSSGRIIVSTKRSQQAVIPNIGSRPRIRDIPSRISIYWTIVKPGDILLINSTGNLIAPRGYFKIRSGKSSIMRSDAPIGKCKSECITPNGSIPNDKPFQNVNRITYGACPRYVKHSTLKLATGMRNVPEKQTRGIFGAIAGFIENGWEGMVDGWYGFRHQNSEGRGQAADLKSTQAAIDQINGKLNRLIGKTNEKFHQIEKEFSEVEGRVQDLEKYVEDTKIDLWSYNAELLVALENQHTIDLTDSEMNKLFEKTKKQLRENAEDMGNGCFKIYHKCDNACIESIRNETYDHNVYRDEALNNRFQIKGVELKSGYKDWILWISFAISCFLLCVALLGFIMWACQKGNIRCNICI

SEQ ID NO: 14192 - protein, 566 aa, Artificial Sequence
  FLUAV/H3N2/A/Kansas/14/2017__EPI1146345 hemagglutinin (HA)
MKTIIALSCILCLVFAQKIPGNDNSTATLCLGHHAVPNGTIVKTITNDRIEVTNATELVQNSSIGEICDSPHQILDGENCTLIDALLGDPQCDGFQNKKWDLFVERNKAYSNCYPYDVPDYASLRSLVASSGTLEFNNESFNWAGVTQNGTSSSCIRGSKSSFFSRLNWLTHLNSKYPALNVTMPNNEQFDKLYIWGVHHPGTDKDQISLYAQSSGRITVSTKRSQQAVIPNIGSRPRIRDIPSRISIYWTIVKPGDILLINSTGNLIAPRGYFKIRSGKSSIMRSDAPIGKCKSECITPNGSIPNDKPFQNVNRITYGACPRYVKQSTLKLATGMRNVPERQTRGIFGAIAGFIENGWEGMVDGWYGFRHQNSEGRGQAADLKSTQAAIDQINGKLNRLIGKTNEKFHQIEKEFSEVEGRIQDLEKYVEDTKIDLWSYNAELLVALENQHTIDLTDSEMNKLFEKTKKQLRENAEDMGNGCFKIYHKCDNACMGSIRNGTYDHNVYRDEALNNRFQIKGVELKSGYKDWILWISFAISCFLLCVALLGFIMWACQKGNIRCNICI

SEQ ID NO: 14193 - protein, 566 aa, Artificial Sequence
  FLUAV/H3N2/A/Kansas/14/2017__EPI1261067 hemagglutinin (HA)
MKTIIALSCILCLVFAQKIPGNDNSTATLCLGHHAVPNGTIVKTITNDRIEVTNATELVQNSSIGEICDSPHQILDGENCTLIDALLGDPQCDGFQNKKWDLFVERNKAYSNCYPYDVPDYASLRSLVASSGTLEFNNESFNWAGVTQNGTSSSCIRGSKSSFFSRLNWLTHLNSKYPALNVTMPNNEQFDKLYIWGVHHPGTDKNQISLYAQSSGRITVSTKRSQQAVIPNIGSRPRIRDIPSRISIYWTIVKPGDILLITSTGNLIAPRGYFKIRSGKSSIMRSDAPIGKCKSECITPNGSIPNDKPFQNVNRITYGACPRYVKQSTLKLATGMRNVPERQTRGIFGAIAGFIENGWEGMVDGWYGFRHQNSEGRGQAADLKSTQAAIDQINGKLNRLIGKTNEKFHQIEKEFSEVEGRIQDLEKYVEDTKIDLWSYNAELLVALENQHTIDLTDSEMNKLFEKTKKQLRENAEDMGNGCFKIYHKCDNACMGSIRNGTYDHNVYRDEALNNRFQIKGVELKSGYKDWILWISFAISCFLLCVALLGFIMWACQKGNIRCNICI

SEQ ID NO: 14194 - protein, 566 aa, Artificial Sequence
  FLUAV/H3N2/A/Kansas/14/2017__EPI1691978 hemagglutinin (HA)
MKTIIALSCILCLVFAQKIPGNDNSTATLCLGHHAVPNGTIVKTITNDRIEVTNATELVQNSSIGEICDSPHQILDGENCTLIDALLGDPQCDGFQNKKWDLFVERNKAYSNCYPYDVPDYASLRSLVASSGTLEFNNESFNWAGVTQNGTSSSCIRGSKSSFFSRLNWLTHLNSKYPALNVTMPNNEQFDKLYIWGVHHPVTDKNQISLYAQSSGRITVSTKRSQQAVIPNIGYRPRIRDIPSRISIYWTIVKPGDILLINSTGNLIAPRGYFKIRSGKSSIMRSDAPIGKCKSECITPNGSIPNDKPFQNVNRITYGACPRYVKQSTLKLATGMRNVPERQTRGIFGAIAGFIENGWEGMVDGWYGFRHQNSEGRGQAADLKSTQAAIDQINGKLNRLIGKTNEKFHQIEKEFSEVEGRIQDLEKYVEDTKIDLWSYNAELLVALENQHTIDLTDSEMNKLFEKTKKQLRENAEDMGNGCFKIYHKCDNACMGSIRNGTYDHNVYRDEALNNRFQIKGVELKSGYKDWILWISFAISCFLLCVALLGFIMWACQKGNIRCNICI

SEQ ID NO: 14195 - protein, 566 aa, Artificial Sequence
  FLUAV/H3N2/A/Kansas/14/2017 CBER-22B CDC19A__EPI1388416 hemagglutinin (HA)
MKTIIALSCILCLVFAQKIPGNDNSTATLCLGHHAVPNGTIVKTITNDRIEVTNATELVQNSSIGEICDSPHQILDGENCTLIDALLGDPQCDGFQNKKWDLFVERNKAYSNCYPYDVPDYASLRSLVASSGTLEFNNESFNWAGVTQNGTSSSCIRGSKSSFFSRLNWLTHLNSKYPALNVTMPNNEQFDKLYIWGVHHPVTDKNQISLYAQSSGRITVSTKRSQQAVIPNIGYRPRIRDIPSRISIYWTIVKPGDILLINSTGNLIAPRGYFKIRSGKSSIMRSDAPIGKCKSECITPNGSIPNDKPFQNVNRITYGACPRYVKQSTLKLATGMRNVPERQTRGIFGAIAGFIENGWEGMVDGWYGFRHQNSEGRGQAADLKSTQAAIDQINGKLNRLIGKTNEKFHQIEKEFSEVEGRIQDLEKYVEDTKIDLWSYNAELLVALENQHTIDLTDSEMNKLFEKTKKQLRENAEDMGNGCFKIYHKCDNACIGSIRNGTYDHNVYRDEALNNRFQIKGVELKSGYKDWILWISFAISCFLLCVALLGFIMWACQKGNIRCNICI

SEQ ID NO: 14196 - protein, 566 aa, Artificial Sequence
  FLUAV/H3N2/A/Switzerland/8060/2017__EPI1154878 hemagglutinin (HA)
MKTIIALSYILCLVFAQKIPGNDNSTATLCLGHHAVPNGTIVKTITNDRIEVTNATELVQNSSIGEICDSPHQILDGENCTLIDALLGDPQCDGFQNKKWDLFVERSKAYSSCYPYDVPDYASLRSLVASSGTLEFNNESFNWTGVKQNGTSSACIRKSSSSFFSRLNWLTHLNYTYPALNVTMPNNEQFDKLYIWGVHHPGTDKDQIFLYAQSSGRITVSTKRSQQAVIPNIGSRPRIRDIPSRISIYWTIVKPGDILLINSTGNLIAPRGYFKIQSGKSSIMRSDAPIGKCKSECITPNGSIPNDKPFQNVNRITYGACPRYVKHSTLKLATGMRNVPEKQTRGIFGAIAGFIENGWEGMVDGWYGFRHQNSEGRGQAADLKSTQAAIDQINGKLNRLIGKTNEKFHQIEKEFSEVEGRIQDLEKYVEDTKIDLWSYNAELLVALENQHTIDLTDSEMNKLFEKTKKQLRENAEDMGNGCFKIYHKCDNACIGSIRNGTYDHNVYRDEALNNRFQIKGVELKSGYKDWILWISFAISCFLLCVALLGFIMWACQKGNIRCNICI

SEQ ID NO: 14197 - protein, 566 aa, Artificial Sequence
  FLUAV/H3N2/A/Switzerland/8060/2017__EPI1266285 hemagglutinin (HA)
MKTIIALSYILCLVFAQKIPGNDNSTATLCLGHHAVPNGTIVKTITNDRIEVTNATELVQNSSIGEICDSPHQILDGENCTLIDALLGDPQCDGFQNKKWDLFVERSKAYSSCYPYDVPDYASLRSLVASSGTLEFNNESFNWTGVKQNGTSSACIRKSSSSFFSRLNWLTHLNYKYPALNVTMPNNEQFDKLYIWGVHHPGTDKDQIFPYAQSSGRITVSTKRSQQAVIPNIGSRPRIRDIPSRISIYWTIVKPGDILLINSTGNLIAPRGYFKIQSGKSSIMRSDAPIGKCKSECITPNGSIPNDKPFQNVNRITYGACPRYVKHSTLKLATGMRNVPEKQTRGIFGAIAGFIENGWEGMVDGWYGFRHQNSEGRGQAADLKSTQAAIDQINGKLNRLIGKTNEKFHQIEKEFSEVEGRIQDLEKYVEDTKIDLWSYNAELLVALENQHTIDLTDSEMNKLFEKTKKQLRENAEDMGNGCFKIYHKCDNACIGSIRNGTYDHNVYRDEALNNRFQIKGVELKSGYKDWILWISFAISCFLLCVALLGFIMWACQKGNIRCNICI

SEQ ID NO: 14198 - protein, 566 aa, Artificial Sequence
  FLUAV/H3N2/A/Hong Kong/2671/2019__EPI1543098 hemagglutinin (HA)
MKTIIALSYILCLVFTQKIPGNDNSTATLCLGHHAVPNGTIVKTITNDRIEVTNATELVQNSSIGEICDSPHQILDGGNCTLIDALLGDPQCDGFQNKKWDLFVERSRAYSNCYPYDVPDYASLRSLVASSGTLEFKNESFNWAGVTQNGKSFSCIRGSSSSFFSRLNWLTHLNYTYPALNVTMPNKEQFDKLYIWGVHHPGTDKDQISLYAQSSGRITVSTKRSQQAVIPNIGSRPRIRDIPSRISIYWTIVKPGDILLINSTGNLIAPRGYFKIRSGKSSIMRSDAPIGKCKSECITPNGSIPNDKPFQNVNRITYGACPRYVKQSTLKLATGMRNVPEKQTRGIFGAIAGFIENGWEGMVDGWYGFRHQNSEGRGQAADLKSTQAAIDQINGKLNRLIGKTNEKFHQIEKEFSEVEGRVQDLEKYVEDTKIDLWSYNAELLVALENQHTIDLTDSEMNKLFEKTKKQLRENAEDMGNGCFKIYHKCDNACIGSIRNETYDHNVYRDEALNNRFQIKGVELKSGYKDWILWISFAISCFLLCVALLGFIMWACQKGNIRCNICI

SEQ ID NO: 14199 - protein, 566 aa, Artificial Sequence
  FLUAV/H3N2/A/Hong Kong/2671/2019__EPI1642843 hemagglutinin (HA)
MKTIIALSYILCLVFTQKIPGNDNSTATLCLGHHAVPNGTIVKTITNDRIEVTNATELVQNSSIGEICDSPHQILDGGNCTLIDALLGDPQCDGFQNKKWDLFVERSRAYSNCYPYDVPDYASLRSLVASSGTLEFKNESFNWAGVTQNGKSFSCIRGSSSSFFSRLNWLTHLNYIYPALNVTMPNKEQFDKLYIWGVHHPVTDKDQISLYAQSSGRITVSTKRSQQAVIPNIGSRPRIRNIPSRISIYWTIVKPGDILLINSTGNLIAPRGYFKIRSGKSSIMRSDAPIGKCKSECITPNGSIPNDKPFQNVNRITYGACPRYVKQSTLKLATGMRNVPEKQTRGIFGAIAGFIENGWEGMVDGWYGFRHQNSEGRGQAADLKSTQAAIDQINGKLNRLIGKTNEKFHQIEKEFSEVEGRVQDLEKYVEDTKIDLWSYNAELLVALENQHTIDLTDSEMNKLFEKTKKQLRENAEDMGNGCFKIYHKCDNACIGSIRNETYDHNVYRDEALNNRFQIKGVELKSGYKDWILWISFAISCFLLCVALLGFIMWACQKGNIRCNICI

SEQ ID NO: 14200 - protein, 566 aa, Artificial Sequence
  FLUAV/H3N2/A/Hong Kong/45/2019__EPI1691930 hemagglutinin (HA)
MKTIIALSYILCLGFTQKIPGNDNSTATLCLGHHAVPNGTIVKTITNDRIEVTNATELVQNSSIGEICDSPHQILDGGNCTLIDALLGDPQCDGFQNKKWDLFVERSRAYSNCYPYDVPDYASLRSLVASSGTLEFKNESFNWAGVTQNGKSFSCIRGSSSSFFSRLNWLTHLNYTYPALNVTMPNKEQFDKLYIWGVHHPGTDKDQISLYAQSSGRITVSTKRSQQAVIPNIGSRPRIRDIPSRISIYWTIVKPGDILLINSTGNLIAPRGYFKIRSGKSSIMRSDAPIGKCKSECITPNGSIPNDKPFQNVNRITYGACPRYVKQNTLKLATGMRNVPEKQTRGIFGAIAGFIENGWEGMVDGWYGFRHQNSEGRGQAADLKSTQAAIDQINGKLNRLIGKTNEKFHQIEKEFSEVEGRVQDLEKYVEDTKIDLWSYNAELLVALENQHTIDLTDSEMNKLFEKTKKQLRENAEDMGNGCFKIYHKCDNACIGSIRNETYDHNVYRDEALNNRFQIKGVELKSGYKDWILWISFAISCFLLCVALLGFIMWACQKGNIRCNICI

SEQ ID NO: 14201 - protein, 566 aa, Artificial Sequence
  FLUAV/H3N2/A/South Australia/34/2019__EPI1387331 hemagglutinin (HA)
MKTIIALSYILCLVFAQKIPGNDNSTATLCLGHHAVPNGTIVKTITNDRIEVTNATELVQNSSIGEICDSPHQILDGGNCTLIDALLGDPQCDGFQNKKWDLFVERSRAYSNCYPYDVPDYASLRSLVASSGTLEFKNESFNWTGVKQNGTSSACIRGSSSSFFSRLNWLTHLNYTYPALNVTMPNKEQFDKLYIWGVHHPGTDKDQIFLYAQSSGRITVSTKRSQQAVIPNIGFRPRIRDIPSRISIYWTIVKPGDILLINSTGNLIAPRGYFKIRSGKSSIMRSDAPIGKCKSECITPNGSIPNDKPFQNVNRITYGACPRYVKQSTLKLATGMRNVPEKQTRGIFGAIAGFIENGWEGMMDGWYGFRHQNSEGRGQAADLKSTQAAIDQINGKLNRLIGKTNEKFHQIEKEFSEVEGRVQDLEKYVEDTKIDLWSYNAELLVALENQHTIDLTDSEMNKLFEKTKKQLRENAEDMGNGCFKIYHKCDNACIGSIRNETYDHNVYRDEALNNRFQIKGVELKSGYKDWILWISFAISCFLLCIALLGFIMWACQKGNIRCNICI

SEQ ID NO: 14202 - protein, 566 aa, Artificial Sequence
  FLUAV/H3N2/A/South Australia/34/2019__EPI1440494 hemagglutinin (HA)
MKTIIALSYILCLVFAQKIPGNDNSTATLCLGHHAVPNGTIVKTITNDRIEVTNATELVQNSSIGEICDSPHQILDGGNCTLIDALLGDPQCDGFQNKKWDLFVERSRAYSNCYPYDVPDYASLRSLVASSGTLEFKNESFNWTGVKQNGTSSACIRGSSSSFFSRLNWLTHLNYKYPALNVTMPNKEQFDKLYIWGVHHPITDKDQIFLYAQSSGRITVSTKRSQQAVIPNIGFRPRIRDIPSRISIYWTIVKPGDILLINSTGNLIAPRGYFKIRSGKSSIMRSDAPIGKCKSECITPNGSIPNDKPFQNVNRITYGACPRYVKQSTLKLATGMRNVPEKQTRGIFGAIAGFIENGWEGMMDGWYGFRHQNSEGRGQAADLKSTQAAIDQINGKLNRLIGKTNEKFHQIEKEFSEVEGRVQDLEKYVEDTKIDLWSYNAELLVALENQHTIDLTDSEMNKLFEKTKKQLRENAEDMGNGCFKIYHKCDNACIGSIRNETYDHNVYRDEALNNRFQIKGVELKSGYKDWILWISFAISCFLLCIALLGFIMWACQKGNIRCNICI

SEQ ID NO: 14203 - protein, 560 aa, Artificial Sequence
  FLUAV/H7N9/A/chicken/Zhejiang/C483/2013(H7N9)__AGN69400.1 hemagglutinin (HA)
MNTQILVFALIAIIPTNADKICLGHHAVSNGTKVNTLTERGVEVVNATETVERTNIPRICSKGKKTVDLGQCGLLGTITGPPQCDQFLEFSADLIIERREGSDVCYPGKFVNEEALRQILRESGGIDKEAMGFTYSGIRTNGATSACRRSGSSFYAEMKWLLSNTDNAAFPQMTKSYKNTRKSPALIVWGIHHSVSTAEQTKLYGSGNKLVTVGSSNYQQSFVPSPGARPQVNGQSGRIDFHWLMLNPNDTVTFSFNGAFIAPDRASFLRGKSMGIQSGVQVDANCEGDCYHSGGTIISNLPFQNIDSRAVGKCPRYVKQRSLLLATGMKNVPEIPKGRGLFGAIAGFIENGWEGLIDGWYGFRHQNAQGEGTAADYKSTQSAIDQITGKLNRLIEKTNQQFELIDNEFNEVEKQIGNVINWTRDSITEVWSYNAELLVAMENQHTIDLADSEMDKLYERVKRQLRENAEEDGTGCFEIFHKCDDDCMASIRNNTYDHSKYREEAMQNRIQIDPVKLSSGYKDVILWFSFGASCFILLAIVMGLVFICVKNGNMRCTICI

SEQ ID NO: 14204 - protein, 561 aa, Artificial Sequence
  FLUAV/H10N8/A/Jiangxi/IPB13/2013(H10N8)__AHK10761.1 hemagglutinin (HA)
MYKIVVIIALLGAVKGLDKICLGHHAVANGTIVKTLTNEQEEVTNATETVESTGINRLCMKGRKHKDLGNCHPIGMLIGTPACDLHLTGMWDTLIERENAIAYCYPGATVNVEALRQKIMESGGINKISTGFTYGSSINSAGTTRACMRNGGNSFYAELKWLVSKSKGQNFPQTTNTYRNTDTAEHLIMWGIHHPSSTQEKNDLYGTQSLSISVGSSTYRNNFVPVVGARPQVNGQSGRIDFHWTLVQPGDNITFSHNGGLIAPSRVSKLIGRGLGIQSDAPIDNNCESKCFWRGGSINTRLPFQNLSPRTVGQCPKYVNRRSLMLATGMRNVPELIQGRGLFGAIAGFLENGWEGMVDGWYGFRHQNAQGTGQAADYKSTQAAIDQITGKLNRLVEKTNTEFESIESEFSEIEHQIGNVINWTKDSITDIWTYQAELLVAMENQHTIDMADSEMLNLYERVRKQLRQNAEEDGKGCFEIYHACDDSCMESIRNNTYDHSQYREEALLNRLNINPVTLSSGYKDIILWFSFGASCFVLLAVVMGLFFFCLKNGNMRCTICI

SEQ ID NO: 14205 - protein, 583 aa, Artificial Sequence
  FLUBV/H0N0/B/Colorado/06/2017__EPI1011552 hemagglutinin (HA)
MKAIIVLLMVVTSSADRICTGITSSNSPHVVKTATQGEVNVTGVIPLTTTPTKSHFANLKGTETRGKLCPKCLNCTDLDVALGRPKCTGKIPSARVSILHEVRPVTSGCFPIMHDRTKIRQLPNLLRGYEHVRLSTHNVINAEGAPGGPYKIGTSGSCPNITNGNGFFATMAWAVPDKNKTATNPLTIEVPYVCTEGEDQITVWGFHSDNETQMAKLYGDSKPQKFTSSANGVTTHYVSQIGGFPNQTEDGGLPQSGRIVVDYMVQKSGKTGTITYQRGILLPQKVWCASGRSKVIKGSLPLIGEADCLHEKYGGLNKSKPYYTGEHAKAIGNCPIWVKTPLKLANGTKYRPPAKLLKERGFFGAIAGFLEGGWEGMIAGWHGYTSHGAHGVAVAADLKSTQEAINKITKNLNSLSELEVKNLQRLSGAMDELHNEILELDEKVDDLRADTISSQIELAVLLSNEGIINSEDEHLLALERKLKKMLGPSAVEIGNGCFETKHKCNQTCLDKIAAGTFDAGEFSLPTFDSLNITAASLNDDGLDNHTILLYYSTAASSLAVTLMIAIFVVYMVSRDNVSCSICL

SEQ ID NO: 14206 - protein, 583 aa, Artificial Sequence
  FLUBV/H0N0/B/Colorado/06/2017__EPI1051642 hemagglutinin (HA)
MKAIIVLLMVVTSSADRICTGITSSNSPHVVKTATQGEVNVTGVIPLTTTPTKSHFANLKGTETRGKLCPKCLNCTDLDVALGRPKCTGKIPSARVSILHEVRPVTSGCFPIMHDRTKIRQLPNLLRGYEHVRLSTHNVINAEGAPGGPYKIGTSGSCPNITNGNGFFATMAWAVPDKNKTATNPLTIEVPYVCTEGEDQITVWGFHSDTETQMAKLYGDSKPQKFTSSANGVTTHYVSQIGGFPNQTEDGGLPQSGRIVVDYMVQKSGKTGTITYQRGILLPQKVWCASGRSKVIKGSLPLIGEADCLHEKYGGLNKSKPYYTGEHAKAIGNCPIWVKTPLKLANGTKYRPPAKLLKERGFFGAIAGFLEGGWEGMIAGWHGYTSHGAHGVAVAADLKSTQEAINKITKNLNSLSELEVKNLQRLSGAMDELHNEILELDEKVDDLRADTISSQIELAVLLSNEGIINSEDEHLLALERKLKKMLGPSAVEIGNGCFETKHKCNQTCLDKIAAGTFDAGEFSLPTFDSLNITAASLNDDGLDNHTILLYYSTAASSLAVTLMIAIFVVYMVSRDNVSCSICL

SEQ ID NO: 14207 - protein, 583 aa, Artificial Sequence
  FLUBV/H0N0/B/Colorado/06/2017 BX-71__EPI1151760 hemagglutinin (HA)
MKAIIVLLMVVTSSADRICTGITSSNSPHVVKTATQGEVNVTGVIPLTTTPTKSHFANLKGTETRGKLCPKCLNCTDLDVALGRPKCTGKIPSARVSILHEVRPVTSGCFPIMHDRTKIRQLPNLLRGYEHVRLSTHNVINAEGAPGGPYKIGTSGSCPNITNGNGFFATMAWAVPDKNKTATNPLTIEVPYVCTEGEDQITVWGFHSDTETQMAKLYGDSKPQKFTSSANGVTTHYVSQIGGFPNQTEDGGRPQSGRIVVDYMVQKSGKTGTITYQRGILLPQKVWCASGRSKVIKGSLPLIGEADCLHEKYGGLNKSKPYYTGEHAKAIGNCPIWVKTPLKLANGTKYRPPAKLLKERGFFGAIAGFLEGGWEGMIAGWHGYTSHGAHGVAVAADLKSTQEAINKITKNLNSLSELEVKNLQRLSGAMDELHNEILELDEKVDDLRADTISSQIELAVLLSNEGIINSEDEHLLALERKLKKMLGPSAVEIGNGCFETKHKCNQTCLDKIAAGTFDAGEFSLPTFDSLNITAASLNDDGLDNHTILLYYSTAASSLAVTLMIAIFVVYMVSRDNVSCSICL

SEQ ID NO: 14208 - protein, 582 aa, Artificial Sequence
  FLUBV/H0N0/B/Washington/02/2019__EPI1368874 hemagglutinin (HA)
MKAIIVLLMVVTSNADRICTGITSSNSPHVVKTATQGEVNVTGVIPLTTTPTKSHFANLKGTETRGKLCPKCLNCTDLDVALGRPKCTGKIPSARVSILHEVRPVTSGCFPIMHDRTKIRQLPNLLRGYEHVRLSTHNVINAEDAPGRPYEIGTSGSCPNITNGNGFFATMAWAVPKNKTATNPLTIEVPYICTEGEDQITVWGFHSDNETQMAKLYGDSKPQKFTSSANGVTTHYVSQIGGFPNQTEDGGLPQSGRIVVDYMVQKSGKTGTITYQRGILLPQKVWCASGRSKVIKGSLPLIGEADCLHEKYGGLNKSKPYYTGEHAKAIGNCPIWVKTPLKLANGTKYRPPAKLLKERGFFGAIAGFLEGGWEGMIAGWHGYTSHGAHGVAVAADLKSTQEAINKITKNLNSLSELEVKNLQRLSGAMDELHNEILELDEKVDDLRADTISSQIELAVLLSNEGIINSEDEHLLALERKLKKMLGPSAVEIGNGCFETKHKCNQTCLDRIAAGTFDAGEFSLPTFDSLNITAASLNDDGLDNHTILLYYSTAASSLAVTLMIAIFVVYMVSRDNVSCSICL

SEQ ID NO: 14209 - protein, 582 aa, Artificial Sequence
  FLUBV/H0N0/B/Washington/02/2019__EPI1422452 hemagglutinin (HA)
MKAIIVLLMVVTSNADRICTGITSSNSPHVVKTATQGEVNVTGVIPLTTTPTKSHFANLKGTETRGKLCPKCLNCTDLDVALGRPKCTGKIPSARVSILHEVRPVTSGCFPIMHDRTKIRQLPNLLRGYEHVRLSTHNVINAEDAPGRPYEIGTSGSCPNITNGNGFFATMAWAVPKNKTATNPLTIEVPYICTEGEDQITVWGFHSDSETQMAKLYGDSKPQKFTSSANGVTTHYVSQIGGFPNQTEDGGLPQSGRIVVDYMVQKSGKTGTITYQRGILLPQKVWCASGRSKVIKGSLPLIGEADCLHEKYGGLNKSKPYYTGEHAKAIGNCPIWVKTPLKLANGTKYRPPAKLLKERGFFGAIAGFLEGGWEGMIAGWHGYTSHGAHGVAVAADLKSTQEAINKITKNLNSLSELEVKNLQRLSGAMDELHNEILELDEKVDDLRADTISSQIELAVLLSNEGIINSEDEHLLALERKLKKMLGPSAVEIGNGCFETKHKCNQTCLDRIAAGTFDAGEFSLPTFDSLNITAASLNDDGLDNHTILLYYSTAASSLAVTLMIAIFVVYMVSRDNVSCSICL

SEQ ID NO: 14210 - protein, 469 aa, Artificial Sequence
  FLUAV/H1N1/A/California/7/2009__GQ906802 neuraminidase (NA)
MNPNQKIITIGSVCMTIGMANLILQIGNIISIWISHSIQLGNQNQIETCNQSVITYENNTWVNQTYVNISNTNFAAGQSVVSVKLAGNSSLCPVSGWAIYSKDNSVRIGSKGDVFVIREPFISCSPLECRTFFLTQGALLNDKHSNGTIKDRSPYRTLMSCPIGEVPSPYNSRFESVAWSASACHDGINWLTIGISGPDNGAVAVLKYNGIITDTIKSWRNNILRTQESECACVNGSCFTVMTDGPSNGQASYKIFRIEKGKIVKSVEMNAPNYHYEECSCYPDSSEITCVCRDNWHGSNRPWVSFNQNLEYQIGYICSGIFGDNPRPNDKTGSCGPVSSNGANGVKGFSFKYGNGVWIGRTKSISSRNGFEMIWDPNGWTGTDNNFSIKQDIVGINEWSGYSGSFVQHPELTGLDCIRPCFWVELIRGRPKENTIWTSGSSISFCGVNSDTVGWSWPDGAELPFTIDK

SEQ ID NO: 14211 - protein, 469 aa, Artificial Sequence
  FLUAV/H1N1/A/Michigan/45/2015__EPI662593 neuraminidase (NA)
MNPNQKIITIGSICMTIGMANLILQIGNIISIWVSHSIQIGNQSQIETCNQSVITYENNTWVNQTYVNISNTNFAAGQSVVSVKLAGNSSLCPVSGWAIYSKDNSVRIGSKGDVFVIREPFISCSPLECRTFFLTQGALLNDKHSNGTIKDRSPYRTLMSCPIGEVPSPYNSRFESVAWSASACHDGINWLTIGISGPDSGAVAVLKYNGIITDTIKSWRNNILRTQESECACVNGSCFTIMTDGPSDGQASYKIFRIEKGKIIKSVEMKAPNYHYEECSCYPDSSEITCVCRDNWHGSNRPWVSFNQNLEYQMGYICSGVFGDNPRPNDKTGSCGPVSSNGANGVKGFSFKYGNGVWIGRTKSISSRKGFEMIWDPNGWTGTDNKFSIKQDIVGINEWSGYSGSFVQHPELTGLDCIRPCFWVELIRGRPEENTIWTSGSSISFCGVNSDTVGWSWPDGAELPFTIDK

SEQ ID NO: 14212 - protein, 469 aa, Artificial Sequence
  FLUAV/H1N1/A/Netherlands/602/2009__AGU92703 neuraminidase (NA)
MNPNQKIITIGSVCMTIGMANLILQIGNIISIWISHSIQLGNQNQIETCNQSVITYENNTWVNQTYVNISNTNFAAGQSVVSVKLAGNSSLCPVSGWAIYSKDNSVRVGSKGDVFVIREPFISCSPLECRTFFLTQGALLNDKHSNGTIKDRSPYRTLMSCPIGEVPSPYNSRFESVAWSASACHDGINWLTIGISGPDNGAVAVLKYNGIITDTIKSWRNNILRTQESECACVNGSCFTVMTDGPSNGQASYKIFRIEKGKIVKSVEMNAPNYHYEECSCYPDSSEITCVCRDNWHGSNRPWVSFNQNLEYQIGYICSGIFGDNPRPNDKTGSCGPVSSNGANGVKGFSFKYGNGVWIGRTKSISSRNGFEMIWDPNGWTGTDNNFSIKQDIVGINEWSGYSGSFIQHPELTGLDCIRPCFWVELIRGRPKENTIWTSGSSISFCGVNSDTVGWSWPDGAELPFTIDK

SEQ ID NO: 14213 - protein, 469 aa, Artificial Sequence
  FLUAV/H3N2/A/Hong Kong/4801/2014__EPI578429 neuraminidase (NA)
MNPNQKIITIGSVSLTISTICFFMQIAILITTVTLHFKQYEFNSPPNNQVMLCEPTIIERNITEIVYLTNTTIEKEICPKPAEYRNWSKPQCGITGFAPFSKDNSIRLSAGGDIWVTREPYVSCDPDKCYQFALGQGTTLNNVHSNNTVRDRTPYRTLLMNELGVPFHLGTKQVCIAWSSSSCHDGKAWLHVCITGDDKNATASFIYNGRLVDSVVSWSKDILRTQESECICINGTCTVVMTDGSASGKADTKILFIEEGKIVHTSTLSGSAQHVEECSCYPRYPGVRCVCRDNWKGSNRPIVDINIKDHSIVSSYVCSGLVGDTPRKNDSSSSSHCLDPNNEEGGHGVKGWAFDDGNDVWMGRTINETSRLGYETFKVIEGWSNPKSKLQTNRQVIVDRGDRSGYSGIFSVEGKSCINRCFYVELIRGRKEETEVLWTSNSIVVFCGTSGTYGTGSWPDGADLNLMPI

SEQ ID NO: 14214 - protein, 466 aa, Artificial Sequence
  FLUBV/H0N0/B/Brisbane/60/2008__EPI173278 neuraminidase (NA)
MLPSTIQTLTLFLTSGGVLLSLYVSASLSYLLYSDILLKFSPTEITAPTMPLDCANASNVQAVNRSATKGVTLLLPEPEWTYPRLSCPGSTFQKALLISPHRFGETKGNSAPLIIREPFIACGPNECKHFALTHYAAQPGGYYNGTRGDRNKLRHLISVKLGKIPTVENSIFHMAAWSGSACHDGKEWTYIGVDGPDNNALLKVKYGEAYTDTYHSYANKILRTQESACNCIGGNCYLMITDGSASGVSECRFLKIREGRIIKEIFPTGRVKHTEECTCGFASNKTIECACRDNSYTAKRPFVKLNVETDTAEIRLMCTDTYLDTPRPNDGSITGPCESNGDKGSGGIKGGFVHQRMESKIGRWYSRTMSKTERMGMGLYVKYDGDPWADSDALAFSGVMVSMKEPGWYSFGFEIKDKKCDVPCIGIEMVHDGGKETWHSAATAIYCLMGSGQLLWDTVTGVDMAL

SEQ ID NO: 14215 - protein, 466 aa, Artificial Sequence
  FLUBV/H0N0/B/Phuket/3073/2013__EPI540672 neuraminidase (NA)
MLPSTIQTLTLFLTSGGVLLSLYVSASLSYLLYSDILLKFSRTEVTAPIMPLDCANASNVQAVNRSATKGVTPLLPEPEWTYPRLSCPGSTFQKALLISPHRFGETKGNSAPLIIREPFIACGPKECKHFALTHYAAQPGGYYNGTREDRNKLRHLISVKLGKIPTVENSIFHMAAWSGSACHDGREWTYIGVDGPDSNALLKIKYGEAYTDTYHSYAKNILRTQESACNCIGGDCYLMITDGPASGISECRFLKIREGRIIKEIFPTGRVKHTEECTCGFASNKTIECACRDNSYTAKRPFVKLNVETDTAEIRLMCTKTYLDTPRPNDGSITGPCESDGDEGSGGIKGGFVHQRMASKIGRWYSRTMSKTKRMGMGLYVKYDGDPWTDSEALALSGVMVSMEEPGWYSFGFEIKDKKCDVPCIGIEMVHDGGKTTWHSAATAIYCLMGSGQLLWDTVTGVNMTL

SEQ ID NO: 14216 - protein, 469 aa, Artificial Sequence
  FLUAV/H1N1/A/Brisbane/02/2018__EPI1212833 neuraminidase (NA)
MNPNQKIITIGSTCMTIGMANLILQIGNIISIWVSHSIQIGNQSQIETCNQSVITYENNTWVNQTYVNISNTNFAARQSVASVKLAGNSSLCPVSGWAIYSKDNSVRIGSKGDVFVIREPFISCSPLECRTFFLTQGALLNDKHSNGTIKDRSPYRTLMSCPIGEVPSPYNSRFESVAWSASACHDGTNWLTIGISGPDSGAVAVLKYNGIITDTIKSWRNNILRTQESECACVNGSCFTIMTDGPSDGQASYKIFRIEKGKIIKSVEMKAPNYHYEECSCYPDSSEITCVCRDNWHGSNRPWVSFNQNLEYQMGYICSGVFGDNPRPNDKTGSCGPVSSNGANGVKGFSFKYGNGVWIGRTKSISSRKGFEMIWDPNGWTGTDNKFSIKQDIVGINEWSGYSGSFVQHPELTGLDCIRPCFWVELIRGRPEENTIWTSGSSISFCGVDSDTVGWSWPDGAELPFTIDK

SEQ ID NO: 14217 - protein, 469 aa, Artificial Sequence
  FLUAV/H1N1/A/Guangdong-Maonan/SWL1536/2019__EPI1542569 neuraminidase (NA)
MNPNQKIITIGSICMTIGMANLILQIGNIISIWVSHSIQIGNQSQIETCNKNVITYENNTWVNQTYVNISNTNSAARQSVASVKLAGNSSLCPVSGWAIYSKDNSVRIGSKGDVFVIREPFISCSPLECRTFFLTQGALLNDKHSNGTIKDRSPYRTLMSCPIGEVPSPYNSRFESVAWSASACHDGTNWLTIGISGPDSGAVAVLKYNGIITDTIKSWRNNILRTQESECACVNGSCFTIMTDGPSDGQASYKIFRIEKGKIIKSVEMKAPNYHYEECSCYPDSSEITCVCRDNWHGSNRPWVSFNQNLEYQMGYICSGVFGDNPRPNDKTGSCGPVSSNGANGVKGFSFKYGNGVWIGRTKSISSRKGFEMIWDPNGWTGTDNKFSKKQDIVGINEWSGYSGSFVQHPELTGLNCIRPCFWVELIRGRPEENTIWTSGSSISFCGVDSDIVGWSWPDGAELPFTIDK

SEQ ID NO: 14218 - protein, 469 aa, Artificial Sequence
  FLUAV/H3N2/A/Singapore/INFIMH-16-0019/2016__EPI1047603 neuraminidase (NA)
MNPNQKIITIGSVSLTISTICFFMQIAILITTVTLHFKQYEFNSPPNNQVMLCEPTIIERNITEIVYLTNTTIEKEICPKPAEYRNWSKPQCGITGFAPFSKDNSIRLSAGGDIWVTREPYVSCDPDKCYQFALGQGTTLNNVHSNNTVRDRTPYRTLLMNELGVPFHLGTKQVCIAWSSSSCHDGKAWLHVCITGDDKNATASFIYNGRLIDSVVSWSKDILRTQESECVCINGTCTVVMTDGNATGKADTKILFIEEGKIVHTSKLSGSAQHVEECSCYPRYPGVRCVCRDNWKGSNRPIVDINIKDHSIVSSYVCSGLVGDTPRKNDSSSSSHCLNPNNEEGGHGVKGWAFDDGNDVWMGRTINETSRLGYETFKVVEGWSNPKSKLQINRQVIVDRGDRSGYSGIFSVEGKSCINRCFYVELIRGRKEETEVLWTSNSIVVFCGTSGTYGTGSWPDGADLNLMHI

SEQ ID NO: 14219 - protein, 469 aa, Artificial Sequence
  FLUAV/H3N2/A/Kansas/14/2017__EPI1146344 neuraminidase (NA)
MNPNQKIITIGSVSLTISTICFFMQIAILITTVTLHFKQYEFNSPPNNQVMLCEPTIIERNITEIVYLTNTTIEREICPKPAEYRNWSKPQCGITGFAPFSKDNSIRLSAGGDIWVTREPYVSCDPDKCYQFALGQGTTINNVHSNNTARDRTPHRTLLMNELGVPFHLGTKQVCIAWSSSSCHDGKAWLHVCITGDDKNATASFIYNGRLVDSVVSWSKDILRTQESECVCINGTCTVVMTDGNATGKADTKILFIEEGKIVHTSKLSGSAQHVEECSCYPRYPGVRCVCRDNWKGSNRPIVDINIKDHSIVSSYVCSGLVGDTPRKTDSSSSSHCLNPNNEKGGHGVKGWAFDDGNDVWMGRTINETSRLGYETFKVVEGWSNPKSKLQINRQVIVDRGDRSGYSGIFSVEGKSCINRCFYVELIRGRKEETEVLWTSNSIVVFCGTSGTYGTGSWPDGADLNLMHI

SEQ ID NO: 14220 - protein, 469 aa, Artificial Sequence
  FLUAV/H3N2/A/Kansas/14/2017-CDC-LV24A__EPI1444881 neuraminidase (NA)
MNPNQKIITIGSVSLTISTICFFMQIAILITTVTLHFKQYEFNSPPNNQVMLCEPTIIERNITEIVYLTNTTIEREICPKPAEYRNWSKPQCGITGFAPFSKDNSIRLSAGGDIWVTREPYVSCDPDKCYQFALGQGTTINNVHSNNTARDRTPHRTLLMNELGVPFHLGTKQVCIAWSSSSCHDGKAWLHVCITGDDKNATASFIYNGRLVDSVVSWSKDILRTQESECVCINGTCTVVMTDGNATGKADTKILFIEEGKIVHTSKLSGSAQHVEECSCYPRYPGVRCVCRDNWKGSNRPIVDINIKDHSIVSSYVCSGLVGDTPRKTDNSSSSHCLNPNNEKGGHGVKGWAFDDGNDVWMGRTINETSRLGYETFKVVEGWSNPKSKLQINRQVIVDRGDRSGYSGIFSVEGKSCINRCFYVELIRGRKEETEVLWTSNSIVVFCGTSGTYGTGSWPDGADLNLMHI

SEQ ID NO: 14221 - protein, 469 aa, Artificial Sequence
  FLUAV/H3N2/A/Switzerland/8060/2017__EPI1154879 neuraminidase (NA)
MNPNQKIITIGSVSLTISTICFFMQIAILITTVTLHFKQYEFNSPPNNQVMLCEPTIIERNITEIVYLTNTTIEKEICPKPAEYRNWSKPQCGITGFAPFSKDNSIRLSAGGDIWVTREPYVSCDPDKCYQFALGQGTTLNNVHSNNTVRDRTPYRTLLMNELGVPFHLGTKQVCMAWSSSSCHDGKAWLHVCVTGDDKNATASFIYNGRLVDSVVSWSKDILRTQESECVCINGTCTVVMTDGNATGKADTKILFIEEGKIVHTSKLSGSAQHVEECSCYPRYPGVRCVCRDNWKGSNRPIVDINIKDHSIVSSYVCSGLVGDTPRKSDSSSSSHCLNPNNEEGGHGVKGWAFDDGNDVWMGRTINETSRLGYETFKVVEGWSNSKSKLQINRQVIVDRGDRSGYSGIFSVEGKSCINRCFYVELIRGRKEETEVLWTSNSIVVFCGTSGTYGTGSWPDGADLNLMHI

SEQ ID NO: 14222 - protein, 469 aa, Artificial Sequence
  FLUAV/H3N2/A/Switzerland/8060/2017(H3N2)-CDC-LV21A__EPI1364258 neuraminidase (NA)
MNPNQKIITIGSVSLTISTICFFMQIAILITTVTLHFKQYEFNSPPNNQVMLCEPTIIERNITEIVYLTNTTIEKEICPKPAEYRNWSKPQCGITGFAPFSKDNSIRLSAGGDIWVTREPYVSCDPDKCYQFALGQGTTLNNVHSNNTVRDRTPYRTLLMNELGVPFHLGTKQVCMAWSSSSCHDGKAWLHVCVTGDDKNATASFIYNGRLVDSVVSWSKDILRTQESECVCINGTCTVVMTDGNATGKADTKILFIEEGKIVHTSKLSGSAQHVEECSCYPRYPGVRCVCRDNWKGSNRPIVDINIKDHSIVSSYVCSRLVGDTPRKSDSSSSSHCLNPNNEEGGHGVKGWAFDDGNDVWMGRTINETSRLGYETFKVVEGWSNSKSKLQINRQVIVDRGDRSGYSGIFSVEGKSCINRCFYVELIRGRKEETEVLWTSNSIVVFCGTSGTYGTGSWPDGADLNLMHI

SEQ ID NO: 14223 - protein, 469 aa, Artificial Sequence
  FLUAV/H3N2/A/Hong Kong/2671/2019__EPI1543099 neuraminidase (NA)
MNPNQKIITIGSVSLTISTICFFMQIAILITTVTLHFKQYEFNSPPNNQVMLCEPTIIERNITEIVYLTNTTIEKEICPKPAEYRNWSKPQCGITGFAPFSKDNSIRLSAGGDIWVTREPYVSCDLDKCYQFALGQGTTLNNVHSNNTVRDRTPYRTLLMNELGVPFHLGTKQVCIAWSSSSCHDGKAWLHVCITGDDKNATASFIYNGRLVDSVVSWSNDILRTQESECVCINGTCTVVMTDGNATGKADTKILFIEEGKIVHTSKLSGSAQHVEECSCYPRYPGVRCVCRDNWKGSNRPIIDINIKDHSIVSSYVCSGLVGDTPRKSDSSSSSHCLNPNNEEGGHGVKGWAFDDGNDVWMGRTINETSRLGYETFKVVEGWSNPKSKLQINRQVIVDRGDRSGYSGIFSVEGKSCINRCFYVELIRGRKEETEVLWTSNSIVVFCGTSGTYGTGSWPDGADLNLMHT

SEQ ID NO: 14224 - protein, 469 aa, Artificial Sequence
  FLUAV/H3N2/A/Hong Kong/45/2019__EPI1691929 neuraminidase (NA)
MNPNQKIITIGSVSLTISTICFFMQIAILITTVTLHFKQYEFNSLPNNQVMLCEPTIIERNITEIVYLTNTTIEKEICPKPAEYRNWSKPQCGITGFAPFSKDNSIRLSAGGDIWVTREPYVSCDLDKCYQFALGQGTTLNNVHSNNTVRDRTPYRTLLMNELGVPFHLGTKQVCIAWSSSSCHDGKAWLHVCITGDDKNATASFIYNGRLVDSVVSWSNDILRTQESECVCINGTCTVVMTDGNATGKADTKILFIEEGKIVHTSKLSGSAQHVEECSCYPRYPGVRCVCRDNWKGSNRPIIDINIKDHSIVSSYVCSGLVGDTPRKSDSSSSSHCLNPNNEEGGHGVKGWAFDDGNDVWMGRTINETSRLGYETFKVVEGWSNPKSKLQINRQVIVDRGDRSGYSGIFSVEGKSCINRCFYVELIRGRKEETEVLWTSNSIVVFCGTSGTYGTGSWPDGADLNLMHI

SEQ ID NO: 14225 - protein, 469 aa, Artificial Sequence
  FLUAV/H3N2/A/South Australia/34/2019__EPI1387330 neuraminidase (NA)
MNPNQKIITIGSVSLTISTICFFMQIAILITTVTLHFKQYEFNSPPNNQVMLCEPTIIERNITEIVYLTNTTIEKEICPKPAEYRNWSKPQCGITGFAPFSKDNSIRLSAGGDIWVTREPYVSCDLDKCYQFALGQGTTLNNVHSNNTVRDRTPYRTLLMNELGVPFHLGTKQVCIAWSSSSCHDGKAWLHVCITGDDKNATASFIYNGRLVDSVVSWSNDILRTQESECVCINGTCTVVMTDGNATGKADTKILFIEEGKIVHTSKLSGSAQHVEECSCYPRYPGVRCVCRDNWKGSNRPIIDINIKDHSIVSRYVCSGLVGDTPRKSDSSSSSHCLNPNNEKGGHGVKGWAFDDGNDVWMGRTINETSRLGYETFKVVEGWSNPKSKLQINRQVIVDRGDRSGYSGIFSVEGKSCINRCFYVELIRGRKEETEVLWTSNSIVVFCGTSGTYGTGSWPDGADLNLMHI

SEQ ID NO: 14226 - protein, 465 aa, Artificial Sequence
  FLUAV/H7N9/A/chicken/Zhejiang/C483/2013(H7N9)__AGN69396.1 neuraminidase (NA)
MNPNQKILCTSATAIIIGAIAVLIGIANLGLNIGLHLKPGCNCSHSQPETTNTSQTIINNYYNETNITNIQMEERTSRNFNNLTKGLCTINSWHIYGKDNAVRIGESSDVLVTREPYVSCDPDECRFYALSQGTTIRGKHSNGTIHDRSQYRALISWPLSSPPTVYNSRVECIGWSSTSCHDGKSRMSICISGPNNNASAVVWYNRRPVAEINTWARNILRTQESECVCHNGVCPVVFTDGSATGPADTRIYYFKEGKILKWESLTGTAKHIEECSCYGERTGITCTCRDNWQGSNRPVIQIDPVAMTHTSQYICSPVLTDNPRPNDPNIGKCNDPYPGNNNNGVKGFSYLDGANTWLGRTISTASRSGYEMLKVPNALTDDRSKPIQGQTIVLNADWSGYSGSFMDYWAEGDCYRACFYVELIRGRPKEDKVWWTSNSIVSMCSSTEFLGQWNWPDGAKIEYFL

SEQ ID NO: 14227 - protein, 470 aa, Artificial Sequence
  FLUAV/H10N8/A/Jiangxi/IPB13/2013(H10N8)__AHK10769.1 neuraminidase (NA)
MNPNQKIITIGSVSLGLVILNILLHIVSITVTVLVLPGNGNNESCNETVIREYNETVRVEKVTQWHNTNVIEYIERPENDHFMNNTEALCDAKGFAPFSKDNGIRIGSRGHVFVIREPFVSCSPTECRTFFLTQGSLLNDKHSNGTVKDRSPYRTLMSVEIGQSPNVYQARFEAVAWSATACHDGKKWMTIGVTGPDAKAVAVVHYGGIPTDVINSWAGDILRTQESSCTCIQGECFWVMTDGPANRQAQYRAFKAKQGKIVGQAEISFNGGHIEECSCYPNEGKVECVCRDNWTGTNRPVLVISPDLSYRVGYLCAGLPSDTPRGEDSQFTGSCTSPMGNQGYGVKGFGFRQGNDVWMGRTISRTSRSGFEILKVRNGWVQNSKEQIKRQVVVDNLNWSGYSGSFTLPAELTKRNCLVPCFWVEMIRGNPEEKTIWTSSSSIVMCGVDHEIADWSWHDGAILPFDIDKM

SEQ ID NO: 14228 - protein, 466 aa, Artificial Sequence
  FLUBV/H0N0/B/Colorado/06/2017__EPI1001930 neuraminidase (NA)
MLPSTIQTLTLFLTSGGVLLSLYVSASLSYLLYSDILLKFSPTEITAPTMPLDCANASNVQAVNRSATKGVTLLLPEPEWTYPRLSCPGSTFQKALLISPHRFGETKGNSAPLIIREPFVACGPNECKHFALTHYAAQPGGYYNGTRGDRNKLRHLISVKLGKIPTVENSIFHMAAWSGSACHDGKEWTYIGVDGPDNNALLKVKYGEAYTDTYHSYANNILRTQESACNCIGGNCYLMITDGSASGVSECRFLKIREGRIIKEIFPTGRVKHTEECTCGFASNKTIECACRDNRYTAKRPFVKLNVETDTAEIRLMCTDTYLDTPRPNDGSITGPCESDGDKGSGGIKGGFVHQRMKSKIGRWYSRTMSQTERMGMGLYVKYGGDPWADSDALAFSGVMVSMKEPGWYSFGFEIKDKKCDVPCIGIEMVHDGGKETWHSAATAIYCLMGSGQLLWDTVTGVDMAL

SEQ ID NO: 14229 - protein, 466 aa, Artificial Sequence
  FLUBV/H0N0/B/Washington/02/2019__EPI1368872 neuraminidase (NA)
MLPSTIQTLTLFLTSGGVLLSLYVSASLSYLLYSDILLKFSPTEITAPTMPLDCANASNVQAVNRSATKGVTLLLPEPEWTYPRLSCPGSTFQKALLISPHRFGETKGNSAPLIIREPFVACGPNECKHFALTHYAAQPGGYYNGTRGDRNKLRHLISVKLGKIPTVENSIFHMAAWSGSACHDGKEWTYIGVDGPDNNALLKVKYGEAYTDTYHSYANNILRTQESACNCIGGNCYLMITDGSASGVSECRFLKIREGRIIKEIFPTGRVKHTEECTCGFASNKTIECACRDNRYTAKRPFVKLNVETDTAEIRLMCTDTYLDTPRPNDGSITGPCESDGDKGSGGIKGGFVHQRMKSKIGRWYSRTMSKTERMGMGLYVKYGGDPWADSDALTFSGVMVSMKEPGWYSFGFEIKDKKCDVPCIGIEMVHDGGKETWHSAATAIYCLMGSGQLLWDTVTGVDMAL

SEQ ID NO: 14230 - RNA, 1701 nt, Artificial Sequence
  FLUAV/H1N1/A/California/7/2009__ACP41953 hemagglutinin CDS gc (HA)
augaaggccauccuggugguccuccuguacaccuucgccaccgcgaacgccgacacgcugugcaucggcuaccacgccaacaacagcaccgacaccguggacaccgugcucgagaagaacgucacggugacccacuccgugaaccugcuggaggacaagcacaacgggaagcucugcaagcugcggggcgucgccccgcugcaccucgggaagugcaacaucgccggcuggauccuggggaacccggagugcgagagccuguccaccgcgagcuccuggagcuacaucguggagacccccuccagcgacaacggcacgugcuaccccggcgacuucaucgacuacgaggagcuccgcgagcagcuguccagcguguccagcuucgagcgguucgagaucuuccccaagaccuccagcuggccgaaccacgacuccaacaagggggucaccgccgccugcccccacgccggcgccaagagcuucuacaagaaccugaucuggcucgugaagaaggggaacuccuaccccaagcugagcaaguccuacaucaacgacaagggcaaggaggugcugguccucugggggauccaccaccccagcaccagcgcggaccagcagucccuguaccagaacgccgacgccuacguguucgugggcagcucccgcuacagcaagaaguucaagccggagaucgccauccggcccaagguccgcgaccaggagggccgcaugaacuacuacuggacccugguggagcccggggacaagaucaccuucgaggcgaccggcaaccucguggucccccgguacgccuucgccauggagcgcaacgccggguccggcaucaucaucagcgacacgccggugcacgacugcaacacgaccugccagacccccaagggcgccaucaacaccucccugcccuuccagaacauccaccccaucaccaucgggaagugcccgaaguacgucaagagcaccaagcugcggcucgcgaccggccugcgcaacauccccuccauccagagccgggggcuguucggcgccaucgccggguucaucgagggcggcuggacggggaugguggacggcugguacggguaccaccaccagaacgagcagggcagcggguacgccgccgaccucaaguccacgcagaacgcgaucgacgagaucaccaacaaggugaacagcgucaucgagaagaugaacacccaguucaccgccgugggcaaggaguucaaccaccuggagaagcggaucgagaaccugaacaagaaggucgacgacggcuuccucgacaucuggacguacaacgccgagcugcuggugcuccuggagaacgagcgcacccuggacuaccacgacuccaacgugaagaaccucuacgagaagguccggagccagcugaagaacaacgccaaggagaucgggaacggcugcuucgaguucuaccacaagugcgacaacacgugcauggaguccgugaagaacgggaccuacgacuaccccaaguacagcgaggaggccaagcugaaccgcgaggagaucgacggcgugaagcucgaguccacccggaucuaccagauccuggcgaucuacagcaccgucgccagcucccuggugcucguggucagccugggggccaucuccuucuggaugugcagcaacggcucccugcagugccgcaucugcaucuga

SEQ ID NO: 14231 - RNA, 1701 nt, Artificial Sequence
  FLUAV/H1N1/A/Michigan/45/2015__EPI662594 hemagglutinin CDS gc (HA)
augaaggccauccuggugguccuccuguacaccuucaccacggccaacgcggacacccugugcaucggcuaccacgccaacaacagcaccgacaccguggacacggugcucgagaagaacgucaccgugacccacuccgugaaccugcuggaggacaagcacaacgggaagcucugcaagcugcgcggcgucgcgccccugcaccucgggaagugcaacaucgccggcuggauccuggggaacccggagugcgagagccuguccaccgccagcuccuggagcuacaucguggagacguccaacagcgacaacgggaccugcuaccccggcgacuucaucaacuacgaggagcuccgggagcagcuguccagcguguccagcuucgagcgcuucgagaucuuccccaagaccuccagcuggcccaaccacgacuccaacaagggcgucaccgccgccugcccgcacgccggcgccaagagcuucuacaagaaccugaucuggcucgugaagaaggggaacuccuaccccaagcugaaccagagcuacaucaacgacaagggcaaggaggugcugguccucugggggauccaccaccccuccacgaccgcggaccagcagagccuguaccagaacgccgacgccuacguguucgugggcaccagccgguacuccaagaaguucaagcccgagaucgccacccgcccgaagguccgggaccaggagggccgcaugaacuacuacuggacgcugguggagcccggggacaagaucaccuucgaggccaccggcaaccucguggucccccgguacgcguucaccauggagcgcaacgccgggagcggcaucaucaucuccgacacgcccgugcacgacugcaacacgaccugccagaccccggagggcgccaucaacaccagccugcccuuccagaacauccaccccaucaccaucgggaagugccccaaguacgugaaguccaccaagcugcggcucgccaccggccugcgcaacgucccgagcauccagucccgggggcuguucggcgccaucgcgggguucaucgagggcggcuggacggggaugguggacggcugguacggguaccaccaccagaacgagcagggcagcggguacgccgccgaccucaaguccacccagaacgccaucgacaagaucaccaacaaggugaacagcgucaucgagaagaugaacacccaguucacggccgugggcaaggaguucaaccaccuggagaagcgcaucgagaaccugaacaagaaggucgacgacggcuuccucgacaucuggaccuacaacgcggagcugcuggugcuccuggagaacgagcggacccuggacuaccacgacuccaacgugaagaaccucuacgagaagguccgcaaccagcugaagaacaacgccaaggagaucgggaacggcugcuucgaguucuaccacaagugcgacaacacgugcauggagagcgugaagaacgggaccuacgacuaccccaaguacuccgaggaggccaagcugaaccgggagaagaucgacggcgugaagcucgagagcacccgcaucuaccagauccuggccaucuacuccaccgucgccagcucccuggugcucguggucagccugggggcgaucuccuucuggaugugcagcaacggcagccugcagugccggaucugcaucuga

SEQ ID NO: 14232 - RNA, 1701 nt, Artificial Sequence
  FLUAV/H1N1/A/Netherlands/602/2009__ACQ45338 hemagglutinin CDS gc (HA)
augaaggccauccuggugguccuccuguacaccuucgccaccgcgaacgccgacacgcugugcaucggcuaccacgccaacaacagcaccgacaccguggacaccgugcucgagaagaacgucacggugacccacuccgugaaccugcuggaggacaagcacaacgggaagcucugcaagcugcggggcgucgccccgcugcaccucgggaagugcaacaucgccggcuggauccuggggaacccggagugcgagagccuguccaccgcgagcuccuggagcuacaucguggagaccuccagcuccgacaacggcacgugcuaccccggcgacuucaucgacuacgaggagcuccgcgagcagcugagcuccgugagcuccuucgagcgguucgagaucuuccccaagaccagcuccuggcccaaccacgacagcaacaagggggucaccgccgccugcccgcacgccggcgcgaaguccuucuacaagaaccugaucuggcucgugaagaaggggaacagcuaccccaagcuguccaagagcuacaucaacgacaagggcaaggaggugcugguccucugggggauccaccaccccagcaccuccgccgaccagcagagccuguaccagaacgccgacgccuacguguucgugggcuccagccgcuacuccaagaaguucaagcccgagaucgccauccggccgaagguccgcgaccaggagggccggaugaacuacuacuggacgcugguggagcccggggacaagaucaccuucgaggcgaccggcaaccucguggucccccgcuacgccuucgccauggagcggaacgccgggagcggcaucaucaucuccgacacccccgugcacgacugcaacacgaccugccagaccccgaagggcgccaucaacaccagccugcccuuccagaacauccaccccaucacgaucgggaagugccccaaguacgugaaguccaccaagcugcgccucgcgaccggccugcggaacgucccgagcauccagucccgcgggcuguucggcgccaucgccggguucaucgagggcggcuggaccgggaugguggacggcugguacggguaccaccaccagaacgagcagggcagcggguacgccgccgaccucaaguccacgcagaacgcgaucgacgagaucaccaacaaggugaacagcgucaucgagaagaugaacacccaguucaccgccgugggcaaggaguucaaccaccuggagaagcggaucgagaaccugaacaagaaggucgacgacggcuuccucgacaucuggacguacaacgccgagcugcuggugcuccuggagaacgagcgcacccuggacuaccacgacuccaacgugaagaaccucuacgagaagguccggagccagcugaagaacaacgccaaggagaucgggaacggcugcuucgaguucuaccacaagugcgacaacaccugcauggaguccgugaagaacgggaccuacgacuaccccaaguacagcgaggaggccaagcugaaccgcgaggagaucgacggcgugaagcucgaguccacgcggaucuaccagauccuggcgaucuacagcaccgucgccagcucccuggugcucguggucagccugggggccaucuccuucuggaugugcagcaacggcucccugcagugccgcaucugcaucuga

SEQ ID NO: 14233 - RNA, 1701 nt, Artificial Sequence
  FLUAV/H3N2/A/Hong Kong/4801/2014__EPI643118 hemagglutinin CDS gc (HA)
augaagaccaucaucgcccugagcuacauccucugccugguguucgcccagaagauccccggcaacgacaacuccaccgcgacgcugugccucgggcaccacgccgucccgaacggcaccaucgugaagaccaucaccaacgaccgcaucgaggugacgaacgccaccgagcugguccagaacagcuccaucggggagaucugcgacagcccccaccagauccuggacggcgagaacugcacccucaucgacgcccugcugggggacccccagugcgacggcuuccagaacaagaagugggaccucuucguggagcgguccaaggccuacagcaacugcuaccccuacgacgugccggacuacgcgucccugcgcagccuggucgccuccagcggcacccucgaguucaacaacgaguccuucaacuggacgggggugacccagaacggcaccagcuccgccugcauccggcgcagcuccagcuccuucuucagccggcugaacuggcugacccaccucaacuacaaguaccccgcccugaacgugacgaugcccaacaacgagcaguucgacaagcuguacaucuggggcguccaccaccccgggaccgacaaggaccagaucuucccguacgcgcaguccagcgggcgcaucaucgugagcaccaagcggucccagcaggccgugauccccaacaucggcagccgcccccggauccgcgacaucccgucccggaucagcaucuacuggaccaucgucaagccgggcgacauccuccugaucaacuccacggggaaccugaucgccccgcgcggcuacuucaagcuccggagcgggaaguccagcaucaugcgcuccgacgcccccaucggcaagugcaagagcgagugcaucacccccaacggcuccaucccgaacgacaagcccuuccagaacgugaaccggaucaccuacggggccugcccccgcuacgugaagcacagcacccugaagcuggcgacgggcaugcggaacguccccgagaagcagacccgcgggaucuucggcgccaucgccggguucaucgagaacggcugggagggcaugguggacgggugguacggcuuccggcaccagaacuccgaggggcgcggccaggccgccgaccucaagagcacccaggcggccaucgaccagaucaacgggaagcugaaccggcugaucggcaagaccaacgagaaguuccaccagaucgagaaggaguucuccgagguggagggccgcauccaggaccucgagaaguacgucgaggacacgaagaucgaccuguggagcuacaacgccgagcugcucguggcccuggagaaccagcacaccaucgaccugaccgacuccgagaugaacaagcucuucgagaagaccaagaagcagcugcgcgagaacgccgaggacauggggaacggcugcuucaagaucuaccacaagugcgacaacgcgugcaucgggagcauccggaacggcacguacgaccacaacguguaccgcgacgaggcccugaacaaccgguuccagaucaagggggucgagcucaaguccggcuacaaggacuggauccuguggaucagcuucgccaucagcugcuuccugcucugcguggcccugcugggcuucaucaugugggccugccagaaggggaacauccgcugcaacaucugcaucuga

SEQ ID NO: 14234 - RNA, 1758 nt, Artificial Sequence
  FLUBV/H0N0/B/Brisbane/60/2008__FJ766840 hemagglutinin CDS gc (HA)
augaaggccaucaucgugcugcucauggucgugaccagcaacgccgaccggaucugcaccggcaucacguccagcaacuccccgcacguggucaagaccgcgacccagggggaggugaacgugaccggcgucaucccgcugacgaccacccccaccaagagccacuucgccaaccugaaagggacggagacccgcggcaagcucugccccaagugccugaacugcaccgaccuggacguggcccucgggcggcccaagugcaccggcaaaaucccguccgcccgcgugagcauccugcacgagguccggcccgugacguccggcugcuuccccaucaugcacgaccgcaccaagauccggcagcugcccaaccuccugcgcggguacgagcacauccggcugagcacccacaacgugaucaacgccgagaacgcgccgggcgggcccuacaagaucggcaccuccgggagcugccccaacaucacgaacggcaacggcuucuucgccaccauggccugggccguccccaagaacgacaagaacaaaaccgcgaccaacccgcucacgaucgaggugcccuacaucugcaccgagggggaggaccagaucaccguguggggcuuccacuccgacaacgagacccagauggccaagcuguacggggacagcaagccccagaaguucacguccagcgccaacggcgucaccacccacuacgugucccagaucggcggguuccccaaccagaccgaggacggcgggcugccgcagagcggccgcaucguggucgacuacauggugcagaaauccgggaagacgggcaccaucaccuaccagcggggcauccuccugccccagaagguguggugcgccagcgggcgcuccaaggucaucaaaggcagccugccccucaucggggaggccgacugccugcacgagaaguacggcgggcugaacaagagcaagcccuacuacaccggcgagcacgcgaaagccaucggcaacugcccgaucugggugaagacgccccucaagcuggccaacgggaccaaguaccggccgcccgccaaacugcucaaggagcgcggcuucuucggggccaucgcgggcuuccuggagggcgggugggagggcaugaucgccggguggcacggcuacaccucccacggggcccacggcguggccgucgccgcggaccucaagagcacccaggaggccaucaacaaaaucacgaagaaccugaacucccugagcgagcuggaggugaagaaccuccagcggcuguccggcgccauggacgagcugcacaacgagauccucgagcuggacgagaaggucgacgaccugcgcgccgacaccaucagcucccagaucgagcucgccgugcugcugagcaacgaggggaucaucaacuccgaggacgagcaccuccuggcgcuggagcggaaacucaagaagaugcugggccccagcgccguggagaucgggaacggcugcuucgagaccaagcacaagugcaaccagaccugccuggaccgcaucgccgccgggaccuucgacgcgggcgaguucucccuccccacguucgacagccugaacaucaccgccgccucccugaacgacgacggccuggacaaccacaccauccuccuguacuacagcaccgccgccuccagccuggcggucacgcucaugaucgccaucuucgugguguacauggucucccgggacaacgugagcugcuccaucugccuguga

SEQ ID NO: 14235 - RNA, 1755 nt, Artificial Sequence
  FLUBV/H0N0/B/Phuket/3073/2013__EPI540671 hemagglutinin CDS gc (HA)
augaaggccaucaucgugcugcucauggucgugaccagcaacgccgaccgcaucugcaccggcaucacguccagcaacuccccgcacguggucaagaccgcgacccagggggaggugaacgugaccggcgucaucccccugacgaccacccccaccaagagcuacuucgccaaccugaaggggacgcggacccgcggcaaacucugccccgacugccugaacugcaccgaccuggacguggcccucgggcggcccaugugcgugggcaccacgccguccgccaaggccagcauccugcacgagguccgccccgugaccuccggcugcuuccccaucaugcacgaccggaccaagauccgccagcugcccaaccuccugcggggguacgagaagauccgccugagcacccagaacgugaucgacgcggagaaagccccgggcgggcccuaccggcucggcacguccgggagcugccccaacgccaccuccaagaucggcuucuucgccaccauggcgugggccguccccaaggacaacuacaagaacgccaccaacccgcugacgguggaggugcccuacaucugcaccgagggcgaggaccagaucaccgucuggggguuccacagcgacaacaagacccagaugaaaucccuguacggcgacagcaacccccagaaguucacguccagcgccaacggggugaccacccacuacgugucccagaucggcgacuuccccgaccagaccgaggacggcgggcucccgcagagcggccgcaucgucguggacuacaugaugcagaagcccgggaagacgggcaccaucguguaccagcggggcguccugcugccccagaaaguguggugcgccuccgggcgcagcaaggugaucaagggcagccucccccugaucggggaggcggacugccugcacgaggaguacggcgggcucaacaaguccaaaccguacuacaccggcaagcacgccaaggccaucgggaacugccccaucugggucaagaccccgcugaaacuggccaacggcacgaaauaccggcccccggccaagcuccugaaggagcgcggcuucuucggggcgaucgccggcuuccuggagggcgggugggaggggaugaucgccggcuggcacggcuacaccagccacggggcccacggcguggccgucgcggccgaccucaaguccacccaggaggccaucaacaaaaucaccaagaaccugaacagccuguccgagcucgaggugaagaaccugcagcggcugagcggggccauggacgagcuccacaacgagauccuggagcuggacgagaagguggacgaccuccgcgccgacacgaucuccagccagaucgagcuggcgguccugcucuccaacgagggcaucaucaacagcgaggacgagcaccuccuggcccucgagcggaaacugaagaagaugcugggccccuccgccguggacaucgggaacggcugcuucgagaccaagcacaagugcaaccagaccugccucgaccgcaucgccgcggggaccuucaacgccggcgaguucagccugcccaccuucgacucccugaacaucacggccgccagccugaacgacgacgggcucgacaaccacaccauccugcuguacuacuccaccgccgcgagcucccucgccgugacccugaugcuggccaucuucaucgucuacauggugagccgggacaacguguccugcagcaucugccucuga

SEQ ID NO: 14236 - RNA, 1695 nt, Artificial Sequence
  FLUAV/H1N1/A/Brisbane/02/2018__EPI1212834 hemagglutinin CDS gc (HA)
augaaggccauccuggugguccuccuguacaccuucaccacggccaacgcggacacccugugcaucggcuaccacgccaacaacagcaccgacaccguggacacggugcucgagaagaacgucaccgugacccacuccgugaaccugcuggaggacaagcacaacgggaagcucugcaagcugggcggggucgcgccccugcaccucggcaagugcaacaucgccggguggauccugggcaacccggagugcgagagccuguccaccgcccgcagcugguccuacaucguggagacgagcaacuccgacaacgggaccugcuaccccggcgacuucaucaacuacgaggagcuccgggagcagcugagcuccgugagcuccuucgagcgcuucgagaucuuccccaagaccagcuccuggcccaaccacgacagcaacaagggcgucaccgccgccugcccgcacgccggggccaaguccuucuacaagaaccugaucuggcucgugaagaagggcaacagcuaccccaagcugaaccagacguacaucaacgacaaggggaaggaggugcugguccucuggggcauccaccacccgcccaccaccgcggaccagcagucccuguaccagaacgccgacgccuacguguucgugggcaccagccgguacuccaagaaguucaagcccgagaucgccacgcgccccaagguccgggaccgcgaggggcggaugaacuacuacuggacccugguggagcccggcgacaagaucaccuucgaggccaccgggaaccucguggucccccgcuacgcguucacgauggagcggaacgccggcagcggcaucaucaucagcgacaccccggugcacgacugcaacacgaccugccagaccgccgagggggccaucaacaccucccugcccuuccagaacgugcaccccgucaccaucggcaagugccccaaguacgucaagagcaccaagcugcgccucgccacggggcugcggaacgugccguccauccagagccgcggccuguucggggcgaucgccggcuucaucgagggcggguggaccggcaugguggacgggugguacggcuaccaccaccagaacgagcagggguccggcuacgccgccgaccucaagagcaacgccaucgacaagaucaccaacaaggugaacuccgucaucgagaagaugaacacccaguucacggcggugggcaaggaguucaaccaccuggagaagcggaucgagaaccugaacaagaagguggacgacggguuccucgacaucuggaccuacaacgccgagcugcugguccuccuggagaacgagcgcacccuggacuaccacgacagcaacgugaagaaccucuacgagaaggugcggaaccagcugaagaacaacgccaaggagaucggcaacgggugcuucgaguucuaccacaagugcgacaacacgugcauggaguccgucaagaacggcaccuacgacuaccccaaguacagcgaggaggccaagcugaaccgcgagaagaucgacggggugaagcucgaguccacccggaucuaccagauccuggccaucuacagcaccguggcguccagccugguccucguggugucccugggcgccaucagcuucuggaugugcuccaacggcagccugcagugccgcaucugcaucuga

SEQ ID NO: 14237 - RNA, 1695 nt, Artificial Sequence
  FLUAV/H1N1/A/Brisbane/02/2018__EPI1671767 hemagglutinin CDS gc (HA)
augaaggccauccuggugguccuccuguacaccuucaccacggccaacgcggacacccugugcaucggcuaccacgccaacaacagcaccgacaccguggacacggugcucgagaagaacgucaccgugacccacuccgugaaccugcuggaggacaagcacaacgggaagcucugcaagcugggcggggucgcgccccugcaccucggcaagugcaacaucgccggguggauccugggcaacccggagugcgagagccuguccaccgcccgcagcugguccuacaucguggagacgagcaacuccgacaacgggaccugcuaccccggcgacuucaucaacuacgaggagcuccgggagcagcugagcuccgugagcuccuucgagcgcuucgagaucuuccccaagaccagcuccuggcccaaccacgacagcaacaagggcgucaccgccgccugcccgcacgccggggccaaguccuucuacaagaaccugaucuggcucgugaagaagggcaacagcuaccccaagcugaaccagacguacaucaacgacaaggggaaggaggugcugguccucuggggcauccaccacccgcccaccaccgcggaccagcagucccuguaccagaacgccgacgccuacguguucgugggcaccagccgguacuccaagaaguucaagcccgagaucgccacgcgccccaagguccgggaccaggaggggcgcaugaacuacuacuggacccugguggagcccggcgacaagaucaccuucgaggccaccgggaaccucguggucccccgguacgcguucacgauggagcgcaacgccggcagcggcaucaucaucagcgacaccccggugcacgacugcaacacgaccugccagaccgccgagggggccaucaacaccucccugcccuuccagaacgugcaccccgucaccaucggcaagugccccaaguacgucaagagcaccaagcugcggcucgccacggggcugcgcaacgugccguccauccagagccggggccuguucggggcgaucgccggcuucaucgagggcggguggaccggcaugguggacgggugguacggcuaccaccaccagaacgagcagggguccggcuacgccgccgaccucaagagcaacgccaucgacaagaucaccaacaaggugaacuccgucaucgagaagaugaacacccaguucacggcggugggcaaggaguucaaccaccuggagaagcgcaucgagaaccugaacaagaagguggacgacggguuccucgacaucuggaccuacaacgccgagcugcugguccuccuggagaacgagcggacccuggacuaccacgacagcaacgugaagaaccucuacgagaaggugcgcaaccagcugaagaacaacgccaaggagaucggcaacgggugcuucgaguucuaccacaagugcgacaacacgugcauggaguccgucaagaacggcaccuacgacuaccccaaguacagcgaggaggccaagcugaaccgggagaagaucgacggggugaagcucgaguccacccgcaucuaccagauccuggccaucuacagcaccguggcguccagccugguccucguggugucccugggcgccaucagcuucuggaugugcuccaacggcagccugcagugccggaucugcaucuga

SEQ ID NO: 14238 - RNA, 1695 nt, Artificial Sequence
  FLUAV/H1N1/A/Guangdong-Maonan/SWL1536/2019__EPI1542570 hemagglutinin CDS gc (HA)
augaaggccauccuggugguccuccuguacaccuucaccacggccaacgcggacacccugugcaucggcuaccacgccaacaacagcaccgacaccguggacacggugcucgagaagaacgucaccgugacccacuccgugaaccugcuggaggacaagcacaacgggaagcucugcaagcugcgcggcgucgcgccccugcaccucgggaagugcaacaucgccggcuggauccuggggaacccggagugcgagagccuguccaccgcccggagcugguccuacaucguggagacgagcaacuccgacaacgggaccugcuaccccggcgacuucaucaacuacgaggagcuccgcgagcagcugagcuccgugagcuccuucgagcgguucgagaucuuccccaagaccagcuccuggcccaaccacgacagcgacaagggcgucaccgccgccugcccgcacgccggcgccaaguccuucuacaagaaccugaucuggcucgugaagaaggggaacagcuaccccaagcugaaccagacguacaucaacgacaagggcaaggaggugcugguccucugggggauccaccacccgcccaccaucgcggcccaggagucccuguaccagaacgccgacgccuacguguucgugggcaccagccgcuacuccaagaaguucaagcccgagaucgccacccggcccaagguccgcgaccaggagggccggaugaacuacuacuggacgcugguggagcccggggacaagaucaccuucgaggcgaccggcaaccucguggucccccgcuacgccuucaccauggagcgggacgccgggagcggcaucaucaucagcgacacgccggugcacgacugcaacacgaccugccagacccccgagggcgccaucaacaccucccugcccuuccagaacgugcaccccaucaccaucgggaagugcccgaaguacgucaagagcaccaagcugcgccucgccaccggccugcggaacgugcccuccauccagagccgcgggcuguucggcgcgaucgccggguucaucgagggcggcuggacggggaugguggacggcugguacggguaccaccaccagaacgagcagggcuccggguacgccgccgaccucaagagcaacgccaucgacaagaucaccaacaaggucaacuccgugaucgagaagaugaacacccaguucaccgcggucggcaaggaguucaaccaccuggagaagcggaucgagaaccugaacaagaagguggacgacggcuuccucgacaucuggacguacaacgccgagcugcuggugcuccuggagaacgagcgcacccuggacuaccacgacagcaacgucaagaaccucuacgagaaggugcggaaccagcugaagaacaacgccaaggagaucgggaacggcugcuucgaguucuaccacaagugcgacaacacgugcauggaguccgugaagaacgggaccuacgacuaccccaaguacagcgaggaggccaagcugaaccgcgagaagaucgacggcgucaagcucgaguccacccggaucuaccagauccuggccaucuacagcaccguggcguccagccuggugcucgucgugucccugggggccaucagcuucuggaugugcuccaacggcagccugcagugccgcaucugcaucuga

SEQ ID NO: 14239 - RNA, 1695 nt, Artificial Sequence
  FLUAV/H1N1/A/Guangdong-Maonan/SWL1536/2019__EPI1590725 hemagglutinin CDS gc (HA)
augaaggccauccuggugguccuccuguacaccuucaccacggccaacgcggacacccugugcaucggcuaccacgccaacaacagcaccgacaccguggacacggugcucgagaagaacgucaccgugacccacuccgugaaccugcuggaggacaagcacaacgggaagcucugcaagcugcgcggcgucgcgccccugcaccucgggaagugcaacaucgccggcuggauccuggggaacccggagugcgagagccuguccaccgcccggagcugguccuacaucguggagacgagcaacuccgacaacgggaccugcuaccccggcgacuucaucaacuacgaggagcuccgcgagcagcugagcuccgugagcuccuucgagcgguucgagaucuuccccaagaccagcuccuggcccaaccacgacagcgacaagggcgucaccgccgccugcccgcacgccggcgccaaguccuucuacaagaaccugaucuggcucgugaagaaggggaacagcuaccccaagcugaaccagacguacaucaacgacaagggcaaggaggugcugguccucugggggauccaccacccgcccaccaucgcggugcaggagucccuguaccagaacgccgacgccuacguguucgucggcaccagccgcuacuccaagaaguucaagcccgagaucgccacccggcccaaggugcgcgaccaggagggccggaugaacuacuacuggacgcugguggagcccggggacaagaucaccuucgaggccaccggcaaccucgucgugccccgcuacgcguucaccauggagcgggacgccgggagcggcaucaucaucagcgacacgccggugcacgacugcaacacgaccugccagacccccgagggcgccaucaacaccucccugcccuuccagaacguccaccccaucaccaucgggaagugcccgaaguacgucaagagcaccaagcugcgccucgccaccggccugcggaacgugcccuccauccagagccgcgggcuguucggcgccaucgcgggguucaucgagggcggcuggacggggaugguggacggcugguacggguaccaccaccagaacgagcagggcuccggguacgccgccgaccucaagagcaacgccaucgacaagaucaccaacaaggugaacuccgucaucgagaagaugaacacccaguucaccgccgugggcaaggaguucaaccaccuggagaagcggaucgagaaccugaacaagaagguggacgacggcuuccucgacaucuggacguacaacgcggagcugcugguccuccuggagaacgagcgcacccuggacuaccacgacagcaacgugaagaaccucuacgagaaggugcggaaccagcugaagaacaacgccaaggagaucgggaacggcugcuucgaguucuaccacaagugcgacaacacgugcauggaguccgucaagaacgggaccuacgacuaccccaaguacagcgaggaggccaagcugaaccgcgagaagaucgacggcgugaagcucgaguccacccggaucuaccagauccuggccaucuacagcaccguggccuccagccugguccucguggugucccugggggcgaucagcuucuggaugugcuccaacggcagccugcagugccgcaucugcaucuga

SEQ ID NO: 14240 - RNA, 1701 nt, Artificial Sequence
  FLUAV/H3N2/A/Singapore/INFIMH-16-0019/2016__EPI1106227 hemagglutinin CDS gc (HA)
augaagaccaucaucgcccugagcuacauccucugccugguguucgcccagaagauccccggcaacgacaacuccaccgcgacgcugugccucgggcaccacgccgucccgaacggcaccaucgugaagaccaucaccaacgaccgcaucgaggugacgaacgccaccgagcugguccagaacagcuccaucggggagaucugcgacagcccccaccagauccuggacggcgagaacugcacccucaucgacgcccugcugggggacccccagugcgacggcuuccagaacaagaagugggaccucuucguggagcgguccaaggccuacagcaacugcuaccccuacgacgugccggacuacgcgucccugcgcagccuggucgccuccagcggcacccucgaguucaagaacgaguccuucaacuggacgggggugacccagaacggcaccagcuccgccugcauccgggggagcuccagcuccuucuucagccgccugaacuggcugacccaccucaacuacacguaccccgcccugaacgugaccaugcccaacaaggagcaguucgacaagcuguacaucuggggcguccaccaccccgggaccgacaaggaccagaucuuccucuacgcgcaguccagcggccggaucaccgugagcacgaagcgcucccagcaggccgugaucccgaacaucggcagccggccccgcauccgggacauccccucccgcaucagcaucuacuggaccaucgucaagcccggggacauccugcugaucaacuccaccggcaaccucaucgccccgcggggguacuucaagauccgcagcggcaaguccagcaucaugcgguccgacgcccccaucggcaagugcaagagcgagugcaucacccccaacggguccauccccaacgacaagccguuccagaacgugaaccgcaucacguacggcgccugcccccgguacgugaagcacagcacccugaagcuggcgaccgggaugcgcaacguccccgagaagcagacccggggcaucuucggggccaucgccggcuucaucgagaacggcugggaggggaugguggacggcugguacggguuccgccaccagaacuccgagggccgggggcaggccgccgaccucaagagcacgcaggcggccaucgaccagaucaacggcaagcugaaccgccugaucggcaagaccaacgagaaguuccaccagaucgagaaggaguucuccgagguggaggggcggguccaggaccucgagaaguacguggaggacaccaagaucgaccuguggagcuacaacgccgagcugcucguggcccuggagaaccagcacaccaucgaccugacggacuccgagaugaacaagcuguucgagaagaccaagaagcagcuccgcgagaacgccgaggacaugggcaacgggugcuucaagaucuaccacaagugcgacaacgcgugcaucgagagcauccgcaacgagaccuacgaccacaacgucuaccgggacgaggcccugaacaaccgcuuccagaucaagggcguggagcucaaguccggguacaaggacuggauccuguggaucagcuucgccaucagcugcuuccugcucugcguggcccugcugggcuucaucaugugggccugccagaagggcaacauccggugcaacaucugcaucuga

SEQ ID NO: 14241 - RNA, 1701 nt, Artificial Sequence
  FLUAV/H3N2/A/Singapore/INFIMH-16-0019/2016__EPI1341068 hemagglutinin CDS gc (HA)
augaagaccaucaucgcccugagcuacauccucugccugguguucgcccagaagauccccggcaacgacaacuccaccgcgacgcugugccucgggcaccacgccgucccgaacggcaccaucgugaagaccaucaccaacgaccgcaucgaggugacgaacgccaccgagcugguccagaacagcuccaucggggagaucugcgacagcccccaccagauccuggacggcgagaacugcacccucaucgacgcccugcugggggacccccagugcgacggcuuccagaacaagaagugggaccucuucguggagcgguccaaggccuacagcaacugcuaccccuacgacgugccggacuacgcgucccugcgcagccuggucgccuccagcggcacccucgaguucaagaacgaguccuucaacuggacgggggugacccagaacggcaccagcuccgccugcauccgggggagcuccagcuccuucuucagccgccugaacuggcugacccaccucaacuacaaguaccccgcccugaacgugacgaugcccaacaaggagcaguucgacaagcuguacaucuggggcguccaccaccccgggaccgacaaggaccagaucuucccguacgcgcaguccagcggccggaucaccgugagcaccaagcgcucccagcaggccgugauccccaacaucggcagccggccccgcauccgggggauccccucccgcaucagcaucuacuggacgaucgucaagccgggcgacauccuccugaucaacuccaccgggaaccugaucgcgccccggggcuacuucaagauccgcagcggcaaguccagcaucaugcgguccgacgcccccaucgggaagugcaagagcgagugcaucacccccaacggcuccaucccgaacgacaagcccuuccagaacgugaaccgcaucaccuacggggccugcccccgguacgugaagcacagcacgcucaagcuggccaccggcaugcgcaacguccccgagaagcagacccgggggaucuucggcgccaucgccggcuucaucgagaacgggugggagggcaugguggacgggugguacggcuuccgccaccagaacuccgaggggcggggccaggccgccgaccucaagagcacccaggcggccaucgaccagaucaacggcaagcugaaccgccugaucgggaagacgaacgagaaguuccaccagaucgagaaggaguucuccgagguggagggccggguccaggaccuggagaaguacguggaggacaccaagaucgaccucuggagcuacaacgccgagcugcugguggcccucgagaaccagcacaccaucgaccugaccgacuccgagaugaacaagcuguucgagaagacgaagaagcagcuccgcgagaacgccgaggacauggggaacggcugcuucaagaucuaccacaagugcgacaacgcgugcaucgagagcauccgcaacgagaccuacgaccacaacgucuaccgggacgaggcccugaacaaccgcuuccagaucaaggggguggagcugaaguccggcuacaaggacuggauccucuggaucagcuucgccaucagcugcuuccugcugugcguggcccuccugggcuucaucaugugggccugccagaaggggaacauccggugcaacaucugcaucuga

SEQ ID NO: 14242 - RNA, 1701 nt, Artificial Sequence
  FLUAV/H3N2/A/Singapore/INFIMH-16-0019/2016 NYMC-X-307__EPI1259099 hemagglutinin CDS gc (HA)
augaagaccaucaucgcccugagcuacauccucugccugguguucgcccagaagauccccggcaacgacaacuccaccgcgacgcugugccucgggcaccacgccgucccgaacggcaccaucgugaagaccaucaccaacgaccgcaucgaggugacgaacgccaccgagcugguccagaacagcuccaucggggagaucugcgacagcccccaccagauccuggacggcgagaacugcacccucaucgacgcccugcugggggacccccagugcgacggcuuccagaacaagaagugggaccucuucguggagcgguccaaggccuacagcaacugcuaccccuacgacgugccggacuacgcgucccugcgcagccuggucgccuccagcggcacccucgaguucaagaacgaguccuucaacuggacgggggugacccagaacggcaccagcuccgccugcauccgggggagcuccagcuccuucuucagccgccugaacuggcugacccaccucaacuacaaguaccccgcccugaacgugacgaugcccaacaaggagcaguucgacaagcuguacaucuggggcguccaccaccccgggaccgacaaggaccagaucuucccguacgcgcaguccagcggccggaucaccgugagcaccaagcgcucccagcaggccgugauccccaacaucggcagccggccccgcauccgggggauccccucccgcaucagcaucuacuggacgaucgucaagccgggcgacauccuccugaucaacuccaccgggaaccugaucgcgccccggggcuacuucaagauccgcagcggcaaguccagcaucaugcgguccgacgcccccaucgggaagugcaagagcgagugcaucacccccaacggcuccaucccgaacgacaagcccuuccagaacgugaacaagaucaccuacggggccugcccccgcuacgugaagcacagcacgcucaagcuggccaccggcaugcggaacguccccgagaagcagacccgcgggaucuucggcgccaucgccggcuucaucgagaacgggugggagggcaugguggacgggugguacggcuuccggcaccagaacuccgaggggcgcggccaggccgccgaccucaagagcacccaggcggccaucgaccagaucaacggcaagcugaaccggcugaucgggaagacgaacgagaaguuccaccagaucgagaaggaguucuccgagguggagggccgcguccaggaccuggagaaguacguggaggacaccaagaucgaccucuggagcuacaacgccgagcugcugguggcccucgagaaccagcacaccaucgaccugaccgacuccgagaugaacaagcuguucgagaagacgaagaagcagcuccgggagaacgccgaggacauggggaacggcugcuucaagaucuaccacaagugcgacaacgcgugcaucgagagcauccgcaacgagaccuacgaccacaacgucuaccgcgacgaggcccugaacaaccgguuccagaucaaggggguggagcugaaguccggcuacaaggacuggauccucuggaucagcuucgccaucagcugcuuccugcugugcguggcccuccugggcuucaucaugugggccugccagaaggggaacauccgcugcaacaucugcaucuga

SEQ ID NO: 14243 - RNA, 1701 nt, Artificial Sequence
  FLUAV/H3N2/A/Singapore/INFIMH-16-0019/2016-CDC-LV18A__EPI1583318 hemagglutinin CDS gc (HA)
augaagaccaucaucgcccugagcuacauccucugccugguguucgcccagaagauccccggcaacgacaacuccaccgcgacgcugugccucgggcaccacgccgucccgaacggcaccaucgugaagaccaucaccaacgaccgcaucgaggugacgaacgccaccgagcugguccagaacagcuccaucggggagaucugcgacagcccccaccagauccuggacggcgagaacugcacccucaucgacgcccugcugggggacccccagugcgacggcuuccagaacaagaagugggaccucuucguggagcgguccaaggccuacagcaacugcuaccccuacgacgugccggacuacgcgucccugcgcagccuggucgccuccagcggcacccucgaguucaagaacgaguccuucaacuggacgggggugacccagaacggcaccagcuccgccugcauccgggggagcuccagcuccuucuucagccgccugaacuggcugacccaccucaacuacaaguaccccgcccugaacgugacgaugcccaacaaggagcaguucgacaagcuguacaucuggggcguccaccaccccgggaccgacaaggaccagaucuucccguacgcgcaguccagcggccggaucaucgugagcaccaagcgcucccagcaggccgugauccccaacaucggcagccggccccgcauccgggacauccccucccgcaucagcaucuacuggaccaucgucaagccgggggacauccuccugaucaacuccacgggcaaccugaucgcgccccggggguacuucaagauccgcagcggcaaguccagcaucaugcgguccgacgcccccaucggcaagugcaagagcgagugcaucacccccaacggguccaucccgaacgacaagcccuuccagaacgugaaccgcaucaccuacggcgccugcccccgguacgugaagcacagcacccucaagcuggccacggggaugcgcaacguccccgagaagcagacccggggcaucuucggggccaucgccggcuucaucgagaacggcugggaggggaugguggacggcugguacggguuccgccaccagaacuccgagggccgggggcaggccgccgaccucaagagcacccaggcggccaucgaccagaucaacggcaagcugaaccgccugaucggcaagaccaacgagaaguuccaccagaucgagaaggaguucuccgagguggaggggcggguccaggaccuggagaaguacguggaggacacgaagaucgaccucuggagcuacaacgccgagcugcugguggcccucgagaaccagcacaccaucgaccugaccgacuccgagaugaacaagcuguucgagaagaccaagaagcagcuccgcgagaacgccgaggacaugggcaacgggugcuucaagaucuaccacaagugcgacaacgcgugcaucgagagcauccgcaacgagacguacgaccacaacgucuaccgggacgaggcccugaacaaccgcuuccagaucaagggcguggagcugaaguccggguacaaggacuggauccucuggaucagcuucgccaucagcugcuuccugcugugcguggcccuccugggcuucaucaugugggccugccagaagggcaacauccggugcaacaucugcaucuga

SEQ ID NO: 14244 - RNA, 1701 nt, Artificial Sequence
  FLUAV/H3N2/A/Kansas/14/2017__EPI1146345 hemagglutinin CDS gc (HA)
augaagaccaucaucgcccugagcugcauccucugccugguguucgcccagaagauccccggcaacgacaacuccaccgcgacgcugugccucgggcaccacgccgucccgaacggcaccaucgugaagaccaucaccaacgaccgcaucgaggugacgaacgccaccgagcugguccagaacagcuccaucggggagaucugcgacagcccccaccagauccuggacggcgagaacugcacccucaucgacgcccugcugggggacccccagugcgacggcuuccagaacaagaagugggaccucuucguggagcggaacaaggccuacuccaacugcuaccccuacgacgugccggacuacgcgagccugcgcucccuggucgccagcuccggcacccucgaguucaacaacgagagcuucaacugggccggggugacgcagaacggcaccuccagcuccugcauccgggggagcaaguccagcuucuucucccgccugaacuggcugacccaccucaacagcaaguaccccgcccugaacgugaccaugcccaacaacgagcaguucgacaagcuguacaucuggggcguccaccaccccgggacggacaaggaccagaucucccucuacgcgcagagcagcggccggaucaccguguccaccaagcgcagccagcaggccgugaucccgaacaucggcucccggccccgcauccgggacauccccagccgcaucuccaucuacuggaccaucgucaagcccggggacauccugcugaucaacagcacgggcaaccucaucgccccgcggggguacuucaagauccgcuccggcaagagcuccaucaugcggagcgacgcccccaucggcaagugcaaguccgagugcaucacccccaacgggagcauccccaacgacaagccguuccagaacgugaaccgcaucaccuacggcgccugcccccgguacgugaagcaguccacccugaagcuggcgacggggaugcgcaacguccccgagcggcagacccgcggcaucuucggggccaucgccggcuucaucgagaacggcugggaggggaugguggacggcugguacggguuccggcaccagaacagcgagggccgcgggcaggccgccgaccucaaguccacccaggcggccaucgaccagaucaacggcaagcugaaccggcugaucggcaagaccaacgagaaguuccaccagaucgagaaggaguucagcgagguggaggggcgcauccaggaccucgagaaguacgucgaggacacgaagaucgaccugugguccuacaacgccgagcugcucguggcccuggagaaccagcacaccaucgaccugaccgacagcgagaugaacaagcuguucgagaagaccaagaagcagcuccgcgagaacgccgaggacaugggcaacgggugcuucaagaucuaccacaagugcgacaacgcgugcaugggcuccauccggaacgggacguacgaccacaacguguaccgcgacgaggcccugaacaaccgguuccagaucaagggcgucgagcucaagagcggcuacaaggacuggauccuguggaucagcuucgccaucuccugcuuccugcucugcguggcccugcugggguucaucaugugggccugccagaagggcaacauccgcugcaacaucugcaucuga

SEQ ID NO: 14245 - RNA, 1701 nt, Artificial Sequence
  FLUAV/H3N2/A/Kansas/14/2017__EPI1261067 hemagglutinin CDS gc (HA)
augaagaccaucaucgcccugagcugcauccucugccugguguucgcccagaagauccccggcaacgacaacuccaccgcgacgcugugccucgggcaccacgccgucccgaacggcaccaucgugaagaccaucaccaacgaccgcaucgaggugacgaacgccaccgagcugguccagaacagcuccaucggggagaucugcgacagcccccaccagauccuggacggcgagaacugcacccucaucgacgcccugcugggggacccccagugcgacggcuuccagaacaagaagugggaccucuucguggagcggaacaaggccuacuccaacugcuaccccuacgacgugccggacuacgcgagccugcgcucccuggucgccagcuccggcacccucgaguucaacaacgagagcuucaacugggccggggugacgcagaacggcaccuccagcuccugcauccgggggagcaaguccagcuucuucucccgccugaacuggcugacccaccucaacagcaaguaccccgcccugaacgugaccaugcccaacaacgagcaguucgacaagcuguacaucuggggcguccaccaccccgggacggacaagaaccagaucucccucuacgcgcagagcagcggccggaucaccguguccaccaagcgcagccagcaggccgugaucccgaacaucggcucccggccccgcauccgggacauccccagccgcaucuccaucuacuggaccaucgucaagcccggggacauccugcugaucacgagcaccggcaaccucaucgccccgcggggguacuucaagauccgcuccggcaagagcuccaucaugcggagcgacgcccccaucggcaagugcaaguccgagugcaucacccccaacgggagcauccccaacgacaagccguuccagaacgugaaccgcaucaccuacggcgccugcccccgguacgugaagcaguccacgcugaagcuggcgaccgggaugcgcaacguccccgagcggcagacccgcggcaucuucggggccaucgccggcuucaucgagaacggcugggaggggaugguggacggcugguacggguuccggcaccagaacagcgagggccgcgggcaggccgccgaccucaaguccacccaggcggccaucgaccagaucaacggcaagcugaaccggcugaucggcaagacgaacgagaaguuccaccagaucgagaaggaguucagcgagguggaggggcgcauccaggaccucgagaaguacgucgaggacaccaagaucgaccugugguccuacaacgccgagcugcucguggcccuggagaaccagcacaccaucgaccugaccgacagcgagaugaacaagcuguucgagaagacgaagaagcagcuccgcgagaacgccgaggacaugggcaacgggugcuucaagaucuaccacaagugcgacaacgcgugcaugggcuccauccggaacgggaccuacgaccacaacguguaccgcgacgaggcccugaacaaccgguuccagaucaagggcgucgagcucaagagcggcuacaaggacuggauccuguggaucagcuucgccaucuccugcuuccugcucugcguggcccugcugggguucaucaugugggccugccagaagggcaacauccgcugcaacaucugcaucuga

SEQ ID NO: 14246 - RNA, 1701 nt, Artificial Sequence
  FLUAV/H3N2/A/Kansas/14/2017__EPI1691978 hemagglutinin CDS gc (HA)
augaagaccaucaucgcccugagcugcauccucugccugguguucgcccagaagauccccggcaacgacaacuccaccgcgacgcugugccucgggcaccacgccgucccgaacggcaccaucgugaagaccaucaccaacgaccgcaucgaggugacgaacgccaccgagcugguccagaacagcuccaucggggagaucugcgacagcccccaccagauccuggacggcgagaacugcacccucaucgacgcccugcugggggacccccagugcgacggcuuccagaacaagaagugggaccucuucguggagcggaacaaggccuacuccaacugcuaccccuacgacgugccggacuacgcgagccugcgcucccuggucgccagcuccggcacccucgaguucaacaacgagagcuucaacugggccggggugacgcagaacggcaccuccagcuccugcauccgggggagcaaguccagcuucuucucccgccugaacuggcugacccaccucaacagcaaguaccccgcccugaacgugaccaugcccaacaacgagcaguucgacaagcuguacaucuggggcguccaccaccccgugacggacaagaaccagaucucccucuacgcgcagagcagcgggcggaucaccguguccaccaagcgcagccagcaggccgucaucccgaacaucggcuaccggccccgcauccgggacauccccucccgcaucagcaucuacuggaccaucgugaagcccggcgacauccugcugaucaacuccacggggaaccucaucgccccgcggggcuacuucaagauccgcagcgggaaguccagcaucaugcgguccgacgcccccaucggcaagugcaagagcgagugcaucacccccaacggcuccauccccaacgacaagccguuccagaacgugaaccgcaucaccuacggggccugcccccgguacgucaagcagagcacccugaagcuggcgacgggcaugcgcaacgugcccgagcggcagacccgcgggaucuucggcgccaucgccggguucaucgagaacggcugggagggcaugguggacgggugguacggcuuccggcaccagaacuccgaggggcgcggccaggccgccgaccucaagagcacccaggcggccaucgaccagaucaacgggaagcugaaccggcugaucggcaagaccaacgagaaguuccaccagaucgagaaggaguucuccgaggucgagggccgcauccaggaccucgagaaguacguggaggacacgaagaucgaccuguggagcuacaacgccgagcugcucguggcccuggagaaccagcacaccaucgaccugaccgacuccgagaugaacaagcuguucgagaagaccaagaagcagcuccgcgagaacgccgaggacauggggaacggcugcuucaagaucuaccacaagugcgacaacgcgugcauggggagcauccggaacggcacguacgaccacaacgucuaccgcgacgaggcccugaacaaccgguuccagaucaaggggguggagcucaaguccggcuacaaggacuggauccuguggaucagcuucgccaucagcugcuuccugcucugcguggcccugcugggcuucaucaugugggccugccagaaggggaacauccgcugcaacaucugcaucuga

SEQ ID NO: 14247 - RNA, 1701 nt, Artificial Sequence
  FLUAV/H3N2/A/Kansas/14/2017 CBER-22B CDC19A__EPI1388416 hemagglutinin CDS gc (HA)
augaagaccaucaucgcccugagcugcauccucugccugguguucgcccagaagauccccggcaacgacaacuccaccgcgacgcugugccucgggcaccacgccgucccgaacggcaccaucgugaagaccaucaccaacgaccgcaucgaggugacgaacgccaccgagcugguccagaacagcuccaucggggagaucugcgacagcccccaccagauccuggacggcgagaacugcacccucaucgacgcccugcugggggacccccagugcgacggcuuccagaacaagaagugggaccucuucguggagcggaacaaggccuacuccaacugcuaccccuacgacgugccggacuacgcgagccugcgcucccuggucgccagcuccggcacccucgaguucaacaacgagagcuucaacugggccggggugacgcagaacggcaccuccagcuccugcauccgggggagcaaguccagcuucuucucccgccugaacuggcugacccaccucaacagcaaguaccccgcccugaacgugaccaugcccaacaacgagcaguucgacaagcuguacaucuggggcguccaccaccccgugacggacaagaaccagaucucccucuacgcgcagagcagcgggcggaucaccguguccaccaagcgcagccagcaggccgucaucccgaacaucggcuaccggccccgcauccgggacauccccucccgcaucagcaucuacuggaccaucgugaagcccggcgacauccugcugaucaacuccacggggaaccucaucgccccgcggggcuacuucaagauccgcagcgggaaguccagcaucaugcgguccgacgcccccaucggcaagugcaagagcgagugcaucacccccaacggcuccauccccaacgacaagccguuccagaacgugaaccgcaucaccuacggggccugcccccgguacgucaagcagagcacccugaagcuggcgacgggcaugcgcaacgugcccgagcggcagacccgcgggaucuucggcgccaucgccggguucaucgagaacggcugggagggcaugguggacgggugguacggcuuccggcaccagaacuccgaggggcgcggccaggccgccgaccucaagagcacccaggcggccaucgaccagaucaacgggaagcugaaccggcugaucggcaagaccaacgagaaguuccaccagaucgagaaggaguucuccgaggucgagggccgcauccaggaccucgagaaguacguggaggacacgaagaucgaccuguggagcuacaacgccgagcugcucguggcccuggagaaccagcacaccaucgaccugaccgacuccgagaugaacaagcuguucgagaagaccaagaagcagcuccgcgagaacgccgaggacauggggaacggcugcuucaagaucuaccacaagugcgacaacgcgugcaucgggagcauccggaacggcacguacgaccacaacgucuaccgcgacgaggcccugaacaaccgguuccagaucaaggggguggagcucaaguccggcuacaaggacuggauccuguggaucagcuucgccaucagcugcuuccugcucugcguggcccugcugggcuucaucaugugggccugccagaaggggaacauccgcugcaacaucugcaucuga

SEQ ID NO: 14248 - RNA, 1701 nt, Artificial Sequence
  FLUAV/H3N2/A/Switzerland/8060/2017__EPI1154878 hemagglutinin CDS gc (HA)
augaagaccaucaucgcccugagcuacauccucugccugguguucgcccagaagauccccggcaacgacaacuccaccgcgacgcugugccucgggcaccacgccgucccgaacggcaccaucgugaagaccaucaccaacgaccgcaucgaggugacgaacgccaccgagcugguccagaacagcuccaucggggagaucugcgacagcccccaccagauccuggacggcgagaacugcacccucaucgacgcccugcugggggacccccagugcgacggcuuccagaacaagaagugggaccucuucguggagcgguccaaggccuacagcuccugcuaccccuacgacgugccggacuacgcgagccugcgcucccuggucgccagcuccggcacccucgaguucaacaacgagagcuucaacuggacgggggugaagcagaacggcaccuccagcgccugcauccggaaguccagcuccagcuucuucucccgccugaacuggcugacccaccucaacuacaccuaccccgcccugaacgugacgaugcccaacaacgagcaguucgacaagcuguacaucuggggcguccaccaccccgggaccgacaaggaccagaucuuccucuacgcgcagagcagcgggcggaucaccguguccaccaagcgcagccagcaggccgugaucccgaacaucggcucccggccccgcauccgggacauccccagccgcaucuccaucuacuggacgaucgucaagcccggcgacauccugcugaucaacagcaccgggaaccucaucgccccgcggggcuacuucaagauccaguccggcaagagcuccaucaugcgcagcgacgcccccaucgggaagugcaaguccgagugcaucacccccaacggcagcauccccaacgacaagccguuccagaacgugaaccggaucaccuacggggccugcccccgcuacgugaagcacuccacgcugaagcuggcgaccggcaugcggaacguccccgagaagcagacccgcgggaucuucggcgccaucgccggguucaucgagaacggcugggagggcaugguggacgggugguacggcuuccggcaccagaacagcgaggggcgcggccaggccgccgaccucaaguccacccaggcggccaucgaccagaucaacgggaagcugaaccggcugaucggcaagacgaacgagaaguuccaccagaucgagaaggaguucagcgagguggagggccgcauccaggaccucgagaaguacgucgaggacaccaagaucgaccugugguccuacaacgccgagcugcucguggcccuggagaaccagcacaccaucgaccugaccgacagcgagaugaacaagcuguucgagaagacgaagaagcagcuccgggagaacgccgaggacauggggaacggcugcuucaagaucuaccacaagugcgacaacgcgugcaucggguccauccgcaacggcaccuacgaccacaacguguaccgcgacgaggcccugaacaaccgguuccagaucaagggggucgagcucaagagcggcuacaaggacuggauccuguggaucagcuucgccaucuccugcuuccugcucugcguggcccugcugggcuucaucaugugggccugccagaaggggaacauccgcugcaacaucugcaucuga

SEQ ID NO: 14249 - RNA, 1701 nt, Artificial Sequence
  FLUAV/H3N2/A/Switzerland/8060/2017__EPI1266285 hemagglutinin CDS gc (HA)
augaagaccaucaucgcccugagcuacauccucugccugguguucgcccagaagauccccggcaacgacaacuccaccgcgacgcugugccucgggcaccacgccgucccgaacggcaccaucgugaagaccaucaccaacgaccgcaucgaggugacgaacgccaccgagcugguccagaacagcuccaucggggagaucugcgacagcccccaccagauccuggacggcgagaacugcacccucaucgacgcccugcugggggacccccagugcgacggcuuccagaacaagaagugggaccucuucguggagcgguccaaggccuacagcuccugcuaccccuacgacgugccggacuacgcgagccugcgcucccuggucgccagcuccggcacccucgaguucaacaacgagagcuucaacuggacgggggugaagcagaacggcaccuccagcgccugcauccggaaguccagcuccagcuucuucucccgccugaacuggcugacccaccucaacuacaaguaccccgcccugaacgugaccaugcccaacaacgagcaguucgacaagcuguacaucuggggcguccaccaccccgggacggacaaggaccagaucuucccguacgcgcagagcagcgggcggaucaccguguccaccaagcgcagccagcaggccgugauccccaacaucggcucccggccccgcauccgggacauccccagccgcaucuccaucuacuggaccaucgucaagccgggcgacauccuccugaucaacagcacggggaaccugaucgcgccccggggcuacuucaagauccaguccggcaagagcuccaucaugcgcagcgacgcccccaucgggaagugcaaguccgagugcaucacccccaacggcagcaucccgaacgacaagcccuuccagaacgugaaccggaucaccuacggggccugcccccgcuacgugaagcacuccacccucaagcuggccacgggcaugcggaacguccccgagaagcagacccgcgggaucuucggcgccaucgccggguucaucgagaacggcugggagggcaugguggacgggugguacggcuuccggcaccagaacagcgaggggcgcggccaggccgccgaccugaaguccacccaggcggccaucgaccagaucaacgggaagcucaaccggcugaucggcaagaccaacgagaaguuccaccagaucgagaaggaguucagcgagguggagggccgcauccaggaccuggagaaguacgucgaggacacgaagaucgaccucugguccuacaacgccgagcugcugguggcccucgagaaccagcacaccaucgaccugaccgacagcgagaugaacaagcuguucgagaagaccaagaagcagcuccgggagaacgccgaggacauggggaacggcugcuucaagaucuaccacaagugcgacaacgcgugcaucggguccauccgcaacggcacguacgaccacaacguguaccgcgacgaggcccugaacaaccgguuccagaucaagggggucgagcucaagagcggcuacaaggacuggauccuguggaucagcuucgccaucuccugcuuccugcugugcguggcccuccugggcuucaucaugugggccugccagaaggggaacauccgcugcaacaucugcaucuga

SEQ ID NO: 14250 - RNA, 1701 nt, Artificial Sequence
  FLUAV/H3N2/A/Hong Kong/2671/2019__EPI1543098 hemagglutinin CDS gc (HA)
augaagaccaucaucgcccugagcuacauccucugccugguguucacccagaagauccccggcaacgacaacuccacggccacccugugccucgggcaccacgcggucccgaacggcaccaucgugaagaccaucacgaacgaccgcaucgaggugaccaacgccaccgagcugguccagaacagcuccaucggggagaucugcgacagcccccaccagauccuggacggcgggaacugcacccucaucgacgcccugcugggcgacccccagugcgacggcuuccagaacaagaagugggaccucuucguggagcggucccgcgccuacagcaacugcuaccccuacgacgugccggacuacgccucccugcggagccuggucgcguccagcgggacgcucgaguucaagaacgaguccuucaacugggccggcgugacccagaacggcaagagcuucuccugcauccgcgggagcuccagcuccuucuucagccggcugaacuggcugacccaccucaacuacaccuaccccgcccugaacgugacgaugcccaacaaggagcaguucgacaagcuguacaucuggggcguccaccaccccgggaccgacaaggaccagaucucccucuacgcccagagcagcggccgcaucaccguguccaccaagcggagccagcaggcggugaucccgaacaucgggucccgcccccggauccgcgacauccccagccggaucuccaucuacuggacgaucgucaagcccggcgacauccugcugaucaacagcaccgggaaccucaucgccccgcgcggcuacuucaagauccgguccggcaagagcuccaucaugcgcagcgacgcccccaucgggaagugcaaguccgagugcaucacccccaacggcagcauccccaacgacaagccguuccagaacgugaaccggaucaccuacggggccugcccccgcuacgugaagcaguccacgcugaagcuggccaccggcaugcggaacguccccgagaagcagacccgcgggaucuucggcgcgaucgccggcuucaucgagaacgggugggagggcaugguggacgggugguacggcuuccggcaccagaacagcgaggggcgcggccaggccgccgaccucaaguccacccaggccgcgaucgaccagaucaacggcaagcugaaccggcugaucgggaagacgaacgagaaguuccaccagaucgagaaggaguucagcgagguggagggccgcguccaggaccucgagaaguacguggaggacaccaagaucgaccugugguccuacaacgccgagcugcucguggcccuggagaaccagcacaccaucgaccugaccgacagcgagaugaacaagcuguucgagaagacgaagaagcagcuccgcgagaacgccgaggacauggggaacggcugcuucaagaucuaccacaagugcgacaacgccugcaucggguccauccggaacgagaccuacgaccacaacgucuaccgcgacgaggcgcugaacaaccgguuccagaucaagggcguggagcucaagagcggcuacaaggacuggauccuguggaucagcuucgccaucuccugcuuccugcucugcguggcccugcugggguucaucaugugggccugccagaagggcaacauccgcugcaacaucugcaucuga

SEQ ID NO: 14251 - RNA, 1701 nt, Artificial Sequence
  FLUAV/H3N2/A/Hong Kong/2671/2019__EPI1642843 hemagglutinin CDS gc (HA)
augaagaccaucaucgcccugagcuacauccucugccugguguucacccagaagauccccggcaacgacaacuccacggccacccugugccucgggcaccacgcggucccgaacggcaccaucgugaagaccaucacgaacgaccgcaucgaggugaccaacgccaccgagcugguccagaacagcuccaucggggagaucugcgacagcccccaccagauccuggacggcgggaacugcacccucaucgacgcccugcugggcgacccccagugcgacggcuuccagaacaagaagugggaccucuucguggagcggucccgcgccuacagcaacugcuaccccuacgacgugccggacuacgccucccugcggagccuggucgcguccagcgggacgcucgaguucaagaacgaguccuucaacugggccggcgugacccagaacggcaagagcuucuccugcauccgcgggagcuccagcuccuucuucagccggcugaacuggcugacccaccucaacuacaucuaccccgcccugaacgugaccaugcccaacaaggagcaguucgacaagcuguacaucuggggcguccaccaccccgugacggacaaggaccagaucucccucuacgcccagagcagcgggcgcaucaccguguccaccaagcggagccagcaggcggucaucccgaacaucggcucccgcccccggauccgcaacauccccagccggaucuccaucuacuggaccaucgugaagcccggggacauccugcugaucaacagcacgggcaaccucaucgccccgcgcggguacuucaagauccgguccggcaagagcuccaucaugcgcagcgacgcccccaucggcaagugcaaguccgagugcaucacccccaacgggagcauccccaacgacaagccguuccagaacgugaaccggaucaccuacggcgccugcccccgcuacgucaagcaguccacccugaagcuggccacggggaugcggaacgugcccgagaagcagacccgcggcaucuucggggcgaucgccggcuucaucgagaacggcugggaggggaugguggacggcugguacggguuccggcaccagaacagcgagggccgcgggcaggccgccgaccucaaguccacccaggccgcgaucgaccagaucaacggcaagcugaaccggcugaucggcaagaccaacgagaaguuccaccagaucgagaaggaguucagcgaggucgaggggcgcgugcaggaccucgagaaguacguggaggacacgaagaucgaccugugguccuacaacgccgagcugcucgucgcccuggagaaccagcacaccaucgaccugaccgacagcgagaugaacaagcuguucgagaagaccaagaagcagcuccgcgagaacgccgaggacaugggcaacgggugcuucaagaucuaccacaagugcgacaacgccugcaucggcuccauccggaacgagacguacgaccacaacguguaccgcgacgaggcgcugaacaaccgguuccagaucaaggggguggagcucaagagcggcuacaaggacuggauccuguggaucagcuucgccaucuccugcuuccugcucugcgucgcccugcugggcuucaucaugugggccugccagaaggggaacauccgcugcaacaucugcaucuga

SEQ ID NO: 14252 - RNA, 1701 nt, Artificial Sequence
  FLUAV/H3N2/A/Hong Kong/45/2019__EPI1691930 hemagglutinin CDS gc (HA)
augaagaccaucaucgcccugagcuacauccucugccugggcuucacccagaagauccccgggaacgacaacuccacggccacccugugccucggccaccacgcggugccgaacgggaccaucgucaagaccaucacgaacgaccgcaucgaggugaccaacgccaccgagcuggugcagaacagcuccaucggcgagaucugcgacagcccccaccagauccuggacgggggcaacugcacccucaucgacgcccugcugggcgacccccagugcgacggguuccagaacaagaagugggaccucuucgucgagcggucccgcgccuacagcaacugcuaccccuacgacgugccggacuacgccucccugcggagccugguggcguccagcggcacgcucgaguucaagaacgaguccuucaacugggccggggucacccagaacggcaagagcuucuccugcauccgcgggagcuccagcuccuucuucagccggcugaacuggcugacccaccucaacuacaccuaccccgcccugaacgugacgaugcccaacaaggagcaguucgacaagcuguacaucuggggcgugcaccaccccggcaccgacaaggaccagaucucccucuacgcccagagcagcgggcgcaucaccgucuccaccaagcggagccagcaggcggugaucccgaacaucggcucccgcccccggauccgcgacauccccagccggaucuccaucuacuggacgaucgugaagcccggggacauccugcugaucaacagcaccggcaaccucaucgccccgcgcggcuacuucaagauccgguccggcaagagcuccaucaugcgcagcgacgcccccaucgggaagugcaaguccgagugcaucacccccaacgggagcauccccaacgacaagccguuccagaacgucaaccggaucaccuacggcgccugcccccgcuacgugaagcagaacacgcugaagcuggccaccgggaugcggaacgugcccgagaagcagacccgcggcaucuucggcgcgaucgccggguucaucgagaacggcugggaggggauggucgacggcugguacggguuccggcaccagaacuccgagggccgcggccaggccgccgaccucaagagcacccaggccgcgaucgaccagaucaacgggaagcugaaccggcugaucggcaagacgaacgagaaguuccaccagaucgagaaggaguucuccgagguggaggggcgcgugcaggaccucgagaaguacgucgaggacaccaagaucgaccuguggagcuacaacgccgagcugcucguggcccuggagaaccagcacaccaucgaccugaccgacuccgagaugaacaagcuguucgagaagacgaagaagcagcuccgcgagaacgccgaggacaugggcaacgggugcuucaagaucuaccacaagugcgacaacgccugcaucggcagcauccggaacgagaccuacgaccacaacguguaccgcgacgaggcgcugaacaaccgguuccagaucaagggcgucgagcucaaguccggguacaaggacuggauccuguggaucagcuucgccaucagcugcuuccugcucugcguggcccugcugggcuucaucaugugggccugccagaaggggaacauccgcugcaacaucugcaucuga

SEQ ID NO: 14253 - RNA, 1701 nt, Artificial Sequence
  FLUAV/H3N2/A/South Australia/34/2019__EPI1387331 hemagglutinin CDS gc (HA)
augaagaccaucaucgcccugagcuacauccucugccugguguucgcccagaagauccccggcaacgacaacuccaccgcgacgcugugccucgggcaccacgccgucccgaacggcaccaucgugaagaccaucaccaacgaccgcaucgaggugacgaacgccaccgagcugguccagaacagcuccaucggggagaucugcgacagcccccaccagauccuggacggcgggaacugcacccucaucgacgcccugcugggcgacccccagugcgacggcuuccagaacaagaagugggaccucuucguggagcggucccgcgccuacagcaacugcuaccccuacgacgugccggacuacgcgucccugcggagccuggucgccuccagcgggacccucgaguucaagaacgaguccuucaacuggacgggcgugaagcagaacgggaccagcuccgccugcauccgcggcagcuccagcuccuucuucagccggcugaacuggcugacccaccucaacuacaccuaccccgcccugaacgugacgaugcccaacaaggagcaguucgacaagcuguacaucuggggcguccaccaccccgggaccgacaaggaccagaucuuccucuacgcgcaguccagcggccgcaucaccgugagcaccaagcggucccagcaggccgugaucccgaacaucggguuccgcccccggauccgcgacauccccagccggaucuccaucuacuggacgaucgucaagcccggcgacauccugcugaucaacagcaccgggaaccucaucgccccgcgcggcuacuucaagauccgguccggcaagagcuccaucaugcgcagcgacgcccccaucgggaagugcaaguccgagugcaucacccccaacggcagcauccccaacgacaagccguuccagaacgugaaccggaucaccuacggggccugcccccgcuacgugaagcaguccacgcugaagcuggcgaccggcaugcggaacguccccgagaagcagacccgcgggaucuucggcgccaucgccggcuucaucgagaacgggugggagggcaugauggacgggugguacggcuuccggcaccagaacagcgaggggcgcggccaggccgccgaccucaaguccacccaggcggccaucgaccagaucaacggcaagcugaaccggcugaucgggaagacgaacgagaaguuccaccagaucgagaaggaguucagcgagguggagggccgcgugcaggaccucgagaaguacgucgaggacaccaagaucgaccugugguccuacaacgccgagcugcucguggcccuggagaaccagcacaccaucgaccugaccgacagcgagaugaacaagcuguucgagaagacgaagaagcagcuccgcgagaacgccgaggacauggggaacggcugcuucaagaucuaccacaagugcgacaacgcgugcaucggguccauccggaacgagaccuacgaccacaacguguaccgcgacgaggcccugaacaaccgguuccagaucaagggcgucgagcucaagagcggcuacaaggacuggauccuguggaucuccuucgccaucagcugcuuccugcucugcaucgcccugcugggguucaucaugugggccugccagaagggcaacauccgcugcaacaucugcaucuga

SEQ ID NO: 14254 - RNA, 1701 nt, Artificial Sequence
  FLUAV/H3N2/A/South Australia/34/2019__EPI1440494 hemagglutinin CDS gc (HA)
augaagaccaucaucgcccugagcuacauccucugccugguguucgcccagaagauccccggcaacgacaacuccaccgcgacgcugugccucgggcaccacgccgucccgaacggcaccaucgugaagaccaucaccaacgaccgcaucgaggugacgaacgccaccgagcugguccagaacagcuccaucggggagaucugcgacagcccccaccagauccuggacggcgggaacugcacccucaucgacgcccugcugggcgacccccagugcgacggcuuccagaacaagaagugggaccucuucguggagcggucccgcgccuacagcaacugcuaccccuacgacgugccggacuacgcgucccugcggagccuggucgccuccagcgggacccucgaguucaagaacgaguccuucaacuggacgggcgugaagcagaacgggaccagcuccgccugcauccgcggcagcuccagcuccuucuucagccggcugaacuggcugacccaccucaacuacaaguaccccgcccugaacgugaccaugcccaacaaggagcaguucgacaagcuguacaucuggggcguccaccaccccaucacggacaaggaccagaucuuccucuacgcgcaguccagcgggcgcaucaccgugagcaccaagcggucccagcaggccgugaucccgaacaucggcuuccgcccccggauccgcgacauccccagccggaucuccaucuacuggaccaucgucaagcccggggacauccugcugaucaacagcacgggcaaccucaucgccccgcgcggguacuucaagauccgguccggcaagagcuccaucaugcgcagcgacgcccccaucggcaagugcaaguccgagugcaucacccccaacgggagcauccccaacgacaagccguuccagaacgugaaccggaucaccuacggcgccugcccccgcuacgugaagcaguccacccugaagcuggcgacggggaugcggaacguccccgagaagcagacccgcggcaucuucggggccaucgccggcuucaucgagaacggcugggaggggaugauggacggcugguacggguuccggcaccagaacagcgagggccgcgggcaggccgccgaccucaaguccacccaggcggccaucgaccagaucaacggcaagcugaaccggcugaucggcaagaccaacgagaaguuccaccagaucgagaaggaguucagcgagguggaggggcgcgugcaggaccucgagaaguacgucgaggacacgaagaucgaccugugguccuacaacgccgagcugcucguggcccuggagaaccagcacaccaucgaccugaccgacagcgagaugaacaagcuguucgagaagaccaagaagcagcuccgcgagaacgccgaggacaugggcaacgggugcuucaagaucuaccacaagugcgacaacgcgugcaucggcuccauccggaacgagacguacgaccacaacguguaccgcgacgaggcccugaacaaccgguuccagaucaagggggucgagcucaagagcggcuacaaggacuggauccuguggaucuccuucgccaucagcugcuuccugcucugcaucgcccugcugggcuucaucaugugggccugccagaaggggaacauccgcugcaacaucugcaucuga

SEQ ID NO: 14255 - RNA, 1683 nt, Artificial Sequence
  FLUAV/H7N9/A/chicken/Zhejiang/C483/2013(H7N9)__AGN69400.1 hemagglutinin CDS gc (HA)
augaacacccagauccugguguucgcccucaucgccaucauccccaccaacgcggacaagaucugccugggccaccacgccgucagcaacgggacgaaggugaacacccugaccgagcgcggcguggaggucgugaacgccaccgagacgguggagcggaccaacaucccgcgcaucugcuccaaggggaagaagaccgucgaccucggccagugcgggcugcugggcaccaucacgggcccgccccagugcgaccaguuccucgaguucagcgccgaccugaucaucgagcggcgcgagggguccgacgugugcuaccccggcaaguucgugaacgaggaggcccugcggcagauccuccgcgagagcgggggcaucgacaaggaggcgaugggguucaccuacuccggcauccggaccaacggcgccaccagcgccugccgccgguccgggagcuccuucuacgccgagaugaaguggcugcugagcaacacggacaacgcggccuucccgcagaugaccaaguccuacaagaacacccgcaagagccccgcccucaucgucuggggcauccaccacuccgugagcaccgccgagcagacgaagcuguacggguccggcaacaagcuggugaccgucggcagcuccaacuaccagcagagcuucgugcccucccccggggcccggccccaggugaacggccagagcgggcgcaucgacuuccacuggcucaugcugaaccccaacgacaccgucaccuucagcuucaacggcgcguucaucgcccccgaccgggccuccuuccugcgcggcaagagcauggggauccaguccggcguccagguggacgccaacugcgagggggacugcuaccacagcggcgggacgaucaucuccaaccuccccuuccagaacaucgacagccgggccgugggcaagugcccgcgcuacgugaagcagcggucccugcugcucgcgaccgggaugaagaacgugcccgagauccccaagggccgcggccuguucggggccaucgccggcuucaucgagaacgggugggagggccugaucgacgggugguacggcuuccggcaccagaacgcccagggcgaggggaccgccgcggacuacaagagcacccaguccgccaucgaccagaucacgggcaagcucaaccgccugaucgagaagaccaaccagcaguucgagcugaucgacaacgaguucaacgaggucgagaagcagaucgggaacgugaucaacuggacccgggacagcaucaccgaggugugguccuacaacgccgagcuccuggucgccauggagaaccagcacacgaucgaccuggccgacagcgagauggacaagcucuacgagcgcgugaagcgccagcugcgggagaacgcggaggaggacggcaccggcugcuucgagaucuuccacaagugcgacgacgacugcauggccuccauccgcaacaacaccuacgaccacagcaaguaccgggaggaggccaugcagaaccgcauccagaucgaccccgucaagcuguccagcggguacaaggacgugauccucugguucuccuucggcgccagcugcuucauccugcuggcgaucgugauggggcucgucuucaucugcgugaagaacggcaacaugcggugcaccaucugcaucuga

SEQ ID NO: 14256 - RNA, 1686 nt, Artificial Sequence
  FLUAV/H10N8/A/Jiangxi/IPB13/2013(H10N8)__AHK10761.1 hemagglutinin CDS gc (HA)
auguacaagaucguggucaucaucgcccugcucggcgccgugaaggggcuggacaagaucugccugggccaccacgcgguggccaacgggaccaucgucaagacccucacgaacgagcaggaggaggugaccaacgccaccgagaccguggagagcacgggcaucaaccgccugugcaugaaggggcggaagcacaaggaccugggcaacugccaccccaucggcaugcucaucgggaccccggccugcgaccugcaccugaccggcaugugggacacccucaucgagcgcgagaacgccaucgcguacugcuaccccggggccacggucaacguggaggcccugcggcagaagaucauggaguccggcgggaucaacaagaucagcaccggcuucaccuacggcuccagcaucaacuccgccgggaccacgcgcgcgugcaugcggaacggcgggaacagcuucuacgccgagcugaaguggcucguguccaagagcaagggccagaacuucccccagaccaccaacaccuaccgcaacacggacaccgccgagcaccugaucauguggggcauccaccaccccuccagcacccaggagaagaacgaccuguacgggacccagucccucagcaucuccgucggcagcuccacguaccggaacaacuucgugccgguggucggggcccgcccccaggugaacggccagagcgggcggaucgacuuccacuggacccuggugcagcccggcgacaacaucaccuucucccacaacggcgggcugaucgcccccagccgcgucuccaagcucaucggccgggggcugggcauccagagcgacgcgccgaucgacaacaacugcgagagcaagugcuucuggcgcgggggcuccaucaacacccggcugcccuuccagaaccucagcccccgcacggugggccagugccccaaguacgugaaccggcgcucccugaugcuggccaccgggaugcggaacgucccggagcucauccagggccgcgggcuguucggcgccaucgccggguuccuggagaacggcugggagggcaugguggacgggugguacggcuuccggcaccagaacgcccaggggaccggccaggcggccgacuacaagagcacccaggccgccaucgaccagaucacgggcaagcucaaccgccugguggagaagaccaacaccgaguucgaguccaucgagagcgaguucuccgagaucgagcaccagaucgggaacgucaucaacuggaccaaggacagcaucacggacaucuggaccuaccaggccgagcugcucguggcgauggagaaccagcacaccaucgacauggccgacuccgagaugcugaaccuguacgagcgggugcgcaagcagcuccgccagaacgccgaggaggacggcaaggggugcuucgagaucuaccacgccugcgacgacagcugcauggaguccauccggaacaacaccuacgaccacagccaguaccgcgaggaggcccugcugaaccggcucaacaucaaccccgucacgcuguccagcggcuacaaggacaucauccugugguucuccuucggggcgagcugcuucgugcuccuggccgucgugaugggccuguucuucuucugccucaagaacggcaacaugcgcugcaccaucugcaucuga

SEQ ID NO: 14257 - RNA, 1752 nt, Artificial Sequence
  FLUBV/H0N0/B/Colorado/06/2017__EPI1011552 hemagglutinin CDS gc (HA)
augaaggccaucaucgugcugcucauggucgugaccagcuccgccgaccgcaucugcaccggcaucacgagcuccaacagcccccacguggucaagaccgcgacccagggggaggugaacgugaccggcgucaucccgcugacgaccacccccaccaagucccacuucgccaaccugaaggggacggagacccggggcaagcucugccccaagugccugaacugcaccgaccuggacguggcccucgggcgccccaagugcaccggcaagaucccgagcgcccggguguccauccugcacgagguccgccccgugacgagcggcugcuuccccaucaugcacgaccggaccaagauccgccagcugcccaaccuccugcggggguacgagcacgugcgccuguccacccacaacgucaucaacgccgagggcgcgcccgggggccccuacaagaucgggaccagcggcuccugccccaacaucacgaacggcaacggguucuucgccaccauggccugggccgugcccgacaagaacaagaccgcgaccaacccgcucacgaucgaggugcccuacgucugcaccgagggcgaggaccagaucaccguguggggguuccacagcgacaacgagacccagauggccaagcuguacggcgacuccaagccccagaaguucacgagcuccgccaacggcgugaccacccacuacgucagccagaucgggggcuuccccaaccagaccgaggacgggggccugccgcaguccgggcggaucgugguggacuacaugguccagaaguccggcaagacgggcaccaucaccuaccagcgcgggauccuccugccccagaagguguggugcgccagcggccggagcaaggugaucaaggggagccugccccucaucggcgaggccgacugccugcacgagaaguacgggggccugaacaaguccaagcccuacuacaccggcgagcacgcgaaggccaucgggaacugcccgaucugggucaagacgccccucaagcuggccaacggcaccaaguaccgcccgcccgccaagcugcucaaggagcggggguucuucggcgccaucgcgggguuccuggagggcggcugggaggggaugaucgccggcuggcacggguacaccagccacggcgcccacggcguggccgucgccgcggaccugaaguccacccaggaggccaucaacaagaucacgaagaaccucaacagccuguccgagcuggaggugaagaaccuccagcgccugagcggggccauggacgagcugcacaacgagauccucgagcuggacgagaagguggacgaccugcgggccgacaccaucuccagccagaucgagcucgccguccugcuguccaacgagggcaucaucaacagcgaggacgagcaccuccuggcgcuggagcgcaagcucaagaagaugcuggggccguccgccguggagaucggcaacgggugcuucgagaccaagcacaagugcaaccagaccugccuggacaagaucgccgccggcaccuucgacgcgggcgaguucagccuccccacguucgacucccugaacaucaccgccgccagccugaacgacgacgggcuggacaaccacaccauccuccuguacuacuccaccgccgccagcucccuggcggugacgcucaugaucgccaucuucgucguguacauggugagccgggacaacgucuccugcagcaucugccuguga

SEQ ID NO: 14258 - RNA, 1752 nt, Artificial Sequence
  FLUBV/H0N0/B/Colorado/06/2017__EPI1051642 hemagglutinin CDS gc (HA)
augaaggccaucaucgugcugcucauggucgugaccagcuccgccgaccgcaucugcaccggcaucacgagcuccaacagcccccacguggucaagaccgcgacccagggggaggugaacgugaccggcgucaucccgcugacgaccacccccaccaagucccacuucgccaaccugaaggggacggagacccggggcaagcucugccccaagugccugaacugcaccgaccuggacguggcccucgggcgccccaagugcaccggcaagaucccgagcgcccggguguccauccugcacgagguccgccccgugacgagcggcugcuuccccaucaugcacgaccggaccaagauccgccagcugcccaaccuccugcggggguacgagcacgugcgccuguccacccacaacgucaucaacgccgagggcgcgcccgggggccccuacaagaucgggaccagcggcuccugccccaacaucacgaacggcaacggguucuucgccaccauggccugggccgugcccgacaagaacaagaccgcgaccaacccgcucacgaucgaggugcccuacgucugcaccgagggcgaggaccagaucaccguguggggguuccacagcgacaccgagacgcagauggccaagcuguacggcgacuccaagccccagaaguucaccagcuccgccaacggcgugaccacccacuacgucagccagaucgggggcuuccccaaccagacggaggacgggggccugccgcaguccgggcggaucgugguggacuacaugguccagaaguccggcaagaccggcaccaucaccuaccagcgcgggauccuccugccccagaagguguggugcgccagcggccggagcaaggugaucaaggggagccugccccucaucggcgaggccgacugccugcacgagaaguacgggggccugaacaaguccaagcccuacuacacgggcgagcacgcgaaggccaucgggaacugcccgaucugggucaagacgccccucaagcuggccaacggcaccaaguaccgcccgcccgccaagcugcucaaggagcggggguucuucggcgccaucgcgggguuccuggagggcggcugggaggggaugaucgccggcuggcacggguacaccagccacggcgcccacggcguggccgucgccgcggaccugaaguccacccaggaggccaucaacaagaucaccaagaaccucaacagccuguccgagcuggaggugaagaaccuccagcgccugagcggggccauggacgagcugcacaacgagauccucgagcuggacgagaagguggacgaccugcgggccgacaccaucuccagccagaucgagcucgccguccugcuguccaacgagggcaucaucaacagcgaggacgagcaccuccuggcgcuggagcgcaagcucaagaagaugcuggggccguccgccguggagaucggcaacgggugcuucgagaccaagcacaagugcaaccagaccugccuggacaagaucgccgccggcacguucgacgcgggcgaguucagccuccccaccuucgacucccugaacaucaccgccgccagccugaacgacgacgggcuggacaaccacaccauccuccuguacuacuccacggccgccagcucccuggcggugacccucaugaucgccaucuucgucguguacauggugagccgggacaacgucuccugcagcaucugccuguga

SEQ ID NO: 14259 - RNA, 1752 nt, Artificial Sequence
  FLUBV/H0N0/B/Colorado/06/2017 BX-71__EPI1151760 hemagglutinin CDS gc (HA)
augaaggccaucaucgugcugcucauggucgugaccagcuccgccgaccgcaucugcaccggcaucacgagcuccaacagcccccacguggucaagaccgcgacccagggggaggugaacgugaccggcgucaucccgcugacgaccacccccaccaagucccacuucgccaaccugaaggggacggagacccggggcaagcucugccccaagugccugaacugcaccgaccuggacguggcccucgggcgccccaagugcaccggcaagaucccgagcgcccggguguccauccugcacgagguccgccccgugacgagcggcugcuuccccaucaugcacgaccggaccaagauccgccagcugcccaaccuccugcggggguacgagcacgugcgccuguccacccacaacgucaucaacgccgagggcgcgcccgggggccccuacaagaucgggaccagcggcuccugccccaacaucacgaacggcaacggguucuucgccaccauggccugggccgugcccgacaagaacaagaccgcgaccaacccgcucacgaucgaggugcccuacgucugcaccgagggcgaggaccagaucaccguguggggguuccacagcgacaccgagacgcagauggccaagcuguacggcgacuccaagccccagaaguucaccagcuccgccaacggcgugaccacccacuacgucagccagaucgggggcuuccccaaccagacggaggacgggggccggccgcaguccgggcgcaucgugguggacuacaugguccagaaguccggcaagaccggcaccaucaccuaccagcgggggauccugcucccccagaagguguggugcgccagcggccgcagcaaggugaucaaggggagccugccccugaucggcgaggccgacugccuccacgagaaguacgggggccugaacaaguccaagcccuacuacacgggcgagcacgcgaaggccaucgggaacugcccgaucugggucaagacgccccugaagcucgccaacggcaccaaguaccggccgcccgccaagcugcugaaggagcgcggguucuucggcgccaucgcgggguuccucgagggcggcugggaggggaugaucgccggcuggcacggguacaccagccacggcgcccacggcguggccgucgccgcggaccugaaguccacccaggaggccaucaacaagaucaccaagaaccugaacagccucuccgagcuggaggugaagaaccugcagcggcucagcggggccauggacgagcugcacaacgagauccuggagcucgacgagaagguggacgaccugcgcgccgacaccaucuccagccagaucgagcuggccguccuccuguccaacgagggcaucaucaacagcgaggacgagcaccuccuggcgcuggagcggaagcugaagaagaugcucgggccguccgccguggagaucggcaacgggugcuucgagaccaagcacaagugcaaccagaccugccuggacaagaucgccgccggcacguucgacgcgggcgaguucagccugcccaccuucgacucccucaacaucaccgccgccagccugaacgacgacgggcuggacaaccacaccauccugcucuacuacuccacggccgccagcucccuggcggugacccugaugaucgccaucuucgucguguacauggugagccgcgacaacgucuccugcagcaucugccucuga

SEQ ID NO: 14260 - RNA, 1749 nt, Artificial Sequence
  FLUBV/H0N0/B/Washington/02/2019__EPI1368874 hemagglutinin CDS gc (HA)
augaaggccaucaucgugcugcucauggucgugaccagcaacgccgaccgcaucugcaccggcaucacguccagcaacagcccccacguggucaagaccgcgacccagggggaggugaacgugaccggcgucaucccgcugacgaccacccccaccaagagccacuucgccaaccugaaggggacggagacccggggcaagcucugccccaagugccugaacugcaccgaccuggacguggcccucgggcgccccaagugcaccggcaagaucccguccgcccgggugagcauccugcacgagguccgccccgugacguccggcugcuuccccaucaugcacgaccggaccaagauccgccagcugcccaaccuccugcggggguacgagcacgugcgccugagcacccacaacgucaucaacgccgaggacgcgccgggccggcccuacgagaucgggaccuccggcagcugccccaacaucacgaacgggaacggcuucuucgccaccauggccugggccgugcccaagaacaagaccgcgaccaacccgcucacgaucgaggugcccuacaucugcaccgagggcgaggaccagaucaccgucuggggguuccacuccgacaacgagacccagauggccaagcuguacggcgacagcaagccccagaaguucacguccagcgccaacggggugaccacccacuacgugucccagaucggcggcuuccccaaccagaccgaggacgggggccugccgcagagcgggcgcaucgucguggacuacauggugcagaaguccggcaagacggggaccaucaccuaccagcggggcauccuccugccccagaaggucuggugcgccagcggccgcuccaaggugaucaaggggagccugccccucaucggcgaggccgacugccugcacgagaaguacgggggccugaacaagagcaagcccuacuacaccggggagcacgcgaaggccaucggcaacugcccgaucugggugaagacgccccucaagcuggccaacggcaccaaguaccggccgcccgccaagcugcucaaggagcgcggguucuucggcgccaucgcgggguuccuggagggcgggugggagggcaugaucgccggcuggcacggguacaccucccacggcgcccacggggucgccguggccgcggaccugaaguccacccaggaggccaucaacaagaucacgaagaaccucaacucccugagcgagcuggaggucaagaaccuccagcggcuguccggcgccauggacgagcugcacaacgagauccucgagcuggacgagaagguggacgaccugcgcgccgacaccaucagcucccagaucgagcucgccgugcugcugagcaacgagggcaucaucaacuccgaggacgagcaccuccuggcgcuggagcggaagcucaagaagaugcuggggcccagcgccgucgagaucggcaacgggugcuucgagaccaagcacaagugcaaccagaccugccuggaccgcaucgccgccggcaccuucgacgcgggggaguucucccuccccacguucgacagccugaacaucaccgccgccucccugaacgacgacggccuggacaaccacaccauccuccuguacuacagcaccgccgccuccagccuggcggugacgcucaugaucgccaucuucguggucuacauggugucccgggacaacgugagcugcuccaucugccuguga

SEQ ID NO: 14261 - RNA, 1749 nt, Artificial Sequence
  FLUBV/H0N0/B/Washington/02/2019__EPI1422452 hemagglutinin CDS gc (HA)
augaaggccaucaucgugcugcucauggucgugaccagcaacgccgaccgcaucugcaccggcaucacguccagcaacagcccccacguggucaagaccgcgacccagggggaggugaacgugaccggcgucaucccgcugacgaccacccccaccaagagccacuucgccaaccugaaggggacggagacccggggcaagcucugccccaagugccugaacugcaccgaccuggacguggcccucgggcgccccaagugcaccggcaagaucccguccgcccgggugagcauccugcacgagguccgccccgugacguccggcugcuuccccaucaugcacgaccggaccaagauccgccagcugcccaaccuccugcggggguacgagcacgugcgccugagcacccacaacgucaucaacgccgaggacgcgccgggccggcccuacgagaucgggaccuccggcagcugccccaacaucacgaacgggaacggcuucuucgccaccauggccugggccgugcccaagaacaagaccgcgaccaacccgcucacgaucgaggugcccuacaucugcaccgagggcgaggaccagaucaccgucuggggguuccacuccgacagcgagacccagauggccaagcuguacggcgacuccaagccccagaaguucacgagcuccgccaacggggugaccacccacuacgugagccagaucggcggcuuccccaaccagaccgaggacgggggccugccgcaguccgggcgcaucgucguggacuacauggugcagaaguccggcaagacggggaccaucaccuaccagcggggcauccuccugccccagaaggucuggugcgccuccggccgcagcaaggugaucaaggggagccugccccucaucggcgaggccgacugccugcacgagaaguacgggggccugaacaaguccaagcccuacuacaccggggagcacgcgaaggccaucggcaacugcccgaucugggugaagacgccccucaagcuggccaacggcaccaaguaccggccgcccgccaagcugcucaaggagcgcggguucuucggcgccaucgcgggguuccuggagggcgggugggagggcaugaucgccggcuggcacggguacaccagccacggcgcccacggggucgccguggccgcggaccugaaguccacccaggaggccaucaacaagaucacgaagaaccucaacagccuguccgagcuggaggucaagaaccuccagcggcugagcggcgccauggacgagcugcacaacgagauccucgagcuggacgagaagguggacgaccugcgcgccgacaccaucuccagccagaucgagcucgccgugcugcuguccaacgagggcaucaucaacagcgaggacgagcaccuccuggcgcuggagcggaagcucaagaagaugcuggggcccuccgccgucgagaucggcaacgggugcuucgagaccaagcacaagugcaaccagaccugccuggaccgcaucgccgccggcaccuucgacgcgggggaguucagccuccccacguucgacucccugaacaucaccgccgccagccugaacgacgacggccuggacaaccacaccauccuccuguacuacuccaccgccgccagcucccuggcggugacgcucaugaucgccaucuucguggucuacauggugagccgggacaacguguccugcagcaucugccuguga

SEQ ID NO: 14262 - RNA, 1410 nt, Artificial Sequence
  FLUAV/H1N1/A/California/7/2009__GQ906802 neuraminidase CDS gc (NA)
augaaccccaaccagaagaucaucaccaucggcuccgugugcaugaccaucgggauggccaaccugauccuccagaucggcaacaucaucuccaucuggaucucccacuccauccagcuggggaaccagaaccagaucgagacgugcaaccaguccgucaucaccuacgagaacaacaccugggugaaccagaccuacgugaacaucuccaacacgaacuucgccgcgggccaguccgucguguccgugaagcuggccgggaacagcucccucugcccggucuccggcugggccaucuacuccaaggacaacuccgugcggaucggcuccaagggggacgucuucgugauccgcgagccguucaucuccugcuccccccuggagugccggaccuucuuccugacccagggcgcccuccugaacgacaagcacuccaacgggaccaucaaggaccgcucccccuaccggacgcugauguccugcccgaucggcgaggugcccucccccuacaacucccgcuucgaguccgucgccugguccgcguccgccugccacgacgggaucaacuggcucaccaucggcaucuccggccccgacaacggggccguggccgugcugaaguacaacggcaucaucaccgacaccaucaaguccuggcggaacaacauccugcgcacgcaggaguccgagugcgcgugcgucaacggguccugcuucaccgugaugaccgacggcccguccaacggccaggccuccuacaagaucuuccggaucgagaaggggaagaucgugaaguccgucgagaugaacgcccccaacuaccacuacgaggagugcuccugcuaccccgacuccuccgagaucaccugcgugugccgcgacaacuggcacggcuccaaccggcccuggguguccuucaaccagaaccucgaguaccagaucggguacaucugcuccggcaucuucggggacaacccgcgccccaacgacaagacgggcuccugcggccccgucuccagcaacggggccaacggcgugaagggguucuccuucaaguacggcaacgggguguggaucggccggaccaaguccaucuccucccgcaacggcuucgagaugaucugggaccccaacggguggaccggcaccgacaacaacuucuccaucaagcaggacaucgucgggaucaacgagugguccggcuacuccggguccuucgugcagcacccggagcugacgggccuggacugcauccggcccugcuucuggguggagcucauccgcggccggcccaaggagaacaccaucuggaccuccggguccuccaucuccuucugcggcgucaacuccgacaccguggggugguccuggcccgacggcgccgagcugccguucacgaucgacaaguga

SEQ ID NO: 14263 - RNA, 1410 nt, Artificial Sequence
  FLUAV/H1N1/A/Michigan/45/2015__EPI662593 neuraminidase CDS gc (NA)
augaaccccaaccagaagaucaucaccaucggcagcaucugcaugaccaucgggauggccaaccugauccuccagaucggcaacaucaucuccaucugggugagccacuccauccagaucgggaaccagagccagaucgagacgugcaaccaguccgucaucaccuacgagaacaacaccugggugaaccagaccuacgugaacaucagcaacacgaacuucgccgcgggccaguccgucgugagcgugaagcuggccgggaacuccagccugugcccggucuccggcugggccaucuacagcaaggacaacuccgugcgcaucggcagcaagggggacguguucgucauccgggagcccuucaucuccugcagcccccucgagugccgcaccuucuuccugacccagggcgcccugcucaacgacaagcacuccaacgggaccaucaaggaccggagccccuaccgcacgcugauguccugcccgaucggcgaggugcccagccccuacaacagccgguucgaguccguggccuggagcgcguccgccugccacgacgggaucaacuggcugaccaucggcaucagcggccccgacuccggggccgucgccgugcucaaguacaacggcaucaucaccgacaccaucaagagcuggcgcaacaacauccugcggacgcaggaguccgagugcgcgugcgugaacgggagcugcuucaccaucaugaccgacggcccguccgacggccaggccagcuacaagaucuuccgcaucgagaaggggaagaucaucaaguccgucgagaugaaggcccccaacuaccacuacgaggagugcagcugcuaccccgacuccagcgagaucacgugcgugugccgggacaacuggcacggcuccaaccgccccugggugagcuucaaccagaaccuggaguaccagaugggguacaucugcuccggcgucuucggggacaacccgcggcccaacgacaagaccggcagcugcggccccguguccagcaacggggccaacggcgugaagggguucagcuucaaguacggcaacggggucuggaucggccgcaccaaguccaucagcucccggaagggcuucgagaugaucugggaccccaacggguggaccggcaccgacaacaaguucagcaucaagcaggacaucguggggaucaacgagugguccggcuacagcggguccuucgugcagcacccggagcucacgggccuggacugcauccgccccugcuucugggucgagcugauccggggccgccccgaggagaacaccaucuggaccagcggguccagcaucuccuucugcggcgugaacagcgacaccgucgggugguccuggcccgacggcgccgagcucccguucacgaucgacaaguga

SEQ ID NO: 14264 - RNA, 1410 nt, Artificial Sequence
  FLUAV/H1N1/A/Netherlands/602/2009__AGU92703 neuraminidase CDS gc (NA)
augaaccccaaccagaagaucaucaccaucggcagcgugugcaugaccaucgggauggccaaccugauccuccagaucggcaacaucaucuccaucuggaucagccacuccauccagcuggggaaccagaaccagaucgagacgugcaaccagagcgucaucaccuacgagaacaacaccugggugaaccagaccuacgugaacaucuccaacacgaacuucgccgcgggccagagcgucguguccgugaagcuggccgggaacagcucccucugcccggucagcggcugggccaucuacuccaaggacaacagcgugcgggugggcuccaagggggacgucuucgugauccgcgagccguucaucagcugcuccccccuggagugccggaccuucuuccugacccagggcgcccuccugaacgacaagcacagcaacgggaccaucaaggaccgcucccccuaccggacgcugaugagcugcccgaucggcgaggugcccucccccuacaacagccgcuucgagagcgucgccugguccgcgagcgccugccacgacgggaucaacuggcucaccaucggcaucuccggccccgacaacggggccguggccgugcugaaguacaacggcaucaucaccgacaccaucaagagcuggcggaacaacauccugcgcacgcaggaguccgagugcgcgugcgucaacgggagcugcuucaccgugaugaccgacggcccguccaacggccaggccagcuacaagaucuuccggaucgagaaggggaagaucgugaaguccgucgagaugaacgcccccaacuaccacuacgaggagugcagcugcuaccccgacuccagcgagaucaccugcgugugccgcgacaacuggcacggcuccaaccggcccugggugagcuucaaccagaaccucgaguaccagaucggguacaucugcuccggcaucuucggggacaacccgcgccccaacgacaagacgggcagcugcggccccgucuccagcaacggggccaacggcgugaagggguucuccuucaaguacggcaacgggguguggaucggccggaccaagagcaucagcucccgcaacggcuucgagaugaucugggaccccaacggguggaccggcaccgacaacaacuucagcaucaagcaggacaucgucgggaucaacgagugguccggcuacagcggguccuucauccagcacccggagcugacgggccuggacugcauccggcccugcuucuggguggagcucauccgcggccggcccaaggagaacaccaucuggaccagcggguccagcaucuccuucugcggcgucaacagcgacaccguggggugguccuggcccgacggcgccgagcugccguucacgaucgacaaguga

SEQ ID NO: 14265 - RNA, 1410 nt, Artificial Sequence
  FLUAV/H3N2/A/Hong Kong/4801/2014__EPI578429 neuraminidase CDS gc (NA)
augaaccccaaccagaagaucaucaccaucggcuccgugucccugaccaucuccacgaucugcuucuucaugcagaucgccauccucaucaccaccgucacccugcacuucaagcaguacgaguucaacuccccgcccaacaaccaggugaugcugugcgagcccacgaucaucgagcgcaacaucaccgagaucguguaccucaccaacaccacgaucgagaaggagaucugccccaagccggccgaguaccggaacugguccaagccccagugcgggaucaccggcuucgcgcccuucuccaaggacaacuccauccgccuguccgccgggggcgacaucugggucacccgggagcccuacguguccugcgacccggacaagugcuaccaguucgcccuggggcagggcaccacgcucaacaacgugcacuccaacaacaccguccgcgaccggacccccuaccgcacccugcugaugaacgagcucggcgugcccuuccaccuggggacgaagcaggucugcaucgccugguccuccagcuccugccacgacggcaaggccuggcugcacgucugcaucaccggggacgacaagaacgcgaccgccuccuucaucuacaacggccggcucguggacuccguggucagcugguccaaggacauccugcgcacccaggaguccgagugcaucugcaucaacgggacgugcaccguggugaugaccgacggcuccgccuccggcaaggccgacaccaagauccuguucaucgaggaggggaagaucguccacacguccacccucuccggcuccgcgcagcacguggaggagugcuccugcuacccccgguacccgggggugcgcugcgucugccgggacaacuggaagggcuccaaccgcccgaucguggacaucaacaucaaggaccacuccaucgugagcuccuacgucugcuccggccuggugggggacaccccgcggaagaacgacuccagcuccagcucccacugccuggaccccaacaacgaggagggcgggcacggcgugaaggggugggccuucgacgacggcaacgacgucuggaugggccgcaccaucaacgagacgucccggcucggguacgagaccuucaaggugaucgagggcugguccaacccgaaguccaagcugcagaccaaccgccaggucaucguggaccggggcgaccgcuccggguacuccgggaucuucuccguggagggcaaguccugcaucaaccggugcuucuacgucgagcugauccgcggccggaaggaggagaccgaggugcucuggacgagcaacuccaucguggucuucugcgggaccagcggcaccuacgggaccggcuccuggcccgacggggccgaccugaaccugaugcccaucuga

SEQ ID NO: 14266 - RNA, 1401 nt, Artificial Sequence
  FLUBV/H0N0/B/Brisbane/60/2008__EPI173278 neuraminidase CDS gc (NA)
augcugcccagcaccauccagacccucacgcuguuccugaccuccggcggggugcuccugagccuguacgucuccgccagccucuccuaccugcuguacagcgacauccuccugaaguucuccccgaccgagaucaccgcccccacgaugccccuggacugcgcgaacgccagcaacgugcaggccgugaaccgcuccgccaccaagggcgucacccuccugcugcccgagccggaguggaccuacccccggcucagcugccccggguccacguuccagaaggcccugcugaucagcccccaccgcuucggcgagaccaaggggaacuccgcgccgcucaucauccgggagcccuucaucgccugcggccccaacgagugcaagcacuucgcccugacccacuacgccgcgcagcccggcggguacuacaacggcacccgcggggaccggaacaagcugcgccaccucaucagcgugaagcugggcaagaucccgacgguggagaacuccaucuuccacauggccgccuggagcggguccgccugccacgacggcaaggaguggaccuacaucggcgucgacgggcccgacaacaacgcccugcucaaggugaaguacggcgaggcguacaccgacaccuaccacagcuacgccaacaagauccugcggacgcaggaguccgccugcaacugcaucgggggcaacugcuaccugaugaucaccgacggcagcgccagcgggguguccgagugccgcuuccucaagauccgggagggccgcaucaucaaggagaucuuccccaccgggcgggucaagcacaccgaggagugcacgugcggcuucgccagcaacaagaccaucgagugcgcgugccgcgacaacuccuacaccgccaagcggcccuucgugaagcugaacguggagaccgacacggccgagauccgccugaugugcaccgacaccuaccucgacaccccgcggcccaacgacgggagcaucacgggccccugcgaguccaacggcgacaaggggagcggcgggaucaagggcggguucguccaccagcgcauggaguccaagaucggccggugguacagccgcaccauguccaagaccgagcggaugggcauggggcuguacgugaaguacgacggcgaccccugggccgacagcgacgcccuggcguucuccggggugauggucagcaugaaggagccgggcugguacuccuucggguucgagaucaaggacaagaagugcgacgugcccugcaucggcaucgagauggugcacgacggcgggaaggagaccuggcacagcgccgccacggccaucuacugccucaugggcuccgggcagcugcugugggacaccgucaccggcguggacauggcccucuga

SEQ ID NO: 14267 - RNA, 1401 nt, Artificial Sequence
  FLUBV/H0N0/B/Phuket/3073/2013__EPI540672 neuraminidase CDS gc (NA)
augcugcccagcaccauccagacccucacgcuguuccugaccuccggcggggugcuccugagccuguacgucuccgccagccucuccuaccugcuguacagcgacauccuccugaaguucucccgcaccgaggugaccgccccgaucaugccccuggacugcgcgaacgccagcaacgugcaggccgucaaccgguccgccacgaagggcgugacgccccuccugcccgagccggaguggaccuacccccgccugagcugccccggguccaccuuccagaaggcccuccugaucagcccccaccgguucggcgagaccaaggggaacuccgcgccgcugaucauccgcgagcccuucaucgccugcggccccaaggagugcaagcacuucgcccucacccacuacgccgcgcagcccggcggguacuacaacggcacccgggaggaccgcaacaagcugcggcaccugaucagcgugaagcucgggaagaucccgaccgucgagaacuccaucuuccacauggccgccuggagcggcuccgccugccacgacgggcgcgaguggacguacaucggcguggacggccccgacagcaacgcccugcugaagaucaaguacggggaggcguacaccgacaccuaccacuccuacgccaagaacauccuccggacccaggagagcgccugcaacugcaucggcggggacugcuaccugaugaucacggacggccccgccagcggcaucuccgagugccgcuuccugaagauccgggaggggcgcaucaucaaggagaucuuccccaccggccgggugaagcacaccgaggagugcacgugcggguucgccagcaacaagaccaucgagugcgcgugccgcgacaacuccuacaccgccaagcggccguucgucaagcucaacguggagaccgacaccgccgagauccgccugaugugcacgaagaccuaccuggacacgccccggcccaacgacggcagcaucaccgggcccugcgaguccgacggcgacgagggcagcgggggcaucaagggcggguucgugcaccagcgcauggccuccaagaucgggcggugguacagccgcaccauguccaagaccaagcggaugggcaugggccucuacgucaaguacgacggggacccguggaccgacagcgaggcccuggcgcuguccggcgugauggugagcauggaggagcccgggugguacuccuucggcuucgagaucaaggacaagaagugcgacguccccugcaucgggaucgagauggugcacgacggcggcaagaccacguggcacagcgccgccaccgccaucuacugccucaugggguccggccagcugcugugggacaccgugaccggggucaacaugacgcucuga

SEQ ID NO: 14268 - RNA, 1410 nt, Artificial Sequence
  FLUAV/H1N1/A/Brisbane/02/2018__EPI1212833 neuraminidase CDS gc (NA)
augaaccccaaccagaagaucaucaccaucggcagcacgugcaugaccaucgggauggccaaccugauccuccagaucggcaacaucaucuccaucugggugagccacuccauccagaucgggaaccagagccagaucgagaccugcaaccaguccgucaucaccuacgagaacaacaccugggugaaccagacguacgugaacaucagcaacaccaacuucgccgcgcgccaguccgucgccagcgugaagcuggccggcaacuccagccugugcccgguguccgggugggccaucuacagcaaggacaacuccguccggaucggcagcaagggcgacguguucgugauccgcgagcccuucaucuccugcagcccccucgagugccggaccuucuuccugacccagggggcccugcucaacgacaagcacuccaacggcacgaucaaggaccgcagccccuaccggacccugauguccugcccgaucggggagguccccagccccuacaacagccgcuucgaguccguggcguggagcgccuccgccugccacgacggcaccaacuggcugaccaucgggaucagcggccccgacuccggcgccguggcgguccucaaguacaacgggaucaucacggacaccaucaagagcuggcggaacaacauccugcgcacccaggaguccgagugcgccugcgugaacggcagcugcuucaccaucaugacggacgggccguccgacggccaggccagcuacaagaucuuccggaucgagaagggcaagaucaucaaguccguggagaugaaggcccccaacuaccacuacgaggagugcagcugcuaccccgacuccagcgagaucacgugcgucugccgcgacaacuggcacggguccaaccggcccugggugagcuucaaccagaaccuggaguaccagaugggcuacaucugcuccgggguguucggcgacaacccgcgccccaacgacaagaccgggagcugcggccccgucuccagcaacggcgccaacggggugaagggcuucagcuucaaguacgggaacggcguguggaucgggcggaccaaguccaucagcucccgcaagggcuucgagaugaucugggaccccaacggcuggaccgggaccgacaacaaguucagcaucaagcaggacaucgucggcaucaacgagugguccggguacagcggcuccuucgugcagcacccggagcucaccgggcuggacugcauccggcccugcuucuggguggagcugauccgcggccggcccgaggagaacaccaucuggacgagcggcuccagcaucuccuucugcggggucgacagcgacaccgugggcugguccuggcccgacggggcggagcucccguucaccaucgacaaguga

SEQ ID NO: 14269 - RNA, 1410 nt, Artificial Sequence
  FLUAV/H1N1/A/Guangdong-Maonan/SWL1536/2019__EPI1542569 neuraminidase CDS gc (NA)
augaaccccaaccagaagaucaucaccaucggcagcaucugcaugaccaucgggauggccaaccugauccuccagaucggcaacaucaucuccaucugggugagccacuccauccagaucgggaaccagagccagaucgagacgugcaacaagaacgucaucaccuacgagaacaacaccugggugaaccagaccuacgugaacaucuccaacacgaacagcgccgcgcgccaguccgucgccagcgugaagcuggccggcaacuccagccugugcccgguguccgggugggccaucuacagcaaggacaacuccguccggaucggcagcaagggcgacguguucgugauccgcgagcccuucaucuccugcagcccccucgagugccggaccuucuuccugacccagggggcccugcucaacgacaagcacuccaacggcaccaucaaggaccgcagccccuaccggacgcugauguccugcccgaucggggagguccccagccccuacaacagccgcuucgaguccguggcguggagcgccuccgccugccacgacggcaccaacuggcugaccaucgggaucagcggccccgacuccggcgccguggcgguccucaaguacaacgggaucaucaccgacacgaucaagagcuggcggaacaacauccugcgcacccaggaguccgagugcgccugcgugaacggcagcugcuucaccaucaugaccgacgggccguccgacggccaggccagcuacaagaucuuccggaucgagaagggcaagaucaucaaguccguggagaugaaggcccccaacuaccacuacgaggagugcagcugcuaccccgacuccagcgagaucacgugcgucugccgcgacaacuggcacggguccaaccggcccugggugagcuucaaccagaaccuggaguaccagaugggcuacaucugcuccgggguguucggcgacaacccgcgccccaacgacaagaccgggagcugcggccccgucuccagcaacggcgccaacggggugaagggcuucagcuucaaguacgggaacggcguguggaucgggcggaccaaguccaucagcucccgcaagggcuucgagaugaucugggaccccaacggcuggaccgggacggacaacaaguucagcaagaagcaggacaucgucggcaucaacgagugguccggguacagcggcuccuucgugcagcacccggagcucaccgggcugaacugcauccggcccugcuucuggguggagcugauccgcggccggcccgaggagaacaccaucuggaccagcggcuccagcaucuccuucugcggggucgacagcgacaucgugggcugguccuggcccgacggggcggagcucccguucacgaucgacaaguga

SEQ ID NO: 14270 - RNA, 1410 nt, Artificial Sequence
  FLUAV/H3N2/A/Singapore/INFIMH-16-0019/2016__EPI1047603 neuraminidase CDS gc (NA)
augaaccccaaccagaagaucaucaccaucggcagcgugucccugaccaucagcacgaucugcuucuucaugcagaucgccauccucaucaccaccgucacccugcacuucaagcaguacgaguucaacuccccgcccaacaaccaggugaugcugugcgagcccacgaucaucgagcgcaacaucaccgagaucguguaccucaccaacaccacgaucgagaaggagaucugccccaagccggccgaguaccggaacuggagcaagccccagugcgggaucaccggcuucgcgcccuucuccaaggacaacagcauccgccuguccgccgggggcgacaucugggucacccgggagcccuacgugagcugcgacccggacaagugcuaccaguucgcccuggggcagggcaccacgcucaacaacgugcacuccaacaacaccguccgcgaccggacccccuaccgcacccugcugaugaacgagcucggcgugcccuuccaccuggggacgaagcaggucugcaucgccuggagcuccagcuccugccacgacggcaaggccuggcugcacgugugcaucaccggggacgacaagaacgcgaccgccagcuucaucuacaacggccggcucaucgacuccguggugagcugguccaaggacauccugcgcacccaggagagcgagugcgucugcaucaacgggacgugcaccguggugaugaccgacggcaacgccaccggcaaggccgacacgaagauccuguucaucgaggaggggaagaucguccacaccuccaagcucagcggcagcgcgcagcacguggaggagugcuccugcuacccccgguacccgggggugcgcugcgucugccgggacaacuggaagggcagcaaccgccccaucguggacaucaacaucaaggaccacuccaucgugagcuccuacgucugcagcggccuggugggggacaccccgcggaagaacgacuccagcuccagcucccacugccugaaccccaacaacgaggagggcgggcacggcgugaaggggugggccuucgacgacggcaacgacgucuggaugggccgcaccaucaacgagacgagccggcucggguacgagaccuucaagguggucgagggcugguccaaccccaagagcaagcugcagaucaaccgccaggugaucguggaccgcggggaccgguccggcuacagcgggaucuucuccgucgagggcaagagcugcaucaaccggugcuucuacguggagcugauccgcggccggaaggaggagaccgaggugcucuggaccuccaacagcaucgucguguucugcgggacgagcggcaccuacgggaccggcuccuggcccgacggggccgaccugaaccugaugcacaucuga

SEQ ID NO: 14271 - RNA, 1410 nt, Artificial Sequence
  FLUAV/H3N2/A/Kansas/14/2017__EPI1146344 neuraminidase CDS gc (NA)
augaaccccaaccagaagaucaucaccaucggcagcgugucccugaccaucagcacgaucugcuucuucaugcagaucgccauccucaucaccaccgucacccugcacuucaagcaguacgaguucaacuccccgcccaacaaccaggugaugcugugcgagcccacgaucaucgagcgcaacaucaccgagaucguguaccucaccaacaccacgaucgagcgggagaucugccccaagccggccgaguaccgcaacuggagcaagccccagugcgggaucaccggcuucgcgcccuucuccaaggacaacagcauccggcuguccgccgggggcgacaucugggucacccgcgagcccuacgugagcugcgacccggacaagugcuaccaguucgcccuggggcagggcaccacgaucaacaacgugcacuccaacaacaccgcccgggaccgcaccccgcaccggacccuccugaugaacgagcugggcguccccuuccaccucgggacgaagcaggucugcaucgccuggagcuccagcuccugccacgacggcaaggcguggcugcacgugugcaucaccggggacgacaagaacgccaccgccagcuucaucuacaacggccgccugguggacuccguggugagcugguccaaggacauccuccggacccaggagagcgagugcgucugcaucaacgggacgugcaccguggugaugaccgacggcaacgccaccggcaaggcggacacgaagauccuguucaucgaggaggggaagaucguccacaccuccaagcugagcggcagcgcccagcacguggaggagugcuccugcuacccccgcuacccgggggugcggugcgucugccgcgacaacuggaagggcagcaaccggcccaucguggacaucaacaucaaggaccacuccaucgugagcuccuacgucugcagcggccucgugggggacacgccccgcaagaccgacuccagcuccagcucccacugccugaaccccaacaacgagaagggcgggcacggcgugaaggggugggccuucgacgacggcaacgacgucuggaugggccggaccaucaacgagaccagccgccugggguacgagaccuucaagguggucgagggcugguccaaccccaagagcaagcuccagaucaaccggcaggucaucguggaccgcggggaccgguccggcuacagcgggaucuucuccguggagggcaagagcugcaucaaccgcugcuucuacguggagcugauccggggccgcaaggaggagaccgaggugcuguggacguccaacagcaucgucguguucugcgggaccagcggcaccuacgggaccggcuccuggcccgacggggccgaccucaaccugaugcacaucuga

SEQ ID NO: 14272 - RNA, 1410 nt, Artificial Sequence
  FLUAV/H3N2/A/Kansas/14/2017-CDC-LV24A__EPI1444881 neuraminidase CDS gc (NA)
augaaccccaaccagaagaucaucaccaucggcagcgugucccugaccaucagcacgaucugcuucuucaugcagaucgccauccucaucaccaccgucacccugcacuucaagcaguacgaguucaacuccccgcccaacaaccaggugaugcugugcgagcccacgaucaucgagcgcaacaucaccgagaucguguaccucaccaacaccacgaucgagcgggagaucugccccaagccggccgaguaccgcaacuggagcaagccccagugcgggaucaccggcuucgcgcccuucuccaaggacaacagcauccggcuguccgccgggggcgacaucugggucacccgcgagcccuacgugagcugcgacccggacaagugcuaccaguucgcccuggggcagggcaccacgaucaacaacgugcacuccaacaacaccgcccgggaccgcacgccccaccggacccuccugaugaacgagcugggcguccccuuccaccucgggaccaagcaggucugcaucgccuggagcuccagcuccugccacgacggcaaggcguggcugcacgugugcaucaccggggacgacaagaacgccaccgccagcuucaucuacaacggccgccugguggacuccguggugagcugguccaaggacauccuccggacccaggagagcgagugcgucugcaucaacgggacgugcaccguggugaugaccgacggcaacgccaccggcaaggcggacacgaagauccuguucaucgaggaggggaagaucguccacaccuccaagcugagcggcagcgcccagcacguggaggagugcuccugcuacccccgcuacccgggggugcggugcgucugccgcgacaacuggaagggcagcaaccggcccaucguggacaucaacaucaaggaccacuccaucgugagcuccuacgucugcagcggccucgugggggacacgccccgcaagaccgacaacuccagcuccagccacugccugaaccccaacaacgagaagggcgggcacggcgugaaggggugggccuucgacgacggcaacgacgucuggaugggccggaccaucaacgagaccucccgccugggguacgagaccuucaagguggucgagggcuggagcaacccgaaguccaagcuccagaucaaccggcaggucaucguggaccgcggggaccggagcggcuacuccgggaucuucagcguggagggcaaguccugcaucaaccgcugcuucuacguggagcugauccggggccgcaaggaggagaccgaggugcuguggacgagcaacuccaucgucguguucugcgggaccagcggcaccuacgggaccggcagcuggcccgacggggccgaccucaaccugaugcacaucuga

SEQ ID NO: 14273 - RNA, 1410 nt, Artificial Sequence
  FLUAV/H3N2/A/Switzerland/8060/2017__EPI1154879 neuraminidase CDS gc (NA)
augaaccccaaccagaagaucaucaccaucggcagcgugucccugaccaucagcacgaucugcuucuucaugcagaucgccauccucaucaccaccgucacccugcacuucaagcaguacgaguucaacuccccgcccaacaaccaggugaugcugugcgagcccacgaucaucgagcgcaacaucaccgagaucguguaccucaccaacaccacgaucgagaaggagaucugccccaagccggccgaguaccggaacuggagcaagccccagugcgggaucaccggcuucgcgcccuucuccaaggacaacagcauccgccuguccgccgggggcgacaucugggucacccgggagcccuacgugagcugcgacccggacaagugcuaccaguucgcccuggggcagggcaccacgcucaacaacgugcacuccaacaacaccguccgcgaccggacccccuaccgcacccugcugaugaacgagcucggcgugcccuuccaccuggggacgaagcaggucugcauggccuggagcuccagcuccugccacgacggcaaggccuggcugcacgugugcgugaccggggacgacaagaacgcgaccgccagcuucaucuacaacggccggcucguggacuccgucgugagcugguccaaggacauccugcgcacccaggagagcgagugcgugugcaucaacgggacgugcaccgucgugaugaccgacggcaacgccaccggcaaggccgacacgaagauccuguucaucgaggaggggaagaucgugcacaccuccaagcucagcggcagcgcgcagcacgucgaggagugcuccugcuacccccgguacccgggggugcgcugcgugugccgggacaacuggaagggcagcaaccgccccaucgucgacaucaacaucaaggaccacuccaucgugagcuccuacgugugcagcggccuggucggggacacgccccggaaguccgacagcuccagcuccagccacugccugaaccccaacaacgaggagggcgggcacggcgugaaggggugggccuucgacgacggcaacgacgucuggaugggccgcaccaucaacgagaccucccggcucggguacgagaccuucaaggugguggagggcuggagcaacuccaagagcaagcugcagaucaaccgccaggucaucguggaccgcggggaccgguccggcuacagcgggaucuucuccguggagggcaagagcugcaucaaccggugcuucuacgucgagcugauccgcggccggaaggaggagaccgaggugcucuggaccagcaacuccaucguggucuucugcgggacgagcggcaccuacgggaccggcuccuggccggacggggccgaccugaaccugaugcacaucuga

SEQ ID NO: 14274 - RNA, 1410 nt, Artificial Sequence
  FLUAV/H3N2/A/Switzerland/8060/2017(H3N2)-CDC-LV21A__EPI1364258 neuraminidase CDS gc (NA)
augaaccccaaccagaagaucaucaccaucggcagcgugucccugaccaucagcacgaucugcuucuucaugcagaucgccauccucaucaccaccgucacccugcacuucaagcaguacgaguucaacuccccgcccaacaaccaggugaugcugugcgagcccacgaucaucgagcgcaacaucaccgagaucguguaccucaccaacaccacgaucgagaaggagaucugccccaagccggccgaguaccggaacuggagcaagccccagugcgggaucaccggcuucgcgcccuucuccaaggacaacagcauccgccuguccgccgggggcgacaucugggucacccgggagcccuacgugagcugcgacccggacaagugcuaccaguucgcccuggggcagggcaccacgcucaacaacgugcacuccaacaacaccguccgcgaccggacccccuaccgcacccugcugaugaacgagcucggcgugcccuuccaccuggggacgaagcaggucugcauggccuggagcuccagcuccugccacgacggcaaggccuggcugcacgugugcgugaccggggacgacaagaacgcgaccgccagcuucaucuacaacggccggcucguggacuccgucgugagcugguccaaggacauccugcgcacccaggagagcgagugcgugugcaucaacgggacgugcaccgucgugaugaccgacggcaacgccaccggcaaggccgacacgaagauccuguucaucgaggaggggaagaucgugcacaccuccaagcucagcggcagcgcgcagcacgucgaggagugcuccugcuacccccgguacccgggggugcgcugcgugugccgggacaacuggaagggcagcaaccgccccaucgucgacaucaacaucaaggaccacuccaucgugagcuccuacgugugcagccggcuggucggcgacacgccccgcaaguccgacagcuccagcuccagccacugccugaaccccaacaacgaggagggcgggcacggggugaagggcugggccuucgacgacgggaacgacgucuggaugggccggaccaucaacgagaccucccgccucggcuacgagaccuucaaggugguggagggguggagcaacuccaagagcaagcugcagaucaaccggcaggucaucguggaccgcggcgaccgguccggguacagcggcaucuucuccguggagggcaagagcugcaucaaccgcugcuucuacgucgagcugauccgggggcgcaaggaggagaccgaggugcucuggaccagcaacuccaucguggucuucugcggcacgagcgggaccuacggcaccggguccuggccggacggcgccgaccugaaccugaugcacaucuga

SEQ ID NO: 14275 - RNA, 1410 nt, Artificial Sequence
  FLUAV/H3N2/A/Hong Kong/2671/2019__EPI1543099 neuraminidase CDS gc (NA)
augaaccccaaccagaagaucaucaccaucggcagcgugucccugaccaucagcacgaucugcuucuucaugcagaucgccauccucaucaccaccgucacccugcacuucaagcaguacgaguucaacuccccgcccaacaaccaggugaugcugugcgagcccacgaucaucgagcgcaacaucaccgagaucguguaccucaccaacaccacgaucgagaaggagaucugccccaagccggccgaguaccggaacuggagcaagccccagugcgggaucaccggcuucgcgcccuucuccaaggacaacagcauccgccuguccgccgggggcgacaucugggucacccgggagcccuacgugagcugcgaccuggacaagugcuaccaguucgcccucgggcagggcaccacgcugaacaacgugcacuccaacaacaccguccgcgaccggaccccguaccgcacccugcucaugaacgagcugggcgugcccuuccaccuggggacgaagcaggucugcaucgccuggagcuccagcuccugccacgacggcaaggccuggcuccacgugugcaucaccggggacgacaagaacgcgaccgccagcuucaucuacaacggccggcugguggacuccguggucagcugguccaacgacauccugcgcacccaggagagcgagugcgugugcaucaacgggacgugcaccguggucaugaccgacggcaacgccaccggcaaggccgacacgaagauccucuucaucgaggaggggaagaucgugcacaccuccaagcugagcggcagcgcgcagcacguggaggagugcuccugcuacccccgguaccccgggguccgcugcgugugccgggacaacuggaagggcagcaaccgcccgaucaucgacaucaacaucaaggaccacuccaucgugagcuccuacgucugcagcggccuggugggggacacgccccggaaguccgacagcuccagcuccagccacugccucaaccccaacaacgaggagggcgggcacggcgugaaggggugggccuucgacgacggcaacgacgucuggaugggccgcaccaucaacgagaccucccggcugggguacgagaccuucaagguggucgagggcuggagcaaccccaaguccaagcugcagaucaaccgccaggugaucguggaccgcggggaccggagcggcuacuccgggaucuucagcgucgagggcaaguccugcaucaaccggugcuucuacguggagcucauccgcggccggaaggaggagaccgaggugcuguggaccagcaacagcaucgucguguucugcgggacguccggcaccuacgggaccggcagcuggccggacggggccgaccugaaccucaugcacaccuga

SEQ ID NO: 14276 - RNA, 1410 nt, Artificial Sequence
  FLUAV/H3N2/A/Hong Kong/45/2019__EPI1691929 neuraminidase CDS gc (NA)
augaaccccaaccagaagaucaucaccaucggcagcgugucccugaccaucagcacgaucugcuucuucaugcagaucgccauccucaucaccaccgucacccugcacuucaagcaguacgaguucaacucccugccgaacaaccaggugaugcucugcgagcccacgaucaucgagcgcaacaucaccgagaucguguaccugaccaacaccacgaucgagaaggagaucugccccaagcccgccgaguaccggaacuggagcaagccgcagugcgggaucaccggcuucgcgcccuucuccaaggacaacagcauccgccuguccgccgggggcgacaucugggucacccgggagcccuacgugagcugcgaccucgacaagugcuaccaguucgcccuggggcagggcaccacgcugaacaacgugcacuccaacaacaccguccgcgaccggacccccuaccgcacccuccugaugaacgagcugggcgugccguuccaccucgggacgaagcaggucugcaucgccuggagcuccagcuccugccacgacggcaaggccuggcugcacgugugcaucaccggggacgacaagaacgcgaccgccagcuucaucuacaacggccggcugguggacuccguggucagcugguccaacgacauccuccgcacccaggagagcgagugcgugugcaucaacgggacgugcaccguggucaugaccgacggcaacgccaccggcaaggccgacacgaagauccuguucaucgaggaggggaagaucgugcacaccuccaagcugagcggcagcgcgcagcacguggaggagugcuccugcuacccccgguaccccgggguccgcugcgugugccgggacaacuggaagggcagcaaccgccccaucaucgacaucaacaucaaggaccacuccaucgugagcuccuacgucugcagcggccucgugggggacaccccgcggaaguccgacagcuccagcuccagccacugccugaaccccaacaacgaggagggcgggcacggcgugaaggggugggccuucgacgacggcaacgacgucuggaugggccgcaccaucaacgagacgucccggcugggguacgagaccuucaagguggucgagggcuggagcaaccccaaguccaagcuccagaucaaccgccaggugaucguggaccgcggggaccggagcggcuacuccgggaucuucagcgucgagggcaaguccugcaucaaccggugcuucuacguggagcugauccgcggccggaaggaggagaccgaggugcuguggaccagcaacagcaucgucguguucugcgggacguccggcaccuacgggaccggcagcuggcccgacggggccgaccucaaccugaugcacaucuga

SEQ ID NO: 14277 - RNA, 1410 nt, Artificial Sequence
  FLUAV/H3N2/A/South Australia/34/2019__EPI1387330 neuraminidase CDS gc (NA)
augaaccccaaccagaagaucaucaccaucggcagcgugucccugaccaucagcacgaucugcuucuucaugcagaucgccauccucaucaccaccgucacccugcacuucaagcaguacgaguucaacuccccgcccaacaaccaggugaugcugugcgagcccacgaucaucgagcgcaacaucaccgagaucguguaccucaccaacaccacgaucgagaaggagaucugccccaagccggccgaguaccggaacuggagcaagccccagugcgggaucaccggcuucgcgcccuucuccaaggacaacagcauccgccuguccgccgggggcgacaucugggucacccgggagcccuacgugagcugcgaccuggacaagugcuaccaguucgcccucgggcagggcaccacgcugaacaacgugcacuccaacaacaccguccgcgaccggaccccguaccgcacccugcucaugaacgagcugggcgugcccuuccaccuggggacgaagcaggucugcaucgccuggagcuccagcuccugccacgacggcaaggccuggcuccacgugugcaucaccggggacgacaagaacgcgaccgccagcuucaucuacaacggccggcugguggacuccguggucagcugguccaacgacauccugcgcacccaggagagcgagugcgugugcaucaacgggacgugcaccguggucaugaccgacggcaacgccaccggcaaggccgacacgaagauccucuucaucgaggaggggaagaucgugcacaccuccaagcugagcggcagcgcgcagcacguggaggagugcuccugcuacccccgguaccccgggguccgcugcgugugccgggacaacuggaagggcagcaaccgcccgaucaucgacaucaacaucaaggaccacuccaucgugagccgguacgucugcuccggccuggugggggacacgccccgcaagagcgacuccagcuccagcucccacugccucaaccccaacaacgagaagggcgggcacggcgugaaggggugggccuucgacgacggcaacgacgucuggaugggccggaccaucaacgagaccagccgccugggguacgagaccuucaagguggucgagggcugguccaaccccaagagcaagcugcagaucaaccggcaggucaucguggaccgcggggaccgguccggcuacagcgggaucuucuccguggagggcaagagcugcaucaaccgcugcuucuacguggagcucauccggggccgcaaggaggagaccgaggugcuguggaccuccaacagcaucgucguguucugcgggacgagcggcaccuacgggaccggcuccuggccggacggggccgaccugaaccucaugcacaucuga

SEQ ID NO: 14278 - RNA, 1398 nt, Artificial Sequence
  FLUAV/H7N9/A/chicken/Zhejiang/C483/2013(H7N9)__AGN69396.1 neuraminidase CDS gc (NA)
augaaccccaaccagaagauccugugcaccagcgccaccgccaucaucaucggcgcgaucgccgugcucaucgggaucgccaaccugggccugaacaucgggcuccaccugaagccgggcugcaacugcucccacagccagcccgagacgaccaacaccucccagaccaucaucaacaacuacuacaacgagacgaacaucaccaacauccagauggaggagcgcaccagccggaacuucaacaaccugaccaaggggcucugcacgaucaacuccuggcacaucuacggcaaggacaacgccguccgcaucggcgagagcuccgacgugcuggugacccgggagcccuacgucagcugcgaccccgacgagugccgcuucuacgcccugucccaggggaccaccauccggggcaagcacagcaacgggacgauccacgaccgcucccaguaccgggcgcucaucagcuggccgcuguccagcccgcccaccguguacaacucccgcguggagugcaucggcuggagcuccaccagcugccacgacgggaagucccggaugagcaucugcaucagcggccccaacaacaacgccuccgccgucgugugguacaaccgccggcccguggccgagaucaacaccugggcgcgcaacauccugcggacgcaggagagcgagugcgucugccacaacggcgugugccccguggucuucaccgacggguccgccaccggccccgccgacacccgcaucuacuacuucaaggaggggaagauccucaagugggagagccugacgggcaccgccaagcacaucgaggagugcuccugcuacggcgagcggaccgggaucacgugcacgugccgcgacaacuggcagggcagcaaccggcccgugauccagaucgacccgguggccaugacccacaccucccaguacaucugcagccccguccugaccgacaacccccgccccaacgacccgaacaucgggaagugcaacgaccccuaccccggcaacaacaacaacggggugaagggcuucuccuaccucgacggcgcgaacaccuggcuggggcggaccaucagcaccgccucccgcagcggcuacgagaugcugaaggugcccaacgcccucaccgacgaccgguccaagccgauccaggggcagacgaucguccugaacgccgacuggagcggcuacuccgggagcuucauggacuacugggccgagggcgacugcuaccgcgcgugcuucuacguggagcugauccgcggccggcccaaggaggacaaggugugguggaccuccaacagcaucgucuccaugugcagcagcaccgaguuccucgggcaguggaacuggcccgacggcgccaagaucgaguacuuccuguga

SEQ ID NO: 14279 - RNA, 1413 nt, Artificial Sequence
  FLUAV/H10N8/A/Jiangxi/IPB13/2013(H10N8)__AHK10769.1 neuraminidase CDS gc (NA)
augaaccccaaccagaagaucaucaccaucggcagcgugucccuggggcucgucauccugaacauccugcuccacaucgugagcaucaccgugacgguccuggugcugccgggcaacgggaacaacgaguccugcaacgagaccgugauccgcgaguacaacgagaccguccggguggagaaggugacccaguggcacaacacgaacgucaucgaguacaucgagcgccccgagaacgaccacuucaugaacaacaccgaggcccucugcgacgccaagggcuucgcgcccuucagcaaggacaacgggauccggaucggcucccgcggccacguguucgugauccgggagcccuucgucagcugcuccccgaccgagugccgcaccuucuuccugacgcaggggagccugcucaacgacaagcacuccaacggcaccgugaaggaccggagccccuaccgcacccugauguccguggagaucgggcagagccccaacgucuaccaggcccgguucgaggccguggccugguccgccaccgcgugccacgacggcaagaaguggaugacgaucggggugaccggccccgacgccaaggccgucgccguggugcacuacggcgggaucccgaccgacgucaucaacagcugggcgggcgacauccugcgcacccaggaguccagcugcacgugcauccagggggagugcuucugggugaugaccgacggccccgccaaccggcaggcccaguaccgcgccuucaaggccaagcagggcaagaucguggggcaggcggagaucuccuucaacggcgggcacaucgaggagugcagcugcuaccccaacgagggcaaggucgagugcgugugccgggacaacuggaccgggaccaaccgccccguccucgugaucuccccggaccugagcuaccgggugggcuaccugugcgccggccuccccagcgacacgccccgcggggaggacucccaguucaccggcagcugcaccucccccauggggaaccagggcuacggggucaagggcuucggcuuccggcaggggaacgacguguggaugggccgcaccaucagccggacgucccgcagcggguucgagauccugaaggugcggaacggcuggguccagaacuccaaggagcagaucaagcgccaggugguggucgacaaccugaacuggagcggguacuccggcagcuucacccucccggccgagcugaccaagcgcaacugccuggugcccugcuucuggguggagaugauccggggcaaccccgaggagaagaccaucuggacguccagcuccagcaucgucaugugcgggguggaccacgagaucgccgacugguccuggcacgacggcgccauccuccccuucgacaucgacaagauguga

SEQ ID NO: 14280 - RNA, 1401 nt, Artificial Sequence
  FLUBV/H0N0/B/Colorado/06/2017__EPI1001930 neuraminidase CDS gc (NA)
augcugcccagcaccauccagacccucacgcuguuccugaccuccggcggggugcuccugagccuguacgucuccgccagccucuccuaccugcuguacagcgacauccuccugaaguucuccccgaccgagaucaccgcccccacgaugccccuggacugcgcgaacgccagcaacgugcaggccgugaaccgcuccgccaccaagggcgucacccuccugcugcccgagccggaguggaccuacccccggcucagcugccccggguccacguuccagaaggcccugcugaucagcccccaccgcuucggcgagaccaaggggaacuccgcgccgcucaucauccgggagcccuucguggccugcggccccaacgagugcaagcacuucgcccugacccacuacgccgcgcagcccggcggguacuacaacggcacccgcggggaccggaacaagcugcgccaccucaucagcgugaagcugggcaagaucccgacggucgagaacuccaucuuccacauggccgccuggagcggguccgccugccacgacggcaaggaguggaccuacaucggcguggacgggcccgacaacaacgcccugcucaaggugaaguacggcgaggcguacaccgacaccuaccacagcuacgccaacaacauccugcggacgcaggaguccgccugcaacugcaucgggggcaacugcuaccugaugaucaccgacggcagcgccagcggggucuccgagugccgcuuccucaagauccgggagggccgcaucaucaaggagaucuuccccaccgggcgggugaagcacaccgaggagugcacgugcggcuucgccagcaacaagaccaucgagugcgcgugccgcgacaaccgguacaccgccaagcgccccuucgugaagcugaacgucgagaccgacacggccgagauccggcugaugugcaccgacaccuaccucgacaccccgcgccccaacgacggguccaucacgggccccugcgagagcgacggcgacaagggguccggcgggaucaagggcggguucgugcaccagcggaugaaguccaagaucggccgcugguacagccggaccaugagccagaccgagcgcaugggcauggggcuguacgugaaguacggcggggaccccugggccgacuccgacgcccuggcguucagcggcgucaugguguccaugaaggagccggggugguacagcuucggcuucgagaucaaggacaagaagugcgacgugcccugcaucggcaucgagaugguccacgacgggggcaaggagaccuggcacuccgccgccacggccaucuacugccucauggggagcggccagcugcugugggacaccgugaccggcguggacauggcccucuga

SEQ ID NO: 14281 - RNA, 1401 nt, Artificial Sequence
  FLUBV/H0N0/B/Washington/02/2019__EPI1368872 neuraminidase CDS gc (NA)
augcugcccagcaccauccagacccucacgcuguuccugaccuccggcggggugcuccugagccuguacgucuccgccagccucuccuaccugcuguacagcgacauccuccugaaguucuccccgaccgagaucaccgcccccacgaugccccuggacugcgcgaacgccagcaacgugcaggccgugaaccgcuccgccaccaagggcgucacccuccugcugcccgagccggaguggaccuacccccggcucagcugccccggguccacguuccagaaggcccugcugaucagcccccaccgcuucggcgagaccaaggggaacuccgcgccgcucaucauccgggagcccuucguggccugcggccccaacgagugcaagcacuucgcccugacccacuacgccgcgcagcccggcggguacuacaacggcacccgcggggaccggaacaagcugcgccaccucaucagcgugaagcugggcaagaucccgacggucgagaacuccaucuuccacauggccgccuggagcggguccgccugccacgacggcaaggaguggaccuacaucggcguggacgggcccgacaacaacgcccugcucaaggugaaguacggcgaggcguacaccgacaccuaccacagcuacgccaacaacauccugcggacgcaggaguccgccugcaacugcaucgggggcaacugcuaccugaugaucaccgacggcagcgccagcggggucuccgagugccgcuuccucaagauccgggagggccgcaucaucaaggagaucuuccccaccgggcgggugaagcacaccgaggagugcacgugcggcuucgccagcaacaagaccaucgagugcgcgugccgcgacaaccgguacaccgccaagcgccccuucgugaagcugaacgucgagaccgacacggccgagauccggcugaugugcaccgacaccuaccucgacaccccgcgccccaacgacggguccaucacgggccccugcgagagcgacggcgacaagggguccggcgggaucaagggcggguucgugcaccagcggaugaaguccaagaucggccgcugguacagccggaccaugagcaagaccgagcgcaugggcauggggcuguacgugaaguacggcggggaccccugggccgacuccgacgcccugaccuucagcggcgucaugguguccaugaaggagccggggugguacagcuucggcuucgagaucaaggacaagaagugcgacgugcccugcaucggcaucgagaugguccacgacgggggcaaggagacguggcacuccgcggccaccgccaucuacugccucauggggagcggccagcugcugugggacaccgugaccggcguggacauggcccucuga

SEQ ID NO: 14282 - RNA, 1701 nt, Artificial Sequence
  FLUAV/H1N1/A/California/7/2009__ACP41953 hemagglutinin CDS human (HA)
augaaggccauccuggugguccuccuuuacaccuucgcuacagcaaacgccgacacucugugcauuggcuaucacgcgaauaacagcacggauaccguugacacaguguuggagaagaauguaacugugacccauuccgucaacuuacuggaagauaagcacaaugggaaacuauguaagcucagaggaguggcuccccugcaucuugguaaaugcaacauagccggcuggauccuggggaauccugagugugaaucuuugucaacagcaaguagcugguccuacauuguugagaccccaucuucggacaacggaacuugcuauccgggcgauuuuaucgacuacgaggagcucagggagcagcugucaagcgugaguuccuucgaacgguuugagauuuuccccaagacaucuagcuggccuaaucacgauuccaacaagggugucaccgccgcuuguccacaugcaggggccaaaucauuuuauaagaaucugaucuggcucgugaaaaagggaaacaguuaccccaaauuaagcaagucuuauauaaaugacaagggcaaagaaguacugguucuuuggggcauccaccacccuuccacgucagcugaucaacagagcuuguaccagaacgccgacgcguacguguucgucgggaguucucgcuauuccaagaaauuuaagccagagauugcaauccgacccaaagugcgugaucaggagggaagaaugaauuacuauuggacucugguggaaccuggugacaagauuaccuucgaggccacaggcaaccuagucguuccaagguacgcuuuugccauggaacggaacgcagggagcggaaucauaauuucggauacuccggugcaugacugcaauaccacaugucaaacccccaaaggcgcuaucaacacgucucucccuuuccagaauauucacccaaucacuaucgguaagugccccaaguauguaaaauccacaaagcugcgccuugccaccgggcugagaaacauuccuucaauacagaguaggggauuguuuggcgcgaucgccggcuucauugaagggggauggacugguaugguggacggcugguacggguaucaucaccagaaugaacaaggaagcggcuacgcagcugaucucaaauccacacagaacgccaucgacgagauaaccaauaaggucaacucugugauugagaaaaugaauacgcaguuuaccgcuguugguaaggaguucaaccaccuggaaaagcggaucgaaaauuuaaacaaaaagguggaugacggguuccuggauaucuggacauacaaugccgagcuccuuguccuguuggaaaacgagcgcacucuagacuaucaugauagcaaugugaaaaaccuguacgagaagguacgaucacagcucaaaaacaaugcaaaggaaauuggcaacggauguuuugaguucuaucacaagugcgacaauaccuguauggaaaguguuaaaaacggcacauacgauuauccaaaguacuccgaggaagccaaacugaauagagaggagaucgacggggugaaacuugaaagcacuaggauuuaucaaauacuggcuaucuacucuaccgucgcgucaaguuuggugcucgucgugagccugggagcaauuuccuuuuggaugugcucuaacgguucguuacagugccggaucuguaucuga

SEQ ID NO: 14283 - RNA, 1701 nt, Artificial Sequence
  FLUAV/H1N1/A/Michigan/45/2015__EPI662594 hemagglutinin CDS human (HA)
augaaggccauccuggugguccuccuuuacaccuucacaacugcuaacgcagacacgcugugcauuggcuaucacgccaauaacagcaccgauacaguugacacuguguuggagaagaauguaaccgugacacauuccgucaacuuacuggaagauaagcacaaugggaaacuauguaagcucagaggaguggcgccccugcaucuugguaaaugcaacauagcuggcuggauccuggggaauccugagugugaaucuuugucaaccgccaguagcugguccuacauuguugagacuucuaacucggacaauggaacaugcuauccaggcgauuuuaucaacuacgaagaacucagggagcagcugucaagcgugaguuccuucgaacgguuugagauuuucccgaagaccucuagcuggcccaaucacgacuccaacaagggugucacggcagccuguccucaugcuggggcaaaaucauuuuauaagaaucugaucuggcucgugaaaaagggaaacaguuacccaaaauuaaaucaaagcuauauaaacgauaagggcaaggaaguacugguucuuuggggcauccaccaccccucuacuaccgccgaccagcaguccuuguaccagaacgcugaugccuacguguucgucgggacaucacgcuauagcaaaaaguuuaaaccugagauugcgacucgaccaaaggugcgugaccaagagggaagaaugaauuacuauuggacccugguggaacccggugauaaaaucacauucgaggcaaccggcaaccuagucguuccuagguacgccuuuacgauggaacggaaugcugggaguggaauuaucauaucugacacuccagugcaugauugcaacacaaccugucagacuccggagggcgccauuaauacaucccuccccuuccagaacauccacccuauuaccaucgguaagugcccaaaauauguaaagagcacgaagcugcgccuugcaaccgggcugagaaaugugcccucgauccagucuaggggauuguuuggcgcuauugccggcuucauagaagggggauggacagguauggucgacggcugguacggguaucaucaccaaaacgagcagggauccggcuacgcggccgaccucaaaucaacucagaaugcaaucgauaagauuaccaacaaagugaauaguguuaucgagaagaugaacacacaguuuacugcuguggguaaagaguucaaucaccuggagaagcggauagaaaacuuaaauaagaaagucgacgauggguuccuggacauuuggaccuacaacgccgagcuccuugugcuguuggaaaacgagcgcacacuagauuaucaugacagcaauguaaagaaccuguacgagaaaguucgaaaucaacucaagaacaaugcuaaagaaaucggcaacggauguuuugaguucuaucacaagugcgauaauaccuguauggaauccgugaagaacggcacuuacgacuauccuaaauacucugaggaagccaagcugaauagagagaaaaucgauggggucaaacuugagagcacgaggauuuaucagauccuggcaauuuacucaacaguggccaguuccuugguccucgugguuagccugggagcuauaucuuuuuggaugugcucaaacgguaguuuacagugccggaucuguauuuga

SEQ ID NO: 14284 - RNA, 1701 nt, Artificial Sequence
  FLUAV/H1N1/A/Netherlands/602/2009__ACQ45338 hemagglutinin CDS human (HA)
augaaggccauccuggugguccuccuuuacaccuucgcuacagcaaacgccgacacucugugcauuggcuaucacgcgaauaacagcacggauaccguugacacaguguuggagaaaaauguaacugugacccauuccgucaacuuacuggaagauaagcacaaugggaaacuauguaagcucagaggaguggcuccccugcaucuugguaaaugcaacauagccggcuggauccuggggaauccugagugugaaucuuugucaacagcaaguagcugguccuacauuguugagaccucuucgucagacaacggaacuugcuauccaggcgauuuuaucgacuacgaggagcucagggagcagcugagcaguguguccucuuucgaacgguuugagauuuucccgaagacaagcuccuggcccaaucacgauucaaacaagggugucaccgccgcuuguccucaugcaggggccaaaaguuuuuauaagaaucugaucuggcucgugaaaaagggaaacagcuacccaaaauuaucuaaguccuauauaaaugacaagggcaaagaaguacugguucuuuggggcauccaccaccccucaacgagcgcugaucaacagaguuuguaccagaacgccgacgcguacguguucgucgggucuucccgcuauagcaagaaauuuaagccugagauugcaauccgaccaaaagugcgugaucaggagggaagaaugaauuacuauuggacucugguggaacccggugacaagauuaccuucgaggccacaggcaaccuagucguuccuagguacgcuuuugccauggaacggaacgcagggucgggaaucauaauuucugauacuccagugcaugacugcaauaccacaugucaaaccccgaaaggcgcuaucaacacgucccuccccuuccagaauauucacccuaucacuaucgguaagugcccaaaguauguaaaaucaacaaagcugcgccuugccaccgggcugagaaacgugcccaguauucagagcaggggauuguuuggcgcgauagccggcuucaucgaagggggauggacugguauggucgacggcugguacggguaucaucaccagaaugaacaaggauccggcuacgcagcugaucucaaaucuacacagaacgccauugacgagaucaccaauaaggugaacagcguuauagagaaaaugaauacgcaguuuaccgcuguggguaaggaguucaaccaccuggaaaagcggauugaaaauuuaaacaaaaaggucgaugacggguuccuggauaucuggacauacaaugccgagcuccuugugcuguuggaaaacgagcgcacucuagacuaucaugauucaaauguaaagaaccuguacgagaagguucgaagucagcucaaaaacaaugcaaaggaaaucggcaacggauguuuugaguucuaucacaagugcgacaauaccuguauggaauccgugaaaaacggcacauacgauuauccuaaguacagcgaggaagccaaacugaauagagaggagauugacggggucaaacuugaaucuacuaggaucuaucaaauucuggcuauauacucaaccguggcgaguagcuugguccucgugguuucccugggagcaaucucuuuuuggaugugcucgaacgguagcuuacagugccggauuuguaucuga

SEQ ID NO: 14285 - RNA, 1701 nt, Artificial Sequence
  FLUAV/H3N2/A/Hong Kong/4801/2014__EPI643118 hemagglutinin CDS human (HA)
augaagaccaucauugcccugagcuacauacucugccuuguguucgcucagaaaauccccggcaacgacaauuccacagcaacucuguguuuggggcaccaugccgucccuaacggaacgauuguuaagaccaucacaaaugauagaauugaggugacuaacgcgaccgaauuaguacaaaauucuucaaucggugagauaugcgacaguccacaccagauccuggauggcgaaaacuguacacuaauugacgcucuccugggggauccgcagugcgacggauuucagaauaaaaagugggaucuuuucguggagaggagcaaagccuauuccaacuguuaccccuaugacgucccugauuacgcaucucugcggucguugguggccucaagcggcacccucgaauuuaauaacgagaguuucaauuggacugguguuacacaaaacgggaccuccucugcuugcauccgccgaagcuccucaaguuucuucagccgucugaauuggcugacgcaucucaacuauaaguacccagcauuaaaugugacuaugcccaacaacgagcaguuugacaagcuguauauuuggggaguccaccauccuggcaccgauaaagaccagaucuucccauacgcccagucuuccggcagaauaauugugucaacaaagaggagccaacaggcuguaauccccaauauugggagucggccucgcaucagagauaucccaucuaggauuuccauauacuggacuaucguuaaaccgggagacauucuuuugaucaacagcaccgguaaucugauagcgccccggggcuauuuuaagcuacgcucggggaaaucuuccauuaugcgaucagacgccccuaucggaaaguguaagagugaaugcaucacaccaaacggcagcauucccaaugauaaaccuuuccagaacgugaauagaaucaccuacggugcauguccaagguaugucaagcacuccacgcucaaacuggccacugggaugcggaacgugcccgagaagcagacacguggaauuuuuggcgcuauagccggcuucaucgaaaaugggugggagggaaugguggacgguugguacggcuuucgccaccaaaacucugaggggagaggacaggcagcugaucuuaaaagcacccaggccgcgauugaccaaaucaauggcaagcugaacagguugaucgguaaaacuaaugaaaaguuccaucagauugagaaggaauuuucagaggucgaagggcggauacaggaucucgagaaauauguugaggacacaaagaucgaucuguggaguuacaacgccgaauuacugguggcacucgagaaucagcacaccauugaccuuacggauuccgaaaugaacaaacuguuugagaagaccaaaaagcaauugcgagaaaacgcugaggacaugggcaauggaugcuucaagaucuaucauaaaugugauaacgccugcauuggcagcauccgcaaugggacauacgaccacaacguauacagagacgaggcucuaaauaacagguuucagauaaagggaguggaacugaaaucugguuauaaggauuggauccucuggauuucauucgccaucaguugcuuucugcuuugugucgcacuguugggcuucauuaugugggccugccagaaagggaauauccgguguaacauaugcauuuga

SEQ ID NO: 14286 - RNA, 1758 nt, Artificial Sequence
  FLUBV/H0N0/B/Brisbane/60/2008__FJ766840 hemagglutinin CDS human (HA)
augaaggccaucauugugcugcucauggucguuaccagcaacgcugacagaauaugcacaggcaucacuuccucuaauucaccccacgugguaaaaacggcaacccagggggaggugaacgucacaggagugauuccucuuacuaccacaccaaccaagagucauuucgccaaucugaaagguacugaaacaaggggcaaguuguguccgaaaugcuuaaacuguaccgaucuggacguugcgcuagggcggcccaagugcacgggaaagaucccuagcgcucgcguguccauucuccacgagguccgaccagugacuucuggcuguuuucccaucaugcaugaucguaccaaaauaagacaacugccuaaucuucugagggguuacgaacacauccgguugucgacacauaacguaauuaaugccgagaacgcaccagggggacccuauaagaucggcacuucaggcagcugcccuaauauuaccaacgggaauggauucuuugccacaauggcuugggcaguuccgaaaaacgacaagaauaaaaccgccacgaacccacucacuaucgaagugcccuacauauguacagagggugaggaucagauuaccgucuggggcuuccacagugacaaugaaacucagauggcuaagcuguauggggauuccaagccucagaaauuuacaucuagcgccaacggagugaccacgcacuacgugucccaaaucggcgguuucccaaaccagaccgaggacgggggacugccccagucaggccgcauugucguugauuauauggugcagaagaguggcaaaacagggacuaucaccuaccaaagaggaauccucuuaccucagaagguauggugcgcgagcgguaggucuaaagugauuaagggcucccugccacuuauaggggaagcagacuguuugcaugagaaauauggaggccugaauaagucaaagcccuacuacacaggugagcacgccaaagcuaucgggaacugcccgauuugggucaagacuccucuaaaacucgccaauggcaccaaguaucggcccccagcaaaacugcuuaaggaacgcggauuuuucggcgcuaucgccggguuucuggagggagguugggaaggcaugauagcgggguggcauggauacacaagccacggcgcccacgguguggcaguugcugccgauuugaagaguacccaggaggcuauuaacaaaaucacuaagaaucucaacucucuguccgaauuagaggugaaaaaucugcagcgacucagcggggccauggacgagcuucauaacgaaauccuggaguuggaugaaaaggucgacgaccuaagagcagauacgauuucgucucaaaucgagcuggccgugcuccuguccaaugaaggcauuauaaacucagaggacgagcaccuucuggcuuuggaaaggaaacucaagaagaugcugggaccuagugcgguagagaucggcaauggguguuucgaaacaaaacauaagugcaaccagaccugcuuagaucggauugcagccggaacuuuugacgcuggugaguucagccugcccaccuuugauucccuaaauaucacagccgcaucucucaacgacgauggccuggacaaucacaccauccuuuuguauuacagcacugccgcuucaagucuggccguuacacucaugauugcaauauucguggucuauauggugucccgugauaacgucagcuguucuaucugccuguga

SEQ ID NO: 14287 - RNA, 1755 nt, Artificial Sequence
  FLUBV/H0N0/B/Phuket/3073/2013__EPI540671 hemagglutinin CDS human (HA)
augaaggccaucauugugcugcucauggucguuaccagcaacgcugacagaauaugcacaggcaucacuuccucuaauucaccccacgugguaaaaacggcaacccagggggaagugaacgucacaggagugauuccucuuacuaccacaccaaccaagaguuacuucgccaaucugaaagguacuaggacacggggcaaguuguguccggauugcuuaaacuguaccgaccuggauguugcgcuagggcgccccaugugcgugggaacgacuccuagcgcuaaagccuccauccuccaugaaguccgaccagugaccucuggcuguuuucccauuaugcacgaccguacaaagaucagacaacugccuaaucuucugagggguuaugagaagauacgguugucgacucagaacguaaucgaugcagaaaaagccccagggggacccuaccgccucggcaccucaggcagcugcccuaaugcuacaaguaagauuggguucuuugcaaccauggccugggcuguuccaaaagacaacuauaagaaugccacgaacccgcugacuguggagguccccuacaucuguacagaaggagaggaucagauuaccgugugggguuuccauuccgacaauaaaacucagaugaagucucuguauggcgauagcaacccucaaaaguuuacauccucagcgaauggggugaccacgcacuacgucagucagaucggagacuucccagaucagaccgaggacggcggucucccccagagcgggagaauaguuguggauuauaugaugcaaaaaccuggaaagacaggcacuauuguauaccagaggggcguguuacugccacagaaagucuggugcgcaucugggcgguccaaggugaucaaaggaucacuucccuugauuggugaagccgacugucugcaugaggaauacggcgggcuaaacaagagcaaaccguauuacaccggaaagcacgcuaaggccaucggcaauugcccuaucuggguuaaaacaccccucaagcuggcaaacgguacuaaauaucgcccuccagcuaaacuucugaaggagcgaggguuuuucggcgccauugcgggauuuuuggagggcgggugggaaggaaugauagccgguuggcacggcuacaccagucauggggcacacggaguggcugucgccgcugaccucaagucuacacaggaggccaucaacaagauuaccaaaaaucugaacuccuuaagcgaacuggaggugaagaaucuccaaagacuuucgggcgcaauggaugaacugcauaacgagaucuuggagcuagacgaaaaaguagaugaccugagggccgauacuauaucuucccagauugagcucgcuguucugcuuucaaaugaagguaucaucaacagugaggacgaacaccuguuggcgcucgagcggaagcugaaaaagauguuagggcccagcgcaguggauauuggcaauggauguuucgagacgaagcacaaaugcaaccagacaugccuggaccguaucgccgcuggcaccuuuaaugccggggaguucucccuaccaacuuuugauucucucaacauuaccgcagccagccugaaugacgauggacuugacaaccauacaauauugcuguauuacucaaccgcugccaguucccucgcagucacucugaugcuugcgaucuucauuguguauauggucagccgcgacaaugugucuuguucaaucugccuguga

SEQ ID NO: 14288 - RNA, 1695 nt, Artificial Sequence
  FLUAV/H1N1/A/Brisbane/02/2018__EPI1212834 hemagglutinin CDS human (HA)
augaaggccauccuggugguccuccuuuacaccuucacaacugcuaacgcagacacgcugugcauuggcuaucacgccaauaacagcaccgauacaguugacacuguguuggagaagaauguaaccgugacacauuccgucaacuuacuggaagauaagcacaaugggaaacuauguaagcucggagguguggcgccccugcaucuuggcaaaugcaacauagcuggguggauccugggaaauccugagugugaaucuuugucaaccgccagaaguuggagcuacauuguugagacuuccaacucugacaauggcacaugcuauccaggugauuuuaucaacuacgaagaacucagggagcagcugucgucagugagcaguuucgaacgguuugagauuuucccgaagaccuccucuuggcccaaucacgacagcaacaagggggucacggcagccuguccucaugcuggagcaaaauccuuuuauaagaaucugaucuggcucgugaaaaagggcaacucauacccaaaauuaaaucaaacuuauauaaacgauaagggcaaggaaguacugguucuuugggggauccaccaucccccuaccacagccgaccagcagaguuuguaccagaacgcugaugccuacguguucgucggaacuagccgcuauucuaaaaaguuuaaaccagagauugcgacccgacccaaggugcgugacagagaggguaggaugaauuacuauuggacacugguggaaccuggcgauaaaaucaccuucgaggcaacggggaaccuagucguuccacgguacgccuuuacuauggaacgcaaugcuggauccggcauuaucauaucagacacaccggugcacgauugcaacaccacuugucaaacagccgagggugcaauuaauaccagccuccccuuccagaacguacacccugugacgaucgggaagugcccaaaauaugucaagaguaccaagcugagacuugcuacaggacugaggaaugugcccucuauucagucccggggcuuguuuggcgccaucgcgggguucaucgaaggagguuggacuggcaugguugacgggugguacggauaucaucaccagaacgagcaaggcagcgguuacgccgcagaccucaaaucgaaugcuauugauaagauaaccaacaaagucaauucugugaucgagaagaugaacacacaguuuacugccguggggaaagaguucaaucaccuggagaagcgcauugaaaacuuaaauaagaaaguagacgauggcuuccuggacaucuggaccuacaacgcugagcuccuuguucuguuggaaaacgagcgaacacuagauuaucaugacuccaaugugaagaaccuguacgagaaagucagaaaucagcucaagaacaaugccaaagaaauaggaaacggcuguuuugaguucuaucacaagugcgauaauaccuguauggaaucagugaagaacgggacuuacgacuauccuaaauacagugaggaagcaaagcugaauagggagaaaauugauggagucaaacuugagagcacgcggaucuaucagauccuggccauuuacuccacaguggcuucuagcuugguucucgugguaucacugggugcgaucaguuuuuggaugugcuccaacggcagcuuacaaugccguauuuguauauga

SEQ ID NO: 14289 - RNA, 1695 nt, Artificial Sequence
  FLUAV/H1N1/A/Brisbane/02/2018__EPI1671767 hemagglutinin CDS human (HA)
augaaggccauccuggugguccuccuuuacaccuucacaacugcuaacgcagacacgcugugcauuggcuaucacgccaauaacagcaccgauacaguugacacuguguuggagaagaauguaaccgugacacauuccgucaacuuacuggaagauaagcacaaugggaaacuauguaagcucggagguguggcgccccugcaucuuggcaaaugcaacauagcuggguggauccugggaaauccugagugugaaucuuugucaaccgccagaaguuggagcuacauuguugagacuuccaacucugacaauggcacaugcuauccaggugauuuuaucaacuacgaagaacucagggagcagcugucgucagugagcaguuucgaacgguuugagauuuucccgaagaccuccucuuggcccaaucacgacagcaacaagggggucacggcagccuguccucaugcuggagcaaaauccuuuuauaagaaucugaucuggcucgugaaaaagggcaacucauacccaaaauuaaaucaaacuuauauaaacgauaagggcaaggaaguacugguucuuugggggauccaccaucccccuaccacagccgaccagcagaguuuguaccagaacgcugaugccuacguguucgucggaacuagccgcuauucuaaaaaguuuaaaccagagauugcgacccgacccaaggugcgugaccaagaggguagaaugaauuacuauuggacacugguggaaccuggcgauaaaaucaccuucgaggcaacggggaaccuagucguuccaagguacgccuuuacuauggaacggaaugcuggauccggcauuaucauaucagacacaccggugcacgauugcaacaccacuugucagacagccgagggugcaauuaauaccagccuccccuuccagaacguacacccugugacgaucgggaagugcccaaaauaugucaagaguaccaagcugcgccuugcuacaggacugagaaaugugcccucuauucaguccaggggcuuguuuggcgccaucgcgggguucaucgaaggagguuggacuggcaugguugacgggugguacggauaucaucaccaaaacgagcagggcagcgguuacgccgcagaccucaaaucgaaugcuauugauaagauaaccaacaaagucaauucugugaucgagaagaugaacacacaguuuacugccguggggaaagaguucaaucaccuggagaagcggauugaaaacuuaaauaagaaaguagacgauggcuuccuggacaucuggaccuacaacgcugagcuccuuguucuguuggaaaacgagcgcacacuagauuaucaugacuccaaugugaagaaccuguacgagaaaguccgaaaucagcucaagaacaaugccaaagaaauaggaaacggcuguuuugaguucuaucacaagugcgauaauaccuguauggaaucagugaagaacgggacuuacgacuauccuaaauacagugaggaagcaaagcugaauagagagaaaauugauggagucaaacuugagagcacgaggaucuaucaaauccuggccauuuacuccacaguggcuucuagcuugguucucgugguaucacugggugcgaucaguuuuuggaugugcuccaacggcagcuuacagugccggauuuguauauga

SEQ ID NO: 14290 - RNA, 1695 nt, Artificial Sequence
  FLUAV/H1N1/A/Guangdong-Maonan/SWL1536/2019__EPI1542570 hemagglutinin CDS human (HA)
augaaggccauccuggugguccuccuuuacaccuucacaacugcuaacgcagacacgcugugcauuggcuaucacgccaauaacagcaccgauacaguugacacuguguuggagaagaauguaaccgugacacauuccgucaacuuacuggaagauaagcacaaugggaaacuauguaagcucagaggaguggcgccccugcaucuugguaaaugcaacauagcuggcuggauccuggggaauccugagugugaaucuuugucaaccgccaggaguuggagcuacauuguugagacuuccaacucugacaauggaacaugcuauccaggcgauuuuaucaacuacgaggagcuccgggagcagcugucgucagugagcaguuucgaacgcuuugagauuuucccgaagaccuccucuuggcccaaucacgacagcgauaagggugucacggcagccuguccucaugcuggggcaaaauccuuuuauaagaaccugaucuggcucgugaaaaagggaaauucauacccaaaauuaaaccaaacuuauauaaaugacaagggcaaggaaguacugguucuuuggggcauccaccaucccccuaccauugccgcucaggagaguuuguaccagaacgccgaugcguacguguucgucgggacaagccgauauucuaaaaaguuuaaaccagagaucgcaacucgucccaaggugagagaccaggaaggaaggaugaacuacuauuggacccugguggagccuggugauaaaauuacauucgaagccaccggcaaucuagucguuccacgguacgcuuuuacgauggagcgcgacgccggguccggaaucauaauuucagauacuccggugcacgacugcaacacaaccugucaaacucccgaaggcgcaaucaauacaagccucccuuuccagaacguacacccaauuaccaucgguaagugccccaaauaugugaagaguacgaagcugagacuugcuaccgggcugaggaaugucccuucuauccagucccggggauuguuuggcgccauugcgggcuucauagaagggggauggacagguaugguggacggcugguacggguaucaucaccagaacgagcaaggaagcggcuacgccgcagaucucaaaucgaaugcuaucgacaagauuacuaacaaaguuaauucugugaucgaaaagaugaacacccaguuuacagccgucgguaaagaguucaaucaccuggaaaagcgcauagagaacuuaaauaagaaaguggaugacggguuccuggauauuuggacuuacaacgcugaacuccuuguacuguuggagaaugagcgaacccuagacuaucaugauuccaacguuaagaaccuguacgaaaaagugagaaaucagcucaagaacaaugccaaagagaucggcaacggauguuuugaguucuaucacaagugcgacaauacauguauggaaucagucaagaacggcaccuacgauuauccaaaauacagugaagaggcaaagcugaauagggagaaaaucgacggggugaaacuugaaagcacucggauuuaucagauccuggccauuuacuccacggucgcuucuagcuuggugcucguugugucacugggagcgauaaguuuuuggaugugcuccaacgguagcuuacaaugccguaucuguauuuga

SEQ ID NO: 14291 - RNA, 1695 nt, Artificial Sequence
  FLUAV/H1N1/A/Guangdong-Maonan/SWL1536/2019__EPI1590725 hemagglutinin CDS human (HA)
augaaggccauccuggugguccuccuuuacaccuucacaacugcuaacgcagacacgcugugcauuggcuaucacgccaauaacagcaccgauacaguugacacuguguuggagaagaauguaaccgugacacauuccgucaacuuacuggaagauaagcacaaugggaaacuauguaagcucagaggaguggcgccccugcaucuugguaaaugcaacauagcuggcuggauccuggggaauccugagugugaaucuuugucaaccgccaggaguuggagcuacauuguugagacuuccaacucugacaauggaacaugcuauccaggcgauuuuaucaacuacgaggagcuccgggagcagcugucgucagugagcaguuucgaacgcuuugagauuuucccgaagaccuccucuuggcccaaucacgacagcgauaagggugucacggcagccuguccucaugcuggggcaaaauccuuuuauaagaaccugaucuggcucgugaaaaagggaaauucauacccaaaauuaaaccaaacuuauauaaaugacaagggcaaggaaguacugguucuuuggggcauccaccaucccccuaccauugccgugcaggagaguuuguaccagaacgcugaugccuacgucuucguggggacaagccgauauucuaaaaaguuuaaaccagagaucgcgacucgucccaaggugagagaccaggaaggaaggaugaacuacuauuggacccuggucgagccuggugauaaaauuacauucgaagcaaccggcaaucuaguugugccacgguacgccuuuacgauggagcgcgacgcuggguccggaaucauaauuucagauacuccgguacacgacugcaacacaaccugucaaacucccgaaggcgccaucaauacaagccucccuuuccagaacgugcacccaauuaccaucgguaagugccccaaauaugucaagaguacgaagcugagacuugcaaccgggcugaggaaugugccuucuauccagucccggggauuguuuggcgcuauugccggcuucauagaagggggauggacagguaugguugacggcugguacggguaucaucaccagaacgagcaaggaagcggcuacgcggccgaucucaaaucgaaugcaaucgacaagauuacuaacaaagucaauucugugaucgaaaagaugaacacccaguuuacagcuguggguaaagaguucaaucaccuggaaaagcgcauagagaacuuaaauaagaaaguagaugacggguuccuggauauuuggacuuacaacgccgaacuccuuguucuguuggagaaugagcgaacccuagacuaucaugauuccaacgugaagaaccuguacgaaaaagucagaaaucagcucaagaacaaugcuaaagagaucggcaacggauguuuugaguucuaucacaagugcgacaauacauguauggaaucagugaagaacggcaccuacgauuauccaaaauacagugaagaggccaagcugaauagggagaaaaucgacggggucaaacuugaaagcacucggauuuaucagauccuggcaauuuacuccacgguggccucuagcuugguucucgugguaucacugggagcuauaaguuuuuggaugugcuccaacgguagcuuacaaugccguaucuguauuuga

SEQ ID NO: 14292 - RNA, 1701 nt, Artificial Sequence
  FLUAV/H3N2/A/Singapore/INFIMH-16-0019/2016__EPI1106227 hemagglutinin CDS human (HA)
augaagaccaucauugcccugagcuacauacucugccuuguguucgcucagaaaauccccggcaacgacaauuccacagcaacucuguguuuggggcaccaugccgucccuaacggaacgauuguuaagaccaucacaaaugauagaauugaggugacuaacgcgaccgaauuaguacaaaauucuucaaucggugagauaugcgacaguccacaccagauccuggauggcgaaaacuguacacuaauugacgcucuccugggggauccgcagugcgacggauuucagaauaaaaagugggaucuuuucguggagaggagcaaagccuauuccaacuguuaccccuaugacgucccugauuacgcaucucugcggucguugguggccucaagcggcacccucgaauuuaagaaugagaguuucaacuggacugguguuacacaaaaugggaccuccucugcuugcauccgcggaagcuccucaaguuucuucagccgacugaacuggcugacgcaucucaauuauacuuacccagcauuaaacgugaccaugcccaauaaggagcaguuugacaaacuguauauuuggggcguccaccauccuggcacagauaaggaccagaucuuccuuuacgcccagucuuccgggcguauaacugugucaaccaaaagaagccaacaggcuguaauuccaaacaucggaaguaggccccggauucgcgauaucccuucuagaaucuccauuuacuggacaauaguuaagccaggugacaucuugcugauuaacagcaccggcaaucuaaucgccccgaggggguauuuuaaaauacggucgggaaagucuuccauuaugcgcucagacgcgcccaucggcaaguguaaaagugaaugcaucacgccuaacgguagcauuccaaaugauaagcccuuccagaacgugaaucgaaucacuuacggggcauguccuagauaugucaaacacuccacacucaagcuggccaccggaaugaggaacgugccagagaaacagacucggggcauuuuuggcgcuauagccggguucaucgaaaauggaugggaggguaugguggacggcugguacggguuucgucaccaaaacucugagggacgcggccaggcagcugaucuuaagagcacacaggccgcgauugaccaaaucaaugguaaacugaacagauugaucgggaagaccaaugaaaaguuccaucagauugagaaagaauuuucagaggucgaaggcaggguucaggaucucgagaaguauguggaggacacgaaaauagaucuguggaguuacaacgccgaauuacugguagcacucgagaaucagcacaccaucgaccuuacagauuccgaaaugaacaagcuguuugagaaaacuaagaagcaauugcgggaaaaugcugaggacaugggaaacggcugcuucaaaauuuaucauaagugugauaacgccugcaucgagagcauucgaaaugaaaccuacgaccacaacguguaccgcgacgaggcucuaaauaacagauuucagaucaaaggggucgaacugaagucuggauauaaagauuggauacucuggaucucauucgccauuaguugcuuucugcuuuguguggcacuguuggguuucaucaugugggccugccagaagggcaauauuagguguaacaucugcauauga

SEQ ID NO: 14293 - RNA, 1701 nt, Artificial Sequence
  FLUAV/H3N2/A/Singapore/INFIMH-16-0019/2016__EPI1341068 hemagglutinin CDS human (HA)
augaagaccaucauugcccugagcuacauacucugccuuguguucgcucagaaaauccccggcaacgacaauuccacagcaacucuguguuuggggcaccaugccgucccuaacggaacgauuguuaagaccaucacaaaugauagaauugaggugacuaacgcgaccgaauuaguacaaaauucuucaaucggugagauaugcgacaguccacaccagauccuggauggcgaaaacuguacacuaauugacgcucuccugggggauccgcagugcgacggauuucagaauaaaaagugggaucuuuucguggagaggagcaaagccuauuccaacuguuaccccuaugacgucccugauuacgcaucucugcggucguugguggccucaagcggcacccucgaauuuaagaaugagaguuucaacuggacugguguuacacaaaaugggaccuccucugcuugcauccgcggaagcuccucaaguuucuucagccgacugaacuggcugacgcaucucaauuauaaguacccagcauuaaacgugacuaugcccaauaaagagcaguuugacaagcuguauauuuggggcguccaccauccuggcaccgauaaagaccagaucuucccauacgcccagucuuccgggcguauaacagugucaacuaagagaagccaacaggcuguaauucccaacaucggaaguaggccucggauucgcgguaucccaucuagaaucuccauuuacuggaccauaguuaaaccgggcgauauccuuuugauuaacagcacagggaaucugaucgcccccaggggauauuuuaagauacggucgggcaagucuuccauuaugcgcucagacgcgccuaucgguaaauguaagagugaaugcaucaccccaaacgggagcauucccaaugacaaaccuuuccagaacgugaaucgaaucacguacggagcauguccaagauaugucaagcacuccacucuaaaacucgccacaggcaugaggaacgugcccgagaagcagacccggggcauuuuuggggcuauagccggauucaucgaaaaugguugggagggcaugguggaugggugguacggauuucgucaccaaaacucugagggccgcggucaggcagcugaccugaaaagcacucaggccgcgauugaucaaaucaaugggaaacuuaacagacugaucggcaagacaaaugaaaaguuccaucagauugagaaggaauuuucagaggucgaaggaaggguucaggacuuggagaaauauguggaggauaccaagauagaccucuggaguuacaacgccgaacuguuaguagcacuggagaaucagcacacgaucgaucucaccgacuccgaaaugaacaaacuuuuugagaagacaaagaaacaacugcgggaaaaugcugaggauaugggcaacgggugcuucaagauuuaucauaaaugugacaacgccugcaucgagagcauucgaaaugaaacuuacgaucacaacguguaccgcgacgaggcuuugaauaacagauuucagaucaagggagucgaacuaaaaucugguuauaaggacuggauacuguggaucucauucgccauuaguugcuuucuccuguguguggcacuucugggcuucaucaugugggccugccagaaggggaauauuagguguaacaucugcauauga

SEQ ID NO: 14294 - RNA, 1701 nt, Artificial Sequence
  FLUAV/H3N2/A/Singapore/INFIMH-16-0019/2016 NYMC-X-307__EPI1259099 hemagglutinin CDS human (HA)
augaagaccaucauugcccugagcuacauacucugccuuguguucgcucagaaaauccccggcaacgacaauuccacagcaacucuguguuuggggcaccaugccgucccuaacggaacgauuguuaagaccaucacaaaugauagaauugaggugacuaacgcgaccgaauuaguacaaaauucuucaaucggugagauaugcgacaguccacaccagauccuggauggcgaaaacuguacacuaauugacgcucuccugggggauccgcagugcgacggauuucagaauaaaaagugggaucuuuucguggagaggagcaaagccuauuccaacuguuaccccuaugacgucccugauuacgcaucucugcggucguugguggccucaagcggcacccucgaauuuaagaaugagaguuucaacuggacugguguuacacaaaaugggaccuccucugcuugcauccgcggaagcuccucaaguuucuucagccgacugaacuggcugacgcaucucaauuauaaguacccagcauuaaacgugacuaugcccaauaaagagcaguuugacaagcuguauauuuggggcguccaccauccuggcaccgauaaagaccagaucuucccauacgcccagucuuccgggcguauaacagugucaacuaagagaagccaacaggcuguaauucccaacaucggaaguaggccucggauucgcgguaucccaucuagaaucuccauuuacuggaccauaguuaaaccgggcgauauccuuuugauuaacagcacagggaaucugaucgcccccaggggauauuuuaagauacggucgggcaagucuuccauuaugcgcucagacgcgccuaucgguaaauguaagagugaaugcaucaccccaaacgggagcauucccaaugacaaaccuuuccagaacgugaauaagaucacguacggagcauguccacgauaugucaaacacuccacucuaaagcucgccacaggcaugagaaacgugcccgagaaacagaccaggggcauuuuuggggcuauagccggauucaucgaaaaugguugggagggcaugguggaugggugguacggauuucggcaccaaaacucugagggccguggucaggcagcugaccuuaagagcacucaggccgcgauugaucaaaucaaugggaagcugaaccgccugaucggcaaaacaaaugaaaaguuccaucagauugagaaagaauuuucagaggucgaaggaagaguucaggacuuggagaaguauguggaggauaccaaaauagaccucuggaguuacaacgccgaacuguuaguagcacuggagaaucagcacacgaucgaucucaccgacuccgaaaugaacaaacuuuuugagaagacaaagaagcaacugagggaaaaugcugaggauaugggcaacgggugcuucaaaauuuaucauaagugugacaacgccugcaucgagagcauucggaaugaaacuuacgaucacaacguguaccgagacgaggcuuugaauaaccgcuuucagaucaaaggagucgaacuaaagucugguuauaaggacuggauacuguggaucucauucgccauuaguugcuuucuccuguguguggcacuucugggcuucaucaugugggccugccagaaagggaauauuagauguaacaucugcauauga

SEQ ID NO: 14295 - RNA, 1701 nt, Artificial Sequence
  FLUAV/H3N2/A/Singapore/INFIMH-16-0019/2016-CDC-LV18A__EPI1583318 hemagglutinin CDS human (HA)
augaagaccaucauugcccugagcuacauacucugccuuguguucgcucagaaaauccccggcaacgacaauuccacagcaacucuguguuuggggcaccaugccgucccuaacggaacgauuguuaagaccaucacaaaugauagaauugaggugacuaacgcgaccgaauuaguacaaaauucuucaaucggugagauaugcgacaguccacaccagauccuggauggcgaaaacuguacacuaauugacgcucuccugggggauccgcagugcgacggauuucagaauaaaaagugggaucuuuucguggagaggagcaaagccuauuccaacuguuaccccuaugacgucccugauuacgcaucucugcggucguugguggccucaagcggcacccucgaauuuaagaaugagaguuucaacuggacugguguuacacaaaaugggaccuccucugcuugcauccgcggaagcuccucaaguuucuucagccgacugaacuggcugacgcaucucaauuauaaguacccagcauuaaacgugacuaugcccaauaaagagcaguuugacaagcuguauauuuggggcguccaccauccuggcaccgauaaagaccagaucuucccauacgcccagucuuccgggcguauaauugugucaacaaagagaagccaacaggcuguaauccccaacauuggaaguaggccucggauccgcgauaucccaucuagaauuuccauauacuggacuaucguuaaaccgggugacauucuuuugaucaacagcaccggcaaucugauagcccccaggggguauuuuaagauucggucgggaaagucuuccaucaugcgcucagacgcgccuaucggcaaauguaagagugaaugcauuacaccaaacgguagcauccccaaugauaaaccuuuccagaacgugaaucgaauuaccuacggggcauguccaagauaugucaagcacuccacgcuaaaacucgccacuggaaugaggaacgugcccgagaagcagacacggggcauauuuggcgcuaucgccggguucauugaaaauggaugggaggguaugguggacggcugguacggguuucgucaccaaaacucugagggacgcggccaggcagcugaucugaaaagcacccaggccgcgaucgaccaaaucaaugguaaacuuaacagacugauugggaagacuaaugaaaaguuccaucagauagagaaggaauuuucagaggucgaaggcaggguucaggauuuggagaaauauguggaggacacaaagaucgaucucuggaguuacaacgccgaacuguuaguagcacuggagaaucagcacaccauugaccucacggauuccgaaaugaacaaacuuuuugagaagaccaagaaacaacugcgggaaaaugcugaggacaugggaaacggcugcuucaagaucuaucauaaaugugauaacgccugcauugagagcauccgaaaugaaacauacgaccacaacguguaccgcgacgaggcuuugaauaacagauuucagauaaagggggucgaacuaaaaucuggauauaaggauuggauccuguggauuucauucgccaucaguugcuuucuccuguguguggcacuucuggguuucauuaugugggccugccagaagggcaauaucagguguaacauaugcauuuga

SEQ ID NO: 14296 - RNA, 1701 nt, Artificial Sequence
  FLUAV/H3N2/A/Kansas/14/2017__EPI1146345 hemagglutinin CDS human (HA)
augaagaccaucauugcccugagcugcauacucugucuuguguucgcucagaaaauccccggcaacgacaauuccacagcaacucugugcuuggggcaccaugccgucccuaacggaacgauuguuaagaccaucacaaaugauagaauugaggugacuaacgcgaccgaauuaguacaaaauucuucaaucggugagauaugugacaguccacaccagauccuggauggcgaaaacugcacacuaauugacgcucuccugggggauccgcagugugacggauuucagaauaaaaagugggaucuuuucguggagaggaacaaagccuacagcaauugcuaucccuacgacgucccugauuaugcaucccugcggucuuugguggccucgucaggcacccucgaauuuaacaaugagagcuucaacugggcugguguuacucaaaaugggacaaguuccucuuguauccgcggaagcaaguccucauuuuucagucgacugaacuggcugacccaucucaauagcaaguacccagcauuaaacgugacgaugcccaacaaugagcaguuugacaaacuguauauuuggggcguccaccauccuggcacugauaaggaccagaucucucuuuacgcccaguccucagggcguauaaccgugagcacaaaaagaagucaacaggcuguaauuccaaacaucggaucuaggccccggauucgcgauaucccuuccagaaucagcauuuauuggacuauaguuaagccaggugacaucuugcugauuaauucgaccggcaaccuaaucgccccgaggggguacuucaaaauacggucuggaaaguccucaauuaugcgcagugacgcgcccaucggcaagugcaaaagcgaauguaucacaccuaaugguuccauuccaaacgauaagcccuuucagaaugugaaccgaaucaccuacggggcaugcccuagauaugucaaacagucuacgcucaagcuggccacuggaaugaggaaugugccagagcggcaaacacguggcauuuucggcgcuauagccggguuuaucgaaaacggaugggaggguaugguggacggcugguacggguuccgccaccagaauagcgagggaagaggccaggcagcugaucuuaaaucaacccaagccgcgauugaccagaucaacgguaagcugaauagguugaucgggaaaacuaacgaaaaguuucaccagauugagaaggaguucagugaagucgaaggccggauacaggaucucgagaaauauguugaggacacaaagaucgaucugugguccuacaaugccgaauuacugguggcacucgagaaccaacauaccauugaccuuacggauagcgaaaugaacaaacuguucgagaagaccaaaaagcaguugcgagaaaaugcugaggacaugggaaacggcuguuuuaagaucuaucacaaaugcgauaaugccugcauggggucuauucgcaacggaacauacgaccauaauguauauagagacgaggcucuaaacaauagguuccagaucaaggguguggaacugaaaucaggcuacaaggauuggauacucuggaucaguuuugccauuagcuguuuccugcuuugcgucgcacuguugggguuuaucaugugggccugucagaaaggaaacauucggugcaauaucuguauauga

SEQ ID NO: 14297 - RNA, 1701 nt, Artificial Sequence
  FLUAV/H3N2/A/Kansas/14/2017__EPI1261067 hemagglutinin CDS human (HA)
augaagaccaucauugcccugagcugcauacucugucuuguguucgcucagaaaauccccggcaacgacaauuccacagcaacucugugcuuggggcaccaugccgucccuaacggaacgauuguuaagaccaucacaaaugauagaauugaggugacuaacgcgaccgaauuaguacaaaauucuucaaucggugagauaugugacaguccacaccagauccuggauggcgaaaacugcacacuaauugacgcucuccugggggauccgcagugugacggauuucagaauaaaaagugggaucuuuucguggagaggaacaaagccuacagcaauugcuaucccuacgacgucccugauuaugcaucccugcggucuuugguggccucgucaggcacccucgaauuuaacaaugagagcuucaacugggcugguguuacucaaaaugggacaaguuccucuuguauccgcggaagcaaguccucauuuuucagucgacugaacuggcugacccaucucaauagcaaguacccagcauuaaacgugacgaugcccaacaaugagcaguuugacaaacuguauauuuggggcguccaccauccuggcacugauaagaaccagaucucucuuuacgcccaguccucagggcguauaaccgugagcacaaaaagaagucaacaggcuguaauuccaaauaucggaucuaggccccggauucgcgacaucccuuccagaaucagcauuuauuggacuauaguuaagccaggugauaucuugcugauuaccucgacaggcaaccuaaucgccccgaggggguacuucaaaauacggucuggaaaguccucaauuaugcgcagugacgcgcccaucggcaagugcaaaagcgaauguaucaccccuaaugguuccauuccaaacgacaagcccuuucagaaugugaaccgaaucacguacggggcaugcccuagauaugucaaacagucuacucucaagcuggccacaggaaugaggaaugugccagagcggcaaacccguggcauuuucggcgcuauagccggguuuaucgaaaacggaugggaggguaugguggauggcugguacggguuccgccaccagaauagcgagggaagaggccaggcagcugaccuuaaaucaacucaagccgcgauugaucagaucaacgguaagcugaauagguugaucgggaaaacaaacgaaaaguuucaccagauugagaaggaguucagugaagucgaaggccggauacaggaccucgagaaauauguugaggauaccaagaucgaccugugguccuacaaugccgaauuacugguggcacucgagaaccaacauacgauugaucuuaccgacagcgaaaugaacaaacuguucgagaagacuaaaaagcaguugcgagaaaaugcugaggauaugggaaacggcuguuuuaagaucuaucacaaaugcgacaaugccugcauggggucuauucgcaacggaacauacgaucauaauguauauagagacgaggcucuaaacaauagguuccagaucaaggguguggaacugaaaucaggcuacaaggacuggauacucuggaucaguuuugccauuagcuguuuccugcuuugcgucgcacuguugggguuuaucaugugggccugucagaaaggaaacauucggugcaauaucuguauauga

SEQ ID NO: 14298 - RNA, 1701 nt, Artificial Sequence
  FLUAV/H3N2/A/Kansas/14/2017__EPI1691978 hemagglutinin CDS human (HA)
augaagaccaucauugcccugagcugcauacucugucuuguguucgcucagaaaauccccggcaacgacaauuccacagcaacucugugcuuggggcaccaugccgucccuaacggaacgauuguuaagaccaucacaaaugauagaauugaggugacuaacgcgaccgaauuaguacaaaauucuucaaucggugagauaugugacaguccacaccagauccuggauggcgaaaacugcacacuaauugacgcucuccugggggauccgcagugugacggauuucagaauaaaaagugggaucuuuucguggagaggaacaaagccuacagcaauugcuaucccuacgacgucccugauuaugcaucccugcggucuuugguggccucgucaggcacccucgaauuuaacaaugagagcuucaacugggcugguguuacucaaaaugggacaaguuccucuuguauccgcggaagcaaguccucauuuuucagucgacugaacuggcugacccaucucaauagcaaguacccagcauuaaacgugacgaugcccaacaaugagcaguuugacaaacuguauauuuggggcguccaccauccugugacugauaagaaccagaucucucuuuacgcccaguccucaggccguauaaccguaagcacaaaaagaagucaacaggcuguuauuccaaauaucggguauaggccccggauucgcgacaucccuucuagaaucuccauuuacuggacuauagugaagccaggagauaucuugcugauuaacagcaccgguaaucuaaucgccccgaggggcuacuucaaaauacggucggggaagucuuccauuaugcgcucagacgcgcccaucggaaagugcaaaagugaauguaucacaccuaacggcagcauuccaaaugacaagcccuuucagaacgucaaucgaaucaccuauggugcaugcccuagauacgugaaacaguccacgcucaagcuggccacugggaugaggaacgugccagagcggcaaacacguggaauuuucggcgcuauagccggcuuuaucgaaaaugggugggagggaauggucgaugguugguauggcuuccgccaccagaacucugaggggagaggacaggcagcugaccuuaaaagcacccaagccgcgauugaucagaucaauggcaagcugaacagguugaucgguaaaacuaaugaaaaguuucaccagauugagaaggaguucucagaaguugaagggcggauacaggaccucgagaaauacguggaggauacaaagaucgaccuguggaguuauaacgccgaauuacugguagcacucgagaaccaacauaccauugaucuuacggacuccgaaaugaauaaacuguucgagaagaccaaaaagcaguugcgagaaaacgcugaggauaugggcaauggauguuuuaagaucuaccacaaaugcgacaacgccugcaugggcagcauucgcaaugggacauaugaucauaacguguacagagacgaggcucuaaauaacagguuccagaucaagggagucgaacugaaaucugguuacaaggacuggauacucuggaucucauuugccauuaguuguuuccugcuuugcguggcacuguugggcuuuaucaugugggccugucagaaagggaauauucggugcaacaucuguauauga

SEQ ID NO: 14299 - RNA, 1701 nt, Artificial Sequence
  FLUAV/H3N2/A/Kansas/14/2017 CBER-22B CDC19A__EPI1388416 hemagglutinin CDS human (HA)
augaagaccaucauugcccugagcugcauacucugucuuguguucgcucagaaaauccccggcaacgacaauuccacagcaacucugugcuuggggcaccaugccgucccuaacggaacgauuguuaagaccaucacaaaugauagaauugaggugacuaacgcgaccgaauuaguacaaaauucuucaaucggugagauaugugacaguccacaccagauccuggauggcgaaaacugcacacuaauugacgcucuccugggggauccgcagugugacggauuucagaauaaaaagugggaucuuuucguggagaggaacaaagccuacagcaauugcuaucccuacgacgucccugauuaugcaucccugcggucuuugguggccucgucaggcacccucgaauuuaacaaugagagcuucaacugggcugguguuacucaaaaugggacaaguuccucuuguauccgcggaagcaaguccucauuuuucagucgacugaacuggcugacccaucucaauagcaaguacccagcauuaaacgugacgaugcccaacaaugagcaguuugacaaacuguauauuuggggcguccaccauccugugacugauaagaaccagaucucucuuuacgcccaguccucaggccguauaaccguaagcacaaaaagaagucaacaggcuguuauuccaaauaucggguauaggccccggauucgcgacaucccuucuagaaucuccauuuacuggacuauagugaagccaggagauaucuugcugauuaacagcaccgguaaucuaaucgccccgaggggcuacuucaaaauacggucggggaagucuuccauuaugcgcucagacgcgcccaucggaaagugcaaaagugaauguaucacaccuaacggcagcauuccaaaugacaagcccuuucagaacgucaaucgaaucaccuauggugcaugcccuagauacgugaaacaguccacgcucaagcuggccacugggaugaggaacgugccagagcggcaaacacguggaauuuucggcgcuauagccggcuuuaucgaaaaugggugggagggaauggucgaugguugguauggcuuccgccaccagaacucugaggggagaggacaggcagcugaccuuaaaagcacccaagccgcgauugaucagaucaauggcaagcugaacagguugaucgguaaaacuaaugaaaaguuucaccagauugagaaggaguucucagaaguugaagggcggauacaggaccucgagaaauacguggaggauacaaagaucgaccuguggaguuauaacgccgaauuacugguagcacucgagaaccaacauaccauugaucuuacggacuccgaaaugaauaaacuguucgagaagaccaaaaagcaguugcgagaaaacgcugaggauaugggcaauggauguuuuaagaucuaccacaaaugcgacaacgccugcauuggcagcauccgcaaugggacauaugaucauaacguguacagagacgaggcucuaaauaacagguuccagauaaagggagucgaacugaaaucugguuacaaggacuggauccucuggauuucauuugccaucaguuguuuccugcuuugcguggcacuguugggcuuuauuaugugggccugucagaaagggaauauccggugcaacauauguauuuga

SEQ ID NO: 14300 - RNA, 1701 nt, Artificial Sequence
  FLUAV/H3N2/A/Switzerland/8060/2017__EPI1154878 hemagglutinin CDS human (HA)
augaagaccaucauugcccugagcuacauacucugccuuguguucgcucagaaaauccccggcaacgacaauuccacagcaacucuguguuuggggcaccaugccgucccuaacggaacgauuguuaagaccaucacaaaugauagaauugaggugacuaacgcgaccgaauuaguacaaaauucuucaaucggugagauaugcgacaguccacaccagauccuggauggcgaaaacuguacacuaauugacgcucuccugggggauccgcagugcgacggauuucagaauaaaaagugggaucuuuucguggagaggagcaaagccuauuccucuuguuaccccuaugacgucccugauuacgcaucgcugcggucauugguggccagcaguggcacccucgaauuuaacaaugaguccuucaacuggacugguguuaagcaaaaugggacaucuagcgcuugcauccgcaaguccucaaguagcuuuuucucucgacugaacuggcugacccaucucaauuauacguacccagcauuaaacgugacuaugcccaauaacgagcaguuugacaaacuguauauuuggggaguccaccauccuggcaccgauaaggaccagaucuuccuuuacgcccaguccucaggccguauaacagugagcacuaaaagaagucaacaggcuguaauuccaaacaucgggucuaggccccggauucgcgauaucccuuccagaaucagcauuuacuggaccauaguuaagccaggagacaucuugcugauuaauucgacagguaaccuaaucgccccgaggggcuauuuuaaaauacagucugggaaguccucaauuaugcggagugacgcgcccaucggaaaguguaaaagcgaaugcaucaccccuaauggcuccauuccaaacgauaagcccuuccagaaugugaaccgcaucacguacggugcauguccucgauaugucaaacacucuacucucaagcuggccacagggaugagaaaugugccagagaaacaaaccaggggaauuuuuggcgcuauagccggcuucaucgaaaacgggugggagggaaugguggacgguugguacggcuuucggcaccagaauagcgaggggcguggacaggcagcugaucuuaagucaacucaagccgcgauugaccagaucaacggcaaacugaaucgcuugaucgguaagacaaacgaaaaguuccaucagauugagaaagaguucagugaagucgaagggagaauacaggaucucgagaaguauguugaggacaccaaaaucgaucugugguccuacaaugccgaauuacugguggcacucgagaaccaacacacgauugaccuuaccgauagcgaaaugaauaagcuguuugagaaaacaaagaagcaguugagggaaaacgcugaggacaugggcaacggaugcuucaaaaucuaucauaagugugauaaugccugcauuggcucuauccggaacgggacuuacgaccacaauguauaccgagacgaggcucuaaacaaucgcuuucagauaaaaggaguggaacugaagucagguuauaaagauuggauccucuggauuaguuucgccaucagcugcuuucugcuuugugucgcacuguugggcuucauuaugugggccugccagaaggggaacaucagauguaauauaugcauuuga

SEQ ID NO: 14301 - RNA, 1701 nt, Artificial Sequence
  FLUAV/H3N2/A/Switzerland/8060/2017__EPI1266285 hemagglutinin CDS human (HA)
augaagaccaucauugcccugagcuacauacucugccuuguguucgcucagaaaauccccggcaacgacaauuccacagcaacucuguguuuggggcaccaugccgucccuaacggaacgauuguuaagaccaucacaaaugauagaauugaggugacuaacgcgaccgaauuaguacaaaauucuucaaucggugagauaugcgacaguccacaccagauccuggauggcgaaaacuguacacuaauugacgcucuccugggggauccgcagugcgacggauuucagaauaaaaagugggaucuuuucguggagaggagcaaagccuauuccucuuguuaccccuaugacgucccugauuacgcaucgcugcggucauugguggccagcaguggcacccucgaauuuaacaaugaguccuucaacuggacugguguuaagcaaaaugggacaucuagcgcuugcauccgcaaguccucaaguagcuuuuucucucgacugaacuggcugacccaucucaauuauaaauacccagcauuaaacgugacgaugcccaauaacgagcaguuugacaagcuguauauuuggggaguccaccauccuggcacugauaaagaccagaucuucccauacgcccaguccucaggccguauaaccgugagcacaaagagaagucaacaggcuguaauucccaacaucgggucuaggccucggauucgcgauaucccauccagaaucagcauuuacuggacuauaguuaaaccgggagacauccuuuugauuaauucgaccgguaaccugaucgcccccaggggcuauuuuaagauacagucugggaaguccucaauuaugcggagugacgcgccuaucggaaaauguaagagcgaaugcaucacaccaaauggcuccauucccaacgauaaaccuuuccagaaugugaaccgcaucaccuacggugcauguccacgauaugucaagcacucuacgcuaaaacucgccacugggaugagaaaugugcccgagaagcaaacaaggggaauuuuuggcgcuauagccggcuucaucgaaaacgggugggagggaaugguggacgguugguacggcuuucggcaccagaauagcgaggggcguggacaggcagcugaucugaaaucaacccaagccgcgauugaccagaucaacggcaaacuuaaucgccugaucgguaagacuaacgaaaaguuccaucagauugagaaggaguucagugaagucgaagggagaauacaggauuuggagaaauauguugaggacacaaagaucgaucucugguccuacaaugccgaacuguuaguggcacuggagaaccaacacaccauugaccucacggauagcgaaaugaauaaacuuuuugagaagaccaagaaacagcugagggaaaacgcugaggacaugggcaacggaugcuucaagaucuaucauaaaugugauaaugccugcauuggcucuauccggaacgggacauacgaccacaauguauaccgagacgaggcuuugaacaaucgcuuucagauaaagggaguggaacuaaaaucagguuauaaggauuggauccuguggauuaguuucgccaucagcugcuuucuccugugugucgcacuucugggcuucauuaugugggccugccagaaggggaacaucagauguaauauaugcauuuga

SEQ ID NO: 14302 - RNA, 1701 nt, Artificial Sequence
  FLUAV/H3N2/A/Hong Kong/2671/2019__EPI1543098 hemagglutinin CDS human (HA)
augaagaccaucauugcccugagcuacauacucugccuuguguucacacagaaaauccccggcaacgacaauuccacugcuacgcuguguuuggggcaccaugcagucccuaacggaaccauuguuaagacaaucacuaaugauagaauugaggugaccaacgccacagaauuaguacaaaauucuucaaucggugagauaugcgacaguccacaccagauccuggauggcgggaacuguacccuaauugacgcgcuccugggagauccgcagugcgacggcuuucagaauaaaaagugggaucuuuucguggaaaggagccgggcuuauuccaacuguuaccccuaugacgucccugauuacgccucucugcgcucguugguggcaucaagcgguacucucgaguuuaaaaaugaaaguuucaacugggccgggguuacacaaaauggaaaguccuuuucuugcauccgaggcagcuccucaaguuucuuuagccgucugaacuggcugacccaucucaauuauacguacccagcuuuaaacgugacuaugcccaauaaggagcaguucgacaaacuguauauuuggggcguccaccauccugggaccgauaaggaccagaucucucuuuacgcacaguccucaggaagaauaacagugagcacuaaaaggagucaacaggccguaauuccaaacaucgguucucggccccgcauuagagauaucccuuccaggaucagcauuuacuggaccauaguuaagccaggcgacaucuugcugauuaacucgacagggaaucuaaucgcuccgcggggauauuuuaaaauacgcucuggcaaguccucaauuaugcgaagugacgcccccaucgguaaguguaaaagcgagugcaucaccccuaacggguccauuccaaaugauaagcccuuccagaacgugaauagaaucacguacggagcguguccuagguaugucaaacagucuacucucaagcuggcaacaggcaugcggaacgugccagaaaaacaaacccguggcauuuuuggggccauagcuggauucaucgagaaugguugggaaggcaugguggacgggugguacggauuucgccaccagaacagcgagggcagaggucaggccgcagaucuuaagucaacucaagcugccauugaccagaucaaugggaaacugaacagguugaucggcaagacaaaugagaaguuccaccagauugaaaaagaguucagugaagucgagggacggguucaggaucucgaaaaguauguggaggacaccaaaauagaucugugguccuacaacgcggaguuacugguagcccucgaaaaucaacauacgaucgaccuuaccgauagcgagaugaacaagcuguuugagaaaacaaagaagcaguugcgagaaaaugcagaagacaugggcaacgggugcuucaaaauuuaucacaagugugauaacgcuugcaucggaucuauucgcaaugagacuuacgaccauaacguguacagagacgaggcccuaaauaacagguuucagaucaaaggugucgaacugaagucaggcuauaaagauuggauacucuggaucaguuucgcuauuagcugcuuucugcuuuguguggcccuguugggguucaucaugugggcaugccagaagggaaauauucgguguaacaucugcauauga

SEQ ID NO: 14303 - RNA, 1701 nt, Artificial Sequence
  FLUAV/H3N2/A/Hong Kong/2671/2019__EPI1642843 hemagglutinin CDS human (HA)
augaagaccaucauugcccugagcuacauacucugccuuguguucacacagaaaauccccggcaacgacaauuccacugcuacgcuguguuuggggcaccaugcagucccuaacggaaccauuguuaagacaaucacuaaugauagaauugaggugaccaacgccacagaauuaguacaaaauucuucaaucggugagauaugcgacaguccacaccagauccuggauggcgggaacuguacccuaauugacgcgcuccugggagauccgcagugcgacggcuuucagaauaaaaagugggaucuuuucguggaaaggagccgggcuuauuccaacuguuaccccuaugacgucccugauuacgccucucugcgcucguugguggcaucaagcgguacucucgaguuuaaaaaugaaaguuucaacugggccgggguuacacaaaauggaaaguccuuuucuugcauccgaggcagcuccucaaguuucuuuagccgucugaacuggcugacccaucucaauuauauuuacccagcuuuaaacgugacgaugcccaauaaggagcaguucgacaaacuguauaucuggggcguccaccauccugugacugauaaggaccagauaucucuuuacgcacaguccucagggagaauuaccguaagcacaaaaaggagucaacaggccguuaucccaaacauuggaucucggccccgcaucagaaacaucccuuccaggauuagcauauacuggacuaucgugaagccaggugauauuuugcugaucaauucgaccggcaaccuaauagcuccgcggggguauuuuaaaauucgcucuggaaaguccucaaucaugcgaagugacgcccccaucggcaaguguaaaagcgagugcauuacaccuaaugguuccaucccaaacgacaagcccuuccagaaugucaacagaauuaccuacggggcguguccuagguaugugaaacagucuacgcucaagcuggcaacuggaaugcggaaugugccagaaaaacaaacacguggcauauuuggcgccaucgcuggguucauugagaacggaugggaagguauggucgauggcugguacggguuucgccaccagaauagcgagggaagaggccaggccgcagaccuuaagucaacccaagcugccaucgaucagaucaacgguaaacugaauagguugauugggaagacuaacgagaaguuccaccagauagaaaaagaguucagugaaguugagggccgggugcaggaccucgaaaaguauguagaggauacaaaaaucgaccugugguccuacaaugcggaguuacugguggcccucgaaaaccaacauaccauugaucuuacggacagcgagaugaauaagcuguuugagaaaaccaagaagcaguugcgagaaaacgcagaagauaugggaaacggcugcuucaaaaucuaucacaagugugacaaugcuugcauugggucuauccgcaacgagacauacgaucauaaugucuacagagacgaggcccuaaacaauagguuucagauaaaaggaguggaacugaagucagguuauaaagacuggauccucuggauuaguuucgcuaucagcugcuuucugcuuuguguugcccuguugggcuucauuaugugggcaugccagaaggggaacauccgguguaauauaugcauuuga

SEQ ID NO: 14304 - RNA, 1701 nt, Artificial Sequence
  FLUAV/H3N2/A/Hong Kong/45/2019__EPI1691930 hemagglutinin CDS human (HA)
augaagaccaucauugcccugagcuacauacucugccuuggcuucacacagaaaauccccgggaacgacaauuccacugcuacgcuguguuugggacaccaugcagugccuaacgguaccauugucaagacaaucacuaaugauagaauugagguuaccaacgccacagaauuagugcaaaauucuucaaucggcgagauaugcgacaguccacaccagauccuggaugggggaaacuguacccuaauugacgcgcuccugggcgauccgcagugcgacgguuuucagaauaaaaagugggaucuuuucguagaaaggagccgggcuuauuccaacuguuaccccuaugacgugccugauuacgccucucugcgcucguuggucgcaucaagcgggacucucgaguuuaaaaaugaaaguuucaacugggccggagugacacaaaauggcaaguccuuuucuugcauccgaggcagcuccucaaguuucuuuagccgucugaacuggcugacccaucucaauuauacguacccagcuuuaaacguuacuaugcccaauaaggagcaguucgacaaacuguauauuuggggagugcaccauccugggaccgauaaggaccagaucucucuuuacgcacaguccucagguagaauaacagucagcacuaaaaggagucaacaggccgugauuccaaacaucggcucucggccccgcauuagagauaucccuuccaggaucagcauuuacuggaccauaguaaagccaggggacaucuugcugauuaacucgacaggaaaucuaaucgcuccgcggggcuauuuuaaaauacgcucugguaaguccucaauuaugcgaagugacgcccccaucgggaaguguaaaagcgagugcaucaccccuaacggauccauuccaaaugauaagcccuuccagaacguuaauagaaucacguacggcgcguguccuagguaugugaaacagaacacucucaagcuggcaacaggcaugcggaaugucccagaaaaacaaacccgugggauuuuuggagccauagcugguuucaucgagaacggcugggaagggaugguggacggaugguacggcuuucgccaccaaaauucugaggguagagggcaggccgcagaucuuaagagcacucaggcugccauugaccagaucaacggcaaacugaauagguugaucggaaagacaaacgagaaguuccaccagauugaaaaagaguucucagaaguggagggccggguccaggaucucgaaaaguauguugaggacaccaaaauagaucuguggaguuacaaugcggaguuacugguggcccucgaaaaccaacauacgaucgaccuuaccgauuccgagaugaauaagcuguuugagaaaacaaagaagcaguugcgagaaaacgcagaagacauggggaacggaugcuucaaaauuuaucacaagugugauaaugcuugcaucgguagcauucgcaacgagacuuacgaccauaauguauacagagacgaggcccuaaacaauagguuucagaucaaaggcguggaacugaagucuggguauaaagauuggauacucuggaucucauucgcuauuaguugcuuucugcuuugugucgcccuguugggauucaucaugugggcaugccagaagggcaacauucgguguaauaucugcauauga

SEQ ID NO: 14305 - RNA, 1701 nt, Artificial Sequence
  FLUAV/H3N2/A/South Australia/34/2019__EPI1387331 hemagglutinin CDS human (HA)
augaagaccaucauugcccugagcuacauacucugccuuguguucgcucagaaaauccccggcaacgacaauuccacagcaacucuguguuuggggcaccaugccgucccuaacggaacgauuguuaagaccaucacaaaugauagaauugaggugacuaacgcgaccgaauuaguacaaaauucuucaaucggugagauaugcgacaguccacaccagauccuggauggcgggaacuguacacuaauugacgcucuccugggagauccgcagugcgacggcuuucagaauaaaaagugggaucuuuucguggaaaggagccgggccuauuccaacuguuaccccuaugacgucccugauuacgcaucucugcgcucguugguggccucaagcgguacccucgaguuuaaaaaugaaaguuucaacuggacugggguuaagcaaaauggaacauccucugcuugcauccgaggcagcuccucaaguuucuuuagccgucugaacuggcugacccaucucaauuauacguacccagcauuaaacgugacuaugcccaauaaggagcaguuugacaaacuguauauuuggggcguccaccauccugggaccgauaaggaccagaucuuccuuuacgcccagucuuccggaagaauaacagugucaacuaaaaggagccaacaggcuguaauuccaaacaucgguuuucggccccgcauuagagauaucccuaguaggaucucuauuuacuggaccauaguuaagccaggcgacaucuugcugauuaacuccacagggaaucuaaucgccccgcggggauauuucaaaauacgcagcggcaagucgucuauuaugcgauccgacgcgcccaucgguaaguguaaaucagagugcaucaccccuaacgggaguauuccaaaugauaagcccuuucagaacgugaauagaaucacguacggagcauguccuagguaugucaaacagagcacucucaagcuggccacaggcaugcggaacgugccagaaaaacaaacccguggcauuuucggggcuauagccggauuuaucgagaaugguugggaaggcaugauggacgggugguacggauuccgccaccagaacuccgagggcagaggucaggcagcugaucuuaagucuacucaagccgcgauugaccagaucaaugggaaacugaacagguugaucggcaagacaaaugagaaguuccaccagauugaaaaagaguuuagcgaaguggagggacggguccaggaucucgaaaaguauguugaggacaccaaaauagaucuguggucauacaacgccgaguuacugguggcacucgaaaaucaacauacgaucgaccuuaccgauagugagaugaacaagcuguucgaaaagacaaagaagcaguugcgagagaaugcugaagacaugggcaacgggugcuuuaaaauuuaucacaagugugauaacgccugcaucggauccauucgcaaugagacuuacgaccauaacguauacagagacgaggcucuaaauaacagguuccagaucaaagguguggaacugaaaagcggcuauaaagauuggauacucuggaucucuuuugccauuucaugcuuccugcuuuguaucgcacuguugggguuuauuaugugggccugccagaagggaaauauccgguguaacauaugcauuuga

SEQ ID NO: 14306 - RNA, 1701 nt, Artificial Sequence
  FLUAV/H3N2/A/South Australia/34/2019__EPI1440494 hemagglutinin CDS human (HA)
augaagaccaucauugcccugagcuacauacucugccuuguguucgcucagaaaauccccggcaacgacaauuccacagcaacucuguguuuggggcaccaugccgucccuaacggaacgauuguuaagaccaucacaaaugauagaauugaggugacuaacgcgaccgaauuaguacaaaauucuucaaucggugagauaugcgacaguccacaccagauccuggauggcgggaacuguacacuaauugacgcucuccugggagauccgcagugcgacggcuuucagaauaaaaagugggaucuuuucguggaaaggagccgggccuauuccaacuguuaccccuaugacgucccugauuacgcaucucugcgcucguugguggccucaagcgguacccucgaguuuaaaaaugaaaguuucaacuggacugggguuaagcaaaauggaacauccucugcuugcauccgaggcagcuccucaaguuucuuuagccgucugaacuggcugacccaucucaauuauaaguacccagcauuaaacgugacgaugcccaauaaagagcaguuugacaagcuguauauuuggggcguccaccauccuaucacugauaaagaccagauauuccuuuacgcccagucuuccgggagaauuaccgugucaacaaagaggagccaacaggcuguaaucccaaacauuggauuucggccccgcaucagagauaucccuaguaggauuucuauauacuggacuaucguuaaaccaggugacauuuugcugaucaacuccaccggcaaucuaauagccccgcggggguauuucaagauucgcagcggaaagucgucuaucaugcgauccgacgcgcccaucggcaaauguaagucagagugcauuacaccuaacgguaguaucccaaaugauaaacccuuucagaacgugaauagaauuaccuacggggcauguccuagguaugucaagcagagcacgcucaaacuggccacuggaaugcggaacgugccagaaaagcaaacacguggcauauucggcgcuaucgccggguuuauugagaauggaugggaagguaugauggacggcugguacggguuccgccaccagaacuccgagggaagaggccaggcagcugaucuuaaaucuacccaagccgcgaucgaccagaucaaugguaagcugaacagguugauugggaagacuaaugagaaauuccaccagauagaaaaggaguuuagcgaaguggagggccggguccaggaucucgaaaaauauguugaggacacaaagaucgaucuguggucauacaacgccgaguuacugguggcacucgaaaaucaacauaccauugaccuuacggauagugagaugaacaaacuguucgaaaagaccaagaaacaguugcgagagaaugcugaagacaugggaaacggcugcuuuaagaucuaucacaaaugugauaacgccugcauuggguccauccgcaaugagacauacgaccauaacguauacagagacgaggcucuaaauaacagguuccagauaaagggaguggaacugaaaagcgguuauaaggauuggauccucuggauuucuuuugccaucucaugcuuccugcuuuguauugcacuguugggcuuuaucaugugggccugccagaaggggaauauacgguguaacauuugcaucuga

SEQ ID NO: 14307 - RNA, 1683 nt, Artificial Sequence
  FLUAV/H7N9/A/chicken/Zhejiang/C483/2013(H7N9)__AGN69400.1 hemagglutinin CDS human (HA)
augaacacccagauccugguguucgcccucauugcuauaauccccacaaaugcagacaagauuugccuuggccaccaugccgucagcaacgggacuaaaguuaauacgcugaccgagagaggaguggaaguagugaacgcgacagagacugucgaaaggaccaauaucccucggauuuguuccaaggguaaaaagacaguggauuugggccaaugcggguuacugggaaccaucacuggcccaccgcagugugaccaguuucuagaguucucugcugaucucauaaucgaacgccgagaggguucagacguuugcuaccccgggaaauuugugaacgaggaagcccugcgucagauucuuagagagaguggaggcaucgauaaggaagcaaugggcuucacauauagcgggauuaggaccaauggagccacguccgcuugucggcgcucugguucgucauuuuacgcagagaugaaguggcuguugagcaacacugacaaugccgcuuucccucaaaugaccaaaaguuauaagaacacaagaaaauccccagcccucaucgucuggggcauacaccauucugugagcacugcggagcagaccaagcuguacggguccggaaauaaacugguaacaguuggcucaaguaacuaucagcagagcuuugugcccucuccuggugcaaggccacaagucaaugggcaguccggacggauugauuuccacuggcucauguuaaaccccaaugacaccgugacguuuucauucaacggcgccuuuaucgcuccugaucgcgccagcuuccugcgaggcaagaguauggggauucagucuggagugcaggucgacgcaaacugcgaaggugauuguuaccauuccggcgggacuaucaucagcaaucuuccauuucaaaacauugacucgagagcuguuggaaagugcccgagguaugugaaacagcggucuuugcugcuagccacaggcaugaagaauguacccgagauaccuaaaggucguggccucuucggggcgaucgccggauucauugaaaacggcugggaggggcugaucgauggaugguacgguuuucgccaccagaaugcacaaggcgaagggaccgcugccgacuacaaguccacucagucagcuauagaccagauuacaggaaaacuuaacagacugaucgagaagaccaaucagcaauucgaguugaucgauaacgaauuuaaugagguggaaaaacagauuggcaacgucaucaauuggacgagggacaguauuaccgagguguggagcuauaacgccgaacuccugguugcaauggagaaucagcacacaauagauuuagccgacuccgagauggauaagcuguacgaacgggugaagcgacagcuccgcgagaacgcugaagaggacgguacuggguguuucgaaaucuuucauaaaugcgaugacgauuguauggcgucuauuagaaauaacaccuaugaccacagcaaguacagggaggaggcaaugcaaaaccggauccagaucgauccagucaaacuuucaaguggcuauaaggacgugauucugugguucuccuuuggagccagcugcuucauauugcuagcuaucguaaugggccugguuuuuauuugcgugaaaaaugggaacaugcgcuguacaaucugcauuuga

SEQ ID NO: 14308 - RNA, 1686 nt, Artificial Sequence
  FLUAV/H10N8/A/Jiangxi/IPB13/2013(H10N8)__AHK10761.1 hemagglutinin CDS human (HA)
auguacaagaucguggucauuauagcccugcucggcgcuguuaaagggcuugacaagaucugccugggacaccaugcaguggccaacgguaccauuguaaaaacauugacuaaugagcaggaagaggugacgaacgcgaccgaaacagucgagagcacuggcaucaauagauuauguaugaaggggaggaaacacaaggaucugggaaacugccaucccauuggcaugcuaaucgguaccccugcuugugaccuccaccugacagggaugugggauacccuuauagaacgggagaaugccaucgcauauugcuacccaggagccacugugaacguugaggcucugcgccaaaagauuauggaauccggcggcaucaauaaaauuucuacaggguucaccuauggaucaaguaucaacagcgcagguacgacucgagccuguaugcguaauggcgggaacuccuuuuacgcugaguugaaguggcucgugucuaaaucgaagggacagaauuucccgcagaccacaaacacuuauagaaauaccgacacagccgaacaucugauaauguggggcauucaccaccccucaagcacccaggagaaaaacgaucuguacgguacgcaaagucucuccaucucugucgggagcuccacuuauaggaauaacuuugugccuguaguuggagcgcggccacaggugaacggccagucaggccgcauugacuuccauuggacauuaguccagcccggggauaauaucaccuuuagucacaacggaggucugaucgcaccuagcagagugucuaaacuuauuggcaggggguugggaauacaauccgacgccccaaucgauaauaacugcgagucaaaguguuucuggcggggcgguagcauuaauacucgccugcccuuucagaaccuaaguccucgaacaguggggcagugcccaaaguacgucaauagaaggucucucaugcuggcuaccggcaugcggaacguuccggaacuuauccagggacguggccuguucggggccauagcaggauuuuuggagaaugguugggaaggcaugguggacgggugguacggauuccgccaucaaaacgcucagggcacgggucaggccgcggauuauaaguccacccaagccgcaauugaccagaucacagggaaacucaauagacugguagagaagacuaacaccgaauuugagagcaucgagucggaguucucugaaauugaacaccagaucggcaaugugauuaacuggacaaaagauuccauaacugacaucuggaccuaccaggcugaguuacuggucgccauggaaaaucaacacacaauugacauggcugauucagagaugcucaaccuuuaugagagggugcggaagcagcugcgacagaacgccgaagaggacggaaaaggcuguuuugaaaucuaccaugcaugcgaugacaguuguauggagagcauccgcaauaacaccuaugaucacucccaguacagagaagaggccuugcuaaauaggcugaacauuaaucccguuacucucucuagcggguauaaggacauaauccugugguucucauucggagcuaguugcuuugugcuucuggcggucgugauggguuuguucuuuuucugccucaagaacggcaauaugcgguguacgauuugcaucuga

SEQ ID NO: 14309 - RNA, 1752 nt, Artificial Sequence
  FLUBV/H0N0/B/Colorado/06/2017__EPI1011552 hemagglutinin CDS human (HA)
augaaggccaucauugugcugcucauggucguuaccagcuccgcugacagaauaugcacaggcaucacuucuucaaacaguccccacgugguaaaaacggcaacccagggggaggugaaugucacaggagugauuccucuuacuaccacaccaaccaagagccauuucgccaaccugaaagguacugaaacaaggggcaaguuguguccgaaaugcuuaaauuguaccgaucuggacguugcgcuagggcggcccaagugcacgggaaagaucccuuccgcucgcgugucuauucuccacgagguccgaccagugacuucgggcuguuuucccaucaugcaugaucguaccaaaauaagacaacugccuaaccuucugagggguuacgaacacguacgguugucaacacauaauguuaucaacgccgagggggcaccaggaggccccuauaagauuggcacuagcgggaguugcccuaauaucaccaacggaaaugguuucuuugccacaauggcuugggcagugccagacaaaaacaagaccgccacgaauccgcucacuauugaaguccccuacguguguacagagggcgaggaucagaucaccguguggggguuccacuccgacaacgaaacucagauggcuaaacuguauggagauucuaagccucagaaguuuacaagcuccgccaauggcgucaccacgcacuacguuucacaaauagguggguucccaaaccagaccgaggacggaggccugccccagaguggccgcauugugguagauuauauggugcagaaaagcgggaagacaggaacuaucaccuaccaaagagguauucucuuaccucagaaagucuggugcgcgucuggcagguccaaggugaucaaagggucacugccacuuaucggagaagcagacuguuugcaugagaaguauggcggucugaauaaaagcaagcccuacuacacaggggagcacgccaaggcuauuggcaacugcccgauauggguuaaaacuccucuaaagcucgccaacggaaccaaauaucggcccccagcaaagcugcuuaaagaacgcggcuuuuucggggcuaucgccggauuucuggaggguggcugggaagggaugauugcgggauggcauggcuacacaagucacggugcccacgggguggcagucgcugccgauuugaagucuacccaggaggcuaucaauaagauaacuaaaaaccucaauucccugagcgaauuagaggugaagaaccugcagcgacucucgggcgccauggacgagcuucauaaugaaauucuggaguuggaugaaaaaguagacgaccuaagagcagauacgaucucuucccaaaucgagcuggccguucuccugucaaacgaaggaauuaucaauagugaggacgagcaccuucuggcuuuggaaaggaagcucaaaaagaugcugggcccuagcgcgguggagauugggaacggauguuucgaaacaaagcauaaaugcaaucagaccugcuuagauaagauagcagccgguacuuuugacgcuggcgaguucucccugcccaccuuugauucucuaaacaucacagccgcaagccucaaugacgaugggcuggacaaccacaccauucuuuuguauuacucaacugccgcuaguucccuggccgucacacucaugaucgcaaucuucguggucuauauggugagccgggauaauguuucuuguucaauuugccuguga

SEQ ID NO: 14310 - RNA, 1752 nt, Artificial Sequence
  FLUBV/H0N0/B/Colorado/06/2017__EPI1051642 hemagglutinin CDS human (HA)
augaaggccaucauugugcugcucauggucguuaccagcuccgcugacagaauaugcacaggcaucacuucuucaaacaguccccacgugguaaaaacggcaacccagggggaggugaaugucacaggagugauuccucuuacuaccacaccaaccaagagccauuucgccaaccugaaagguacugaaacaaggggcaaguuguguccgaaaugcuuaaauuguaccgaucuggacguugcgcuagggcggcccaagugcacgggaaagaucccuuccgcucgcgugucuauucuccacgagguccgaccagugacuucgggcuguuuucccaucaugcaugaucguaccaaaauaagacaacugccuaaccuucugagggguuacgaacacguacgguugucaacacauaauguuaucaacgccgagggggcaccaggaggccccuauaagauuggcacuagcgggaguugcccuaauaucaccaacggaaaugguuucuuugccacaauggcuugggcagugccagacaaaaacaagaccgccacgaauccgcucacuauugaaguccccuacguguguacagagggcgaggaucagaucaccguguggggguuccacuccgacacugaaacacagauggcuaaacuguauggagauucuaagccucagaaguuuaccagcuccgccaacggcgucacgacccacuacguuucacaaauagguggguucccaaaucagacagaggacggaggccugccccagaguggccgcauugugguagauuauauggugcagaaaagcgggaagacuggaaccaucacauaccaaagagguauucucuuaccucagaaagucuggugcgcgucuggcagguccaaggugaucaaagggucacugccacuuaucggagaagcagacuguuugcaugagaaguauggcggucugaacaaaagcaagcccuacuacacuggggagcacgccaaggcuauuggcaauugcccgauauggguuaaaaccccucuaaagcucgccaacggaacaaaauaucggcccccagcaaagcugcuuaaagaacgcggcuuuuucggggcuaucgccggauuucuggaggguggcugggaagggaugauugcgggauggcauggcuacaccagucacggugcccacgggguggcagucgcugccgauuugaagucuacucaggaggcuaucaacaagauaacgaaaaaucucaacucccugagcgaauuagaggugaagaaucugcagcgacucucgggcgccauggacgagcuucauaacgaaauucuggaguuggaugaaaaaguagacgaccuaagagcagauacaaucucuucccaaaucgagcuggccguucuccugucaaaugaaggaauuaucaacagugaggacgagcaccuucuggcuuuggaaaggaagcucaaaaagaugcugggcccuagcgcgguggagauugggaauggauguuucgaaaccaagcauaaaugcaaccagacuugcuuagauaagauagcagccgguaccuuugacgcuggcgaguucucccugcccacauuugauucucuaaauaucaccgccgcaagccucaacgacgaugggcuggacaaucacacuauucuuuuguauuacucaacagccgcuaguucccuggccgucacgcucaugaucgcaaucuucguggucuauauggugagccgggauaacguuucuuguucaauuugccuguga

SEQ ID NO: 14311 - RNA, 1752 nt, Artificial Sequence
  FLUBV/H0N0/B/Colorado/06/2017 BX-71__EPI1151760 hemagglutinin CDS human (HA)
augaaggccaucauugugcugcucauggucguuaccagcuccgcugacagaauaugcacaggcaucacuucuucaaacaguccccacgugguaaaaacggcaacccagggggaggugaaugucacaggagugauuccucuuacuaccacaccaaccaagagccauuucgccaaccugaaagguacugaaacaaggggcaaguuguguccgaaaugcuuaaauuguaccgaucuggacguugcgcuagggcggcccaagugcacgggaaagaucccuuccgcucgcgugucuauucuccacgagguccgaccagugacuucgggcuguuuucccaucaugcaugaucguaccaaaauaagacaacugccuaaccuucugagggguuacgaacacguacgguugucaacacauaauguuaucaacgccgagggggcaccaggaggccccuauaagauuggcacuagcgggaguugcccuaauaucaccaacggaaaugguuucuuugccacaauggcuugggcagugccagacaaaaacaagaccgccacgaauccgcucacuauugaaguccccuacguguguacagagggcgaggaucagaucaccguguggggguuccacuccgacacugaaacacagauggcuaaacuguauggagauucuaagccucagaaguuuaccagcuccgccaacggcgucacgacccacuacguuucacaaauagguggguucccaaaucagacagaggacggaggccgcccccagaguggcagaauugugguagauuauauggugcagaaaagcgggaagacuggaaccaucacauaccaaagggguauucugcucccucagaaagucuggugcgcgucuggccgguccaaggugaucaaagggucauuaccacugaucggagaagcagacugucuucaugagaaguauggcgguuugaacaaaagcaagcccuacuacacuggggagcacgccaaggcuauuggcaauugcccgauauggguuaaaaccccucugaagcuagccaacggaacaaaauaucgacccccagcaaagcuccugaaagaacgcggcuuuuucggggcuaucgccggauuucuugaggguggcugggaagggaugauugcgggauggcauggcuacaccagucacggugcccacgggguggcagucgcugccgaucugaagucuacucaggaggcuaucaacaagauaacgaaaaauuugaacucccucagcgaacuggaggugaagaauuuacagagacugucgggcgccauggacgagcuccauaacgaaauucuugagcuggaugaaaaaguagacgacuugagggcagauacaaucucuucccaaaucgagcuagccguucugcucucaaaugaaggaauuaucaacagugaggacgagcaucugcuugcucuggaacggaaguugaaaaagaugcucggcccuagcgcgguggagauugggaauggauguuucgaaaccaagcacaaaugcaaccagacuugccuggauaagauagcagccgguaccuuugacgcuggcgaguucuccuuacccacauuugauucucugaauaucaccgccgcaagccuaaacgacgaugggcucgacaaucacacuauucugcuuuauuacucaacagccgcuaguuccuuggccgucacgcugaugaucgcaaucuucguggucuauauggugagccgugauaacguuucuuguucaauuugccucuga

SEQ ID NO: 14312 - RNA, 1749 nt, Artificial Sequence
  FLUBV/H0N0/B/Washington/02/2019__EPI1368874 hemagglutinin CDS human (HA)
augaaggccaucauugugcugcucauggucguuaccagcaacgcugacagaauaugcacaggcaucacuuccucuaauucaccccacgugguaaaaacggcaacccagggggaagugaacgucacaggagugauuccucuuacuaccacaccaaccaagagucauuucgccaaucugaaagguacugaaacaaggggcaaguuguguccgaaaugcuuaaacuguaccgaucuggacguugcgcuagggcggcccaagugcacgggaaagaucccuagcgcucgcguguccauucuccacgagguccgaccagugacuucuggcuguuuucccaucaugcaugaucguaccaaaauaagacaacugccuaaucuucugagggguuacgaacacguacgguugucgacacauaacguuaucaaugccgaggacgcaccagggcgccccuaugaaauuggaacuucaggcagcugcccuaacaucaccaauggcaacggguucuuugccacaauggcuugggcagugccaaagaauaaaaccgccacgaacccgcucacuauugagguccccuacaucuguacagagggagaagaucagauaaccgugugggguuuccacagugacaaugagacucagauggcuaagcuguauggcgauuccaaaccucagaaguuuacaucuagcgccaacggggugaccacgcacuacgucucccaaauuggaggcuucccaaaucagaccgaagacggugggcugccccagucaggaagaaucguuguggauuauaugguacagaagaguggcaaaacaggcacuauuaccuaccaaagggggauccucuuaccucagaagguguggugcgcgagcggacggucuaaagucaucaaggguucccugccacuuauuggcgaggcagacuguuugcaugagaaauaugggggacugaacaagucaaaacccuacuacacaggcgaacacgccaaggcuauagguaacugcccgaucugggugaagacuccucuaaaacucgccaaugggaccaaguaucgacccccagcaaaacugcuuaaggagcgcggcuuuuucggagcuauugccggcuuucuggaagggggaugggaggguaugaucgcgggcuggcauggguacacaagccacggagcccacggcguugcaguggcugccgauuugaaaaguacccaggaagcuauaaacaagauuacuaagaaucucaacucucuguccgaguuagaggucaaaaaucugcagagacucagcggugccauggacgaacuucauaacgagauccuggaauuggaugagaagguggacgaccuaagggcagauacgaucucgucucaaauugaacuggccguacuccuguccaaugaggggaucauuaacucagaggacgaacaccuucuggcuuuggagcggaaacucaagaaaaugcugggcccuagugcgguugaaauaggaaauggcuguuucgagacaaagcauaagugcaaccagaccugcuuagaucguaucgcagccgggacuuuugacgcuggagaguucagccugcccaccuuugauucccuaaauauuacagccgcaucucucaacgacgauggucuggacaaucacaccauccuuuuguauuacagcacugccgcuucaagucuggccgugacacucaugaucgcaauuuucgucguguauauggucucccgcgauaacgugagcuguucuauaugccuguga

SEQ ID NO: 14313 - RNA, 1749 nt, Artificial Sequence
  FLUBV/H0N0/B/Washington/02/2019__EPI1422452 hemagglutinin CDS human (HA)
augaaggccaucauugugcugcucauggucguuaccagcaacgcugacagaauaugcacaggcaucacuuccucuaauucaccccacgugguaaaaacggcaacccagggggaagugaacgucacaggagugauuccucuuacuaccacaccaaccaagagucauuucgccaaucugaaagguacugaaacaaggggcaaguuguguccgaaaugcuuaaacuguaccgaucuggacguugcgcuagggcggcccaagugcacgggaaagaucccuagcgcucgcguguccauucuccacgagguccgaccagugacuucuggcuguuuucccaucaugcaugaucguaccaaaauaagacaacugccuaaucuucugagggguuacgaacacguacgguugucgacacauaacguuaucaaugccgaggacgcaccagggcgccccuaugaaauuggaacuucaggcagcugcccuaacaucaccaauggcaacggguucuuugccacaauggcuugggcagugccaaagaauaaaaccgccacgaacccgcucacuauugagguccccuacaucuguacagagggagaagaucagauaaccgugugggguuuccacagugacuccgagacucagauggcuaagcuguauggcgauucuaaaccucagaaguuuacaagcuccgccaauggggugaccacgcacuacgucucacaaauuggaggcuucccaaaccagaccgaagacggugggcugccccagaguggaagaaucguuguggauuauaugguacaaaagagcggcaaaacaggcacuauuaccuaccagagggggauccucuuaccucagaagguguggugcgcgucuggacgguccaaagucaucaaggguucacugccacuuauuggcgaggcagacuguuugcaugagaaauaugggggacugaauaagagcaaacccuacuacacaggcgaacacgccaaggcuauagguaacugcccgaucugggugaagacuccucuaaaacucgccaacgggaccaaguaucgacccccagcaaaacugcuuaaggagcgcggcuuuuucggagcuauugccggcuuucuggaagggggaugggaggguaugaucgcgggcuggcauggguacacaagucacggagcccacggcguugcaguggcugccgauuugaaaucuacccaggaagcuauaaauaagauuacuaagaaccucaauucccugagcgaguuagaggucaaaaaccugcagagacucucgggugccauggacgaacuucauaaugagauccuggaauuggaugagaagguggacgaccuaagggcagauacgaucucuucccaaauugaacuggccguacuccugucaaacgaggggaucauuaauagugaggacgaacaccuucuggcuuuggagcggaaacucaagaaaaugcugggcccuagcgcgguugaaauaggaaacggcuguuucgagacaaagcauaagugcaaucagaccugcuuagaucguaucgcagccgggacuuuugacgcuggagaguucucccugcccaccuuugauucucuaaacauuacagccgcaagccucaaugacgauggucuggacaaccacaccauccuuuuguauuacucaacugccgcuaguucccuggccgugacacucaugaucgcaauuuucgucguguauauggucagccgcgauaaugugucuuguucaauaugccuguga

SEQ ID NO: 14314 - RNA, 1410 nt, Artificial Sequence
  FLUAV/H1N1/A/California/7/2009__GQ906802 neuraminidase CDS human (NA)
augaaccccaaucagaagaucauuaccauaggcagcgugugcaugacaaucgggauggccaaccugauucuccaaaucggaaauauuaucuccauauggaucucucacucaauucagcuugguaaccagaaucagaucgagacuuguaaccaaagugucauuacguacgaaaauaacaccuggguuaaucagacauaugugaacaucagcaauacuaacuucgcugcaggccaguccguagugucugucaaacuggccggaaauucgucauugugcccugugagcggaugggcgauauacaguaaggacaacuccguuagaauuggcucuaaaggugauguguuugucaucagggagccauucauuagcuguuccccguuagaaugccggaccuuuuuccugacacagggggcucuacucaaugacaagcauucaaacggaaccaucaaagaucgcagucccuaucgaacucugaugagcuguccuaucggcgaggugccaucucccuacaacucccguuuugaaucaguagccuggagcgcaagugccugccacgacggcauuaauuggcuuacaauagggaucucuggaccugauaacggugcuguugcagugcugaaguauaauggcauuaucaccgacacgauaaaguccuggagaaacaauauuuugaggacucaagagagcgagugugccugcgucaacgggucguguuucaccgugaugacagauggaccaucuaauggccaggcuuccuacaaaaucuuucggaucgaaaaggguaaaauugugaagucagucgagaugaacgcccccaauuaucauuacgaagagugcaguuguuacccugacagcuccgagaucacuugcguuugccgcgauaacuggcacgggucuaauagaccaugggugagcuucaaccagaaucucgaauaucagauuggauacauauguucaggcaucuuuggcgacaacccgaggcccaaugauaaaaccgggaguugcggaccuguauccagcaacggugcgaacggcgugaagggguucucuuuuaaguauggaaauggcgucuggauuggucggacaaaaucaaucaguagccgcaacggguucgagaugaucugggacccaaauggcuggaccggaacggauaacaauuuuuccauuaagcaagacauagugggcaucaacgaauggucuggguacucggggagcuucguucagcaucccgagcugacuggucuggacuguauucgaccuugcuucuggguggaacucaucagaggcaggccaaaagagaauacaauuuggaccuccgggucaaguaucucuuuuuguggagucaacagcgauacugugggcugguccuggcccgacggugcagaguuaccguucacaauagauaaguga

SEQ ID NO: 14315 - RNA, 1410 nt, Artificial Sequence
  FLUAV/H1N1/A/Michigan/45/2015__EPI662593 neuraminidase CDS human (NA)
augaaccccaaucagaagaucauuaccauaggcagcaucugcaugacaauugggauggccaaccugauccuccaaauuggaaauaucauauccaucugggugucucacucaauucagaucgguaaccagagucagauugagacuuguaaucaaagcgucaucacguacgaaaacaauaccuggguuaaccagacauaugugaauauauccaacacuaauuucgcugcaggccagucuguagugucggucaaacuugccgggaacucaagccugugcccugugaguggaugggcgauuuacuccaaggacaauucuguuagaaucggcagcaaaggugauguguuugucauuagggagccauucaucuccuguucaccguuggaaugccggaccuuuuucuuaacacagggggcucugcuaaacgacaagcauaguaauggaaccaucaaagaucgcagccccuaucgaacucucaugucuuguccuauuggcgaggugccaucccccuacaacucacguuuugaaagcguagccuggagugcaucugccugccacgacggcauaaacuggcugacaaucgggauuuccggaccugauagcggugcuguugcagugcuuaaguauaauggcaucauaaccgacacgauuaagucguggagaaacaauauccugaggacucaagagucugagugugccugcgucaacggguccuguuucaccaucaugacagauggaccaucagacggccaggcuaguuacaaaauuuuucggaucgaaaaggguaaaauuauaaagagcguggagaugaaagcccccaauuaucauuacgaagagugcuccuguuacccugauucuagcgagaucacuugcgugugccgcgacaacuggcacgggucaaauagaccaugggucaguuucaaccagaauuuggaauaucagaugggauacauuuguuccggcguuuuuggcgauaacccgaggcccaaugacaagaccgggagcugcggaccugugucuucaaacggugcgaauggcguaaagggguucaguuuuaaauauggaaacggcguguggaucggucggacaaagagcaucuccucucgcaaaggguucgagaugauuugggauccaaauggcuggaccggaacggacaacaaguuuucgauaaaacaagacaucgucggcauuaacgaauggagcggguacuccggaucauucgugcagcaucccgagcucacuggucuggauuguauccgaccuugcuucuggguugaacugauuagaggcaggccagaggagaauacaaucuggaccagugggucuagcauauccuuuuguggagugaacucagacacugucggcuggagcuggcccgauggugcagaacucccguucacaaucgacaaguga

SEQ ID NO: 14316 - RNA, 1410 nt, Artificial Sequence
  FLUAV/H1N1/A/Netherlands/602/2009__AGU92703 neuraminidase CDS human (NA)
augaaccccaaucagaagaucauuaccauaggcagcgugugcaugacaaucgggauggccaaccugauucuccaaaucggaaauauuaucuccauauggaucucucacucaauucagcuugguaaccagaaucagaucgagacuuguaaccaaagugucauuacguacgaaaauaacaccuggguuaaucagacauaugugaacaucagcaauacuaacuucgcugcaggccaguccguagugucugucaaacuggccggaaauucgucauugugcccugugagcggaugggcgauauacaguaaggacaacuccguuagagugggcucuaaaggugaugucuuugugauuagggagccauucaucagcuguuccccguuagaaugccggaccuuuuuccugacacagggggcucuacucaaugacaagcauucaaacggaaccauuaaagaucgcagucccuaucgaacucugaugagcuguccuaucggcgagguaccaucucccuacaacucccguuuugaaucaguugccuggagcgcaagugccugccacgacggcaucaauuggcuuacaauugggauaucuggaccugauaacggugcuguggcaguccugaaguauaauggcaucauuaccgacacgaucaaguccuggagaaacaauauauugaggacucaagagagcgagugugccugcgugaacgggucguguuucaccgugaugacagauggaccaucuaauggccaggcuuccuacaaaauuuuucggaucgaaaaggguaaaaucgucaagucaguugagaugaacgcccccaauuaucauuacgaagagugcaguuguuacccugacagcuccgagauuacuugcgugugccgcgauaacuggcacgggucuaauagaccaugggugagcuucaaccagaaucucgaauaucagaucggauacauuuguucaggcauauuuggcgacaacccgaggcccaaugauaaaaccgggaguugcggaccuguauccagcaacggugcgaacggcgucaagggguucucuuuuaaguauggaaauggcguguggaucggucggacaaaaucaauuaguagccgcaacggguucgagaugaucugggacccaaauggcuggaccggaacggauaacaauuuuuccaucaagcaagacauuguuggcauaaacgaauggucuggguacucggggagcuucauccagcaucccgagcugacuggucuggacuguauucgaccuugcuucuggguggaacucaucagaggcaggccaaaagagaauacaauuuggaccuccgggucaaguaucucuuuuuguggagucaacagcgauacugugggcugguccuggcccgacggugcagaguuaccguucacaauagauaaguga

SEQ ID NO: 14317 - RNA, 1410 nt, Artificial Sequence
  FLUAV/H3N2/A/Hong Kong/4801/2014__EPI578429 neuraminidase CDS human (NA)
augaaccccaaucagaagaucauuaccauaggcagcgugucccugacaaucucuacuauuugcuucuuuaugcaaaucgccauucucaucacgaccgucacacuucacuucaaacaguacgaguuuaacucaccuccaaauaaccagguuaugcugugugaaccgacuauaaucgagagaaauauuaccgaaaucguguauuugacaaacaccacuauugagaaggaaaucugccccaaaccugcugaguacaggaauuggaguaagccacagugugggauaacaggauucgcacccuuuagcaaagacaacuccauucgguuaucugccgguggcgauaucuggguaacccgcgagccuuaugugucgugcgacccagauaaguguuaccaauucgcgcuggggcagggaacgacucuaaauaacguccauucaaauaacaccgugcgagaccguacacccuauagaacucuccugaugaaugaacuuggcguuccuuuucaccuggguaccaaacaggugugcauugcuuggagcaguuccucuugucaugaugggaaggccugguugcacgucugcaucacaggagacgauaagaacgcaaccgccagcuucaucuacaauggcaggcucguggacuccguaguuucauggaguaaagauauucugcggacgcaggagagcgaauguauaugcaucaacggcacuuguacaguggucaugaccgacgggucugcuuccggaaaggcagauacuaaaauucuguuuaucgaggaggguaagauagugcauacaucaacccucagcggcagugcccaacacguggaagagugcucuugcuauccacgcuacccgggggucagauguguuugcagggacaacuggaagggauccaaucggcccauuguggauaucaacaucaaagaccacagcauuguaucgucuuacguguguuccggcuuagucggugacacgccucgcaagaaugauucaaguagcuccucucauugccuggacccaaacaaugaagaagggggacacggcgugaaaggcugggcuuucgaugacgggaacgauguuuggaugggacgaaccaucaaugagacaagcagacuugguuaugagacuuuuaaggugauugagggcuggucaaaccccaaaaguaaguugcagaccaauaggcaggucauaguggaccguggggaucgguccggauacagcggcaucuucucuguagaagguaaaucauguauuaaccgcugcuuuuauguugagcugaucagagggaggaaggaagagacagaagugcuauggaccaguaauagcaucgucguguucuguggcacuuccggaacauacggcaccgggucuuggccugacggagccgaucucaaccugaugccaauuuga

SEQ ID NO: 14318 - RNA, 1401 nt, Artificial Sequence
  FLUBV/H0N0/B/Brisbane/60/2008__EPI173278 neuraminidase CDS human (NA)
augcugcccagcaccauccagacacucacucuuuuccugacguccggcgggguguuguuaucucuguacgucucagccagucuaagcuaucuccuguacuccgacauucuucugaaguuuucuccuaccgagauaacagcuccaacuaugccguuggauugcgcaaacgccucgaauguucaagcggugaacagaucagcuaccaaaggaguaacacuccugcugcccgaaccugaguggaccuauccaaggcucagcugucccgguaguacuuuccagaaggccuuacugaucuccccucaccgguuuggcgaaacaaaaggaaauucugcaccacuuauuauccgcgagcccuucauugccugcgggccuaacgaauguaagcauuuugcuuugacccacuacgcagcccagccaggcgguuauuacaaugggacgcgaggagaccguaacaaacugagacaucuaaucagcgugaagcucggcaagauaccgacugucgaaaauuccaucuuccacauggcugccuggucaggcagugcgugccaugaugggaaagaguggaccuauauuggaguggacggucccgauaacaaugcacugcuuaagguuaaauacggcgaggccuacacagacacuuaucacagcuacgcuaacaagauccugaggacccaggagucugccuguaauugcauugggggaaacuguuauuugaugaucacagauggcuccgcaucaggugugagcgaaugccgguuucucaaaauacgcgaggggagaauuaucaaggagauuuucccuaccggaagggucaagcacacggaagaguguacuugcggcuuugcuaguaauaaaacaaucgaaugugccugccgggacaacucuuacaccgcgaagcgcccauucgugaaacugaauguagagacugauacagccgaaauccgauuaaugugcaccgacacguaucuggauacccccagaccuaacgacggcuccauuacagggccaugugagagcaacggagauaaggguucgggcgggauaaaaggaggcuuuguucaucaaaggauggagucuaagaucggucggugguacucccguacuaugucaaaaaccgaacgcauggggaugggccucuaugugaaguacgacggagaccccugggcagauagugacgcucuugccuucagcggcgucaugguguccaugaaggagccggggugguacucuuuuggauucgaaauuaaagauaagaaaugcgacgugccuuguaucgguauagagaugguccacgauggcgggaaggaaacauggcauagcgcugccacugcaauuuauugccugaugggaucaggccaguugcuaugggacaccguuacagguguggauauggcccuguga

SEQ ID NO: 14319 - RNA, 1401 nt, Artificial Sequence
  FLUBV/H0N0/B/Phuket/3073/2013__EPI540672 neuraminidase CDS human (NA)
augcugcccagcaccauccagacacucacucuuuuccugacguccggcgggguguuguuaucucuguacgucucagccagucuaagcuaucuccuguacuccgacauucuucugaaguuuucuagaaccgagguuacagcuccuauaaugccauuggauugcgcaaacgccucgaaugugcaagcgguaaacaggucagcuacuaaaggagugaccccgcuccugcccgaaccugaguggacauauccacggcugagcugucccgguaguaccuuccagaaggcccucuuaaucuccccucaccgcuuuggcgaaacuaaaggaaauucugcaccacugauuauccgagagcccuucauugccugcgggccuaaggaauguaaacauuuugcucuuacacacuacgcagcccagccaggcgguuauuacaacgggacccgugaggacagaaauaaguugaggcaucugaucagcgucaagcuaggaaaaauaccgacgguggagaacuccaucuuccacauggcugccuggucaggcagugcgugccaugauggccgggaauggacuuauauugggguugacggacccgauagcaaugcacuccugaagaucaaauacggugaggccuacaccgacacauaucacucuuacgcuaagaacauucuucgcacucaggaauccgccuguaauugcaucggcggggauuguuaucugaugauaaccgacggaccugcaucaggcauuagcgagugcagauuuuugaaaaucagggagggucggauuaucaaggaaaucuucccaacagggcgcgugaagcacaccgaggaauguacgugcggauuugcuaguaacaaaacuauugagugugccugccgagauaauucuuacacagcgaagagacccuucgucaaacucaacguggaaaccgacacugccgagauaaggcugaugugcacaaagaccuauuuagauacgccucggccaaaugacggcuccaucaccggccccugugagagcgauggggacgaaggaucggguggcauuaaagggggauuuguacaucaacguauggcaucuaagaucggccgcugguacuccagaacaaugucaaaaacuaagaggauggguauggggcuguauguuaaguacgacggcgauccguggaccgacagugaggcucucgcccuuagcggagugauggucuccauggaggaaccuggcugguacucuuucggguuugaaauaaaagauaagaaaugcgacgugcccuguauuggaaucgagauggugcacgaugguggcaagacaacuuggcauagcgcugccaccgcaaucuauugccugauggggucaggacaguugcuaugggacacagucaccggcguuaacaugacucuguga

SEQ ID NO: 14320 - RNA, 1410 nt, Artificial Sequence
  FLUAV/H1N1/A/Brisbane/02/2018__EPI1212833 neuraminidase CDS human (NA)
augaaccccaaucagaagaucauuaccauaggcagcacaugcaugacuaucgggauggccaaccugauucuccaaaucggaaauauuaucuccauaugggugucucacucaauccagauugguaaccagagucagaucgagacguguaaucaaagcgucauuaccuacgaaaacaauacauggguuaaccagacuuaugugaauaucuccaacaccaauuucgcugcaagacagucuguagccucggugaaacuugcgggcaacucaagccugugcccugucagugggugggcuauauacuccaaggacaauucugugaggauuggaagcaaaggcgauguuuuugugauccgggagccauucauuuccuguucaccguuggaaugccgcacauuuuucuuaacccagggugcccugcuaaacgacaagcauaguaaugggacuaucaaagaucgaagccccuaucguacacucaugucuuguccuaucggagaggucccaucccccuacaacucaagauuugaaagcguggcauggagugccucugcuugccacgacggcaccaacuggcugacgauuggcauauccgggccugauagcggagcaguagccguucuuaaguauaaugguaucauuacugacaccaucaagucguggaggaacaauauacugcggacacaagagucugagugugcuugcgugaacggcuccuguuucacuauuaugaccgaugggccaucagacggacaggccaguuacaaaaucuuucgcaucgaaaagggcaaaauuaucaagagcgucgagaugaaagcgcccaauuaucauuacgaagagugcuccuguuacccugauucuagcgagauuacaugcgugugcagagacaacuggcacgguucaaauaggccaugggugaguuucaaccagaauuuggaauaucagaugggguacauauguuccggagucuuuggcgauaacccgcggcccaaugacaagaccggcagcugcgggccuguuucuucaaacggagcaaauggugugaagggcuucaguuuuaaauaugggaacggaguauggaucggccgcacuaagagcauuuccucucgaaaagguuucgagaugaucugggauccaaauggguggacgggcacagacaacaaguuuucgaucaaacaagacauugugggaauaaacgaauggagcggcuacuccgggucauucguccagcaucccgagcucaccggacuggauuguaucagaccuugcuucuggguggaacugauuaggggucggccagaggagaauacuaucuggacaaguggcucuagcauuuccuuuugugggguugacucagauaccgugggauggagcuggcccgacggcgccgaacucccguucacgaucgauaaguga

SEQ ID NO: 14321 - RNA, 1410 nt, Artificial Sequence
  FLUAV/H1N1/A/Guangdong-Maonan/SWL1536/2019__EPI1542569 neuraminidase CDS human (NA)
augaaccccaaucagaagaucauuaccauaggcagcaucugcaugacaauugggauggccaaccugauccuccaaauuggaaauaucauauccaucugggugucucacucaauucagaucgguaaccagagucagauugagacuuguaauaaaaacgucaucacguacgaaaauaacaccuggguuaaucaaacauaugugaacauaagcaauacuaacuccgcugcaagacagucuguagccucggugaaacuugcgggcaauucaagccugugcccugucagugggugggcuauuuacuccaaggacaacucugugaggaucggaagcaagggcgauguuuucgugauucgggagccauuuaucuccuguucaccguuggaaugccgcaccuucuuuuuaacacagggugcccugcuaaaugacaaacauaguaacgggaccaucaaggaucgaagccccuaucguacucucaugucuuguccuauuggagaggucccaucccccuacaacucaagauucgaaagcguggcauggagugccucugcuugccacgacggcacaaauuggcugaccauaggcaucuccgggccugauagcggagcaguagccguucuuaaguauaacgguauuaucacggacacuauaaaaucguggaggaauaacauucugcggacccaggagucugagugugcuugcgugaauggcuccuguuuuacaaucaugacugaugggccaucagacggacaagccaguuacaagaucuuccgcauugaaaaaggcaagaucauuaaaagcgucgagaugaaggcgcccaacuaucauuacgaagagugcuccuguuacccugauucuagcgagauaaccugcgugugcagagacaauuggcacgguucaaacaggccaugggugaguuuuaaucagaacuuggaauaucagaugggguacaucuguuccggagucuucggcgauaauccgcggcccaacgacaagacaggcagcugcgggccuguuucuucaaauggagcaaacggugugaaaggcuuuaguuucaaguaugggaauggaguauggauuggccgcaccaaaagcaucuccucucgaaaggguuuugagaugaucugggauccaaacggguggacgggcacugacaacaaauucucgaagaaacaggacauugugggaauaaaugaauggagcggcuacuccgggucauuuguccaacaucccgagcucacaggacugaacuguaucagaccuugcuucuggguggaacugauuaggggucggccagaggagaauaccaucuggacaaguggcucuagcauuuccuucugugggguugauucagacaucgugggauggagcuggcccgauggcgccgaacucccguuuacuauagacaaguga

SEQ ID NO: 14322 - RNA, 1410 nt, Artificial Sequence
  FLUAV/H3N2/A/Singapore/INFIMH-16-0019/2016__EPI1047603 neuraminidase CDS human (NA)
augaaccccaaucagaagaucauuaccauaggcagcgugucccugacaaucucuacuauuugcuucuuuaugcagaucgccauucucaucacgaccgucacacuucacuucaaacaguacgaguuuaacucaccuccaaauaaccagguuaugcugugugaaccgacuauaaucgagagaaauauuaccgaaaucguguauuugacaaacaccacuauugagaaggaaaucugccccaaaccugcugaguacaggaauuggaguaagccacagugugggauaacaggauucgcacccuuuagcaaagacaacuccauucgguuaucugccgguggcgauaucuggguaacccgcgagccuuaugugucgugcgacccagauaaguguuaccaauucgcgcuggggcagggaacgacucuaaauaacguccauucaaauaacaccgugcgagaccguacacccuauagaacucuccugaugaaugaacuuggcguuccuuuucaccuggguaccaaacaggugugcauugcuuggagcaguuccucuugucaugaugggaaggccugguugcacgucugcaucacaggagacgauaagaacgcaaccgccagcuucaucuacaauggcaggcucauugacuccgugguaucauggaguaaagauauacugcggacgcaggagagcgaauguguuugcaucaacggcacuuguacaguggucaugaccgacgggaacgcuacuggaaaggcagauacaaaaauucuguuuaucgaggaggguaagauagugcauaccucuaagcucuccggcucagcccaacacguggaagagugcagcugcuauccacgcuacccgggggucagauguguuugcagggacaauuggaaaggaaguaaccggcccauuguggauaucaauaucaaggaccacucuauuguauccagcuacguguguucgggcuuagucggugacacgccucgcaaaaacgauucuuccucaaguagccauugccugaauccaaacaaugaagaagggggacacggcgugaagggcugggcuuucgacgaugggaacgacguuuggaugggacgaaccaucaaugagacauccagacuugguuaugagacuuuuaaaguggucgagggcuggucuaaccccaagagcaaauugcagauuaauaggcaagugauaguagaucguggggaccggucaggauacaguggcaucuucuccguugaagguaagagcuguauuaaccgcugcuuuuauguggagcugaucagagggaggaaggaagagaccgaaguccuauggacaucuaauucaaucguggucuucuguggcaccaguggaacuuacggcacagggagcuggccugauggagccgaccucaaccugaugcauauuuga

SEQ ID NO: 14323 - RNA, 1410 nt, Artificial Sequence
  FLUAV/H3N2/A/Kansas/14/2017__EPI1146344 neuraminidase CDS human (NA)
augaaccccaaucagaagaucauuaccauaggcagcgugucccugacaaucucuacuauuugcuucuuuaugcagaucgccauucucaucacgaccgucacacuucacuucaaacaguacgaguuuaacucaccuccaaauaaccagguuaugcugugugaaccgacuauaaucgagagaaauauuaccgaaaucguguauuugacaaacaccacuauugagagggaaaucugccccaagccugcugaguaccggaauuggaguaaaccacagugugggauaacaggauucgcacccuuuagcaaggacaacuccauucgcuuaucugccgguggcgauaucuggguaacccgagagccuuaugugucgugcgacccagauaaauguuaccaauucgcgcuggggcagggaacgacuauuaauaacguccauucaaauaacaccgcucgugacagaacaccccacaggacucuacucaugaaugaacugggcgugccuuuucaucuugguaccaagcagguuugcaucgccuggagcaguuccucuugucacgaugggaaggcauggcugcaugugugcaucacaggagacgauaaaaacgccaccgcuagcuucauuuauaauggccgguuggucgacuccgugguaucauggaguaaggauauacuccgcacgcaggagagcgaauguguuugcaucaacggcacuuguacaguggucaugaccgacgggaacgcaacuggaaaagccgauacaaagauucuguuuaucgaggaggguaaaauagugcacaccucuaagcuguccggcucagcucaacacguggaagagugcagcugcuacccaagauauccgggggucagguguguuugccgggacaauuggaagggaaguaaccgccccauuguggauaucaauaucaaagaccauucuauuguauccagcuacguguguucgggccucgucggugacacgccucgaaagaccgauucuuccucaaguagccacugcuuaaacccaaauaacgaaaaagggggacauggcgugaagggcugggccuucgacgaugggaaugacguuuggaugggaagaacaaucaacgagacuuccaggcuggguuacgaaaccuuuaaaguggucgagggcuggucuaaucccaagagcaaacuucagauuaaccggcaagugauaguagaucguggggaccgcucaggauauaguggcaucuucuccguugaggguaagagcuguauuaauagaugcuuuuacguggaauugaucagggggcggaaggaggaaacagagguccuguggacuucuaacucaaucguggucuucuguggcaccaguggaacauauggcaccgggagcuggccugauggagcggaccuaaaucucaugcacauuuga

SEQ ID NO: 14324 - RNA, 1410 nt, Artificial Sequence
  FLUAV/H3N2/A/Kansas/14/2017-CDC-LV24A__EPI1444881 neuraminidase CDS human (NA)
augaaccccaaucagaagaucauuaccauaggcagcgugucccugacaaucucuacuauuugcuucuuuaugcagaucgccauucucaucacgaccgucacacuucacuucaaacaguacgaguuuaacucaccuccaaauaaccagguuaugcugugugaaccgacuauaaucgagagaaauauuaccgaaaucguguauuugacaaacaccacuauugagagggaaaucugccccaagccugcugaguaccggaauuggaguaaaccacagugugggauaacaggauucgcacccuuuagcaaggacaacuccauucgcuuaucugccgguggcgauaucuggguaacccgagagccuuaugugucgugcgacccagauaaauguuaccaauucgcgcuggggcagggaacgacuauuaauaacguccauucaaauaacaccgcucgugacagaacaccccacaggacucuacucaugaaugaacugggcgugccuuuucaucuugguaccaagcagguuugcaucgccuggagcaguuccucuugucacgaugggaaggcauggcugcaugugugcaucacaggagacgauaaaaacgccaccgcuagcuucauuuauaauggccgguuggucgacuccgugguaucauggaguaaggauauacuccgcacgcaggagagcgaauguguuugcaucaacggcacuuguacaguggucaugaccgacgggaacgcaacuggaaaagccgauacaaagauucuguuuaucgaggaggguaaaauagugcacaccucuaagcuguccggcucagcucaacacguggaagagugcagcugcuacccaagauauccgggggucagguguguuugccgggacaauuggaagggaaguaaccgccccauuguggauaucaauaucaaagaccauucuauuguauccagcuacguguguucgggccucgucggugacacgccucgaaagaccgauaacucuuccucaagucacugcuuaaauccaaacaaugaaaaagggggacauggcgugaagggcugggccuucgacgaugggaacgacguuuggaugggaagaacaaucaaugagacuagcaggcuggguuacgaaaccuuuaaaguggucgagggcugguccaaccccaagucuaaacuucagauuaaucggcaagugauaguagaucguggggaccgcagcggauauucaggcaucuucaguguugaggguaaguccuguauuaacagaugcuuuuacguggaauugaucagggggcggaaggaggaaacagagguccuguggacuagcaauucuaucguggucuucuguggcaccucaggaacauauggcaccgggaguuggccugauggagcggaccuaaaccucaugcacauuuga

SEQ ID NO: 14325 - RNA, 1410 nt, Artificial Sequence
  FLUAV/H3N2/A/Switzerland/8060/2017__EPI1154879 neuraminidase CDS human (NA)
augaaccccaaucagaagaucauuaccauaggcagcgugucccugacaaucucuacuauuugcuucuuuaugcaaaucgccauucucaucacgaccgucacacuucacuucaaacaguacgaguuuaacucaccuccaaauaaccagguuaugcugugugaaccgacuauaaucgagagaaauauuaccgaaaucguguauuugacaaacaccacuauugagaaggaaaucugccccaaaccugcugaguacaggaauuggaguaagccacagugugggauaacaggauucgcacccuuuagcaaagacaacuccauucgguuaucugccgguggcgauaucuggguaacccgcgagccuuaugugucgugcgacccagauaaguguuaccaauucgcgcuggggcagggaacgacucuaaauaacguccauucaaauaacaccgugcgagaccguacacccuauagaacucuccugaugaaugaacuuggcguuccuuuucaccuggguaccaaacaggugugcauggcuuggagcaguuccucuugucaugaugggaaggccugguugcacgucugcgugacaggagacgauaagaacgcaaccgccagcuucauuuacaauggcaggcucguagacuccguugugucauggaguaaagauauccugcggacgcaggagagcgaaugugucugcaucaacggcacuuguacaguggugaugaccgacgggaacgcuacuggaaaggcagauacaaaaauucuguuuauagaggaggguaagaucguccauaccucuaagcucuccggcucagcccaacacguugaagagugcagcugcuauccacgcuacccgggggugagauguguaugcagggacaauuggaaaggaaguaaccggcccauuguggauaucaauauaaaggaccacucuauugucuccagcuacguguguucgggcuuaguuggugacacgccucgcaaaucugauuccucaaguagcucccauugccugaacccaaauaacgaagaagggggacacggcgugaagggcugggcuuucgacgaugggaaugacgucuggaugggacgaaccaucaacgagacaucuagacuugguuaugagacuuuuaaagugguagagggcuggagcaauucaaagaguaaauugcagaucaacaggcagguuauuguggaucguggggaccgguccggauacagcggcaucuucucugucgaagguaagucauguauuaaucgcugcuuuuauguggagcugauaagagggaggaaggaagagaccgaaguccuauggacaaguaacagcaucgugguuuucuguggcacuuccggaaccuacggcacagggucuuggcccgauggagccgaccucaaucugaugcauauuuga

SEQ ID NO: 14326 - RNA, 1410 nt, Artificial Sequence
  FLUAV/H3N2/A/Switzerland/8060/2017(H3N2)-CDC-LV21A__EPI1364258 neuraminidase CDS human (NA)
augaaccccaaucagaagaucauuaccauaggcagcgugucccugacaaucucuacuauuugcuucuuuaugcaaaucgccauucucaucacgaccgucacacuucacuucaaacaguacgaguuuaacucaccuccaaauaaccagguuaugcugugugaaccgacuauaaucgagagaaauauuaccgaaaucguguauuugacaaacaccacuauugagaaggaaaucugccccaaaccugcugaguacaggaauuggaguaagccacagugugggauaacaggauucgcacccuuuagcaaagacaacuccauucgguuaucugccgguggcgauaucuggguaacccgcgagccuuaugugucgugcgacccagauaaguguuaccaauucgcgcuggggcagggaacgacucuaaauaacguccauucaaauaacaccgugcgagaccguacacccuauagaacucuccugaugaaugaacuuggcguuccuuuucaccuggguaccaaacaggugugcauggcuuggagcaguuccucuugucaugaugggaaggccugguugcacgucugcgugacaggagacgauaagaacgcaaccgccagcuucauuuacaauggcaggcucguagacuccguugugucauggaguaaagauauccugcggacgcaggagagcgaaugugucugcaucaacggcacuuguacaguggugaugaccgacgggaacgcuacuggaaaggcagauacaaaaauucuguuuauagaggaggguaagaucguccauaccucuaagcucuccggcucagcccaacacguugaagagugcagcugcuauccacgcuacccgggggugagauguguaugcagggacaauuggaaaggaaguaaccggcccauuguggauaucaauauaaaggaccacucuauugucuccagcuacguguguucgcgcuuaguuggcgacacgccucgaaaaucugauuccucaaguagcucccauugccugaacccaaauaacgaagagggugggcacggagugaagggcugggcuuucgacgauggcaaugacgucuggauggggagaaccaucaacgaaacaucuaggcuuggauaugagacuuuuaaagugguagaggguuggagcaauucaaagaguaaauugcagaucaaccggcagguuauuguggaucguggcgaccgcuccggguacagcggaaucuucucugucgaaggcaagucauguauuaauagaugcuuuuauguggagcugauaaggggucggaaggaagagaccgaaguccuauggacaaguaacagcaucgugguuuucugugggacuuccggcaccuacggaacaggcucuuggcccgauggggccgaccucaaucugaugcauauuuga

SEQ ID NO: 14327 - RNA, 1410 nt, Artificial Sequence
  FLUAV/H3N2/A/Hong Kong/2671/2019__EPI1543099 neuraminidase CDS human (NA)
augaaccccaaucagaagaucauuaccauaggcagcgugucccugacaaucucuacuauuugcuucuuuaugcagaucgccauucucaucacgaccgucacacuucacuucaaacaguacgaguuuaacucaccuccaaauaaccagguuaugcugugugaaccgacuauaaucgagagaaauauuaccgaaaucguguauuugacaaacaccacuauugagaaggaaaucugccccaaaccugcugaguacaggaauuggaguaagccacagugugggauaacaggauucgcacccuuuagcaaagacaacuccauucgguuaucugccgguggcgauaucuggguaacccgcgagccuuaugugucgugcgaccuggauaaguguuaccaauucgcgcuagggcagggaacgacucucaauaacguccauucaaauaacaccgugcgagaccguacaccauauagaacucugcuuaugaaugaacugggcguucccuuucacuuggguaccaaacaggugugcauugcuuggagcaguuccucuugucaugaugggaaggccuggcuccacgucugcaucacaggagacgauaagaacgcaaccgccagcuucaucuacaauggcaggcugguggacuccguaguuucauggaguaacgauauucugcggacgcaggagagcgaaugugugugcauaaacggcacuuguacagucgugaugaccgacgggaaugcuacuggaaaagcagauacaaagauccucuuuauugaggaggguaaaaucgugcauaccucuaaguuauccggcucagcccaacacgucgaagagugcagcugcuauccucgcuacccagggguuagaugugugugcagggacaacuggaagggaaguaaucggccgauaauugauaucaacaucaaagaccacucuauuguauccagcuacguguguucgggccuggucggugacacgccccgcaagucugauuccucaaguagcucccauugccuuaauccuaacaaugaagaagggggacacggcgugaaaggcugggcuuucgacgaugggaacgacguuuggaugggacgaaccaucaaugagacaucuagauuggguuaugagacuuuuaagguggucgagggcuggagcaacccaaaaucaaagcugcagauuaauaggcaagugauaguagaucguggggaccggaguggauacuccggcaucuucagcguugaagguaaaucuuguauuaaccgcugcuuuuauguggagcuaaucagagggaggaaggaagagaccgaaguccucuggacaucaaauaguaucguggucuucuguggcacuagcggaaccuacggcacaggguccuggcccgauggagccgaccugaaccuuaugcauaccuga

SEQ ID NO: 14328 - RNA, 1410 nt, Artificial Sequence
  FLUAV/H3N2/A/Hong Kong/45/2019__EPI1691929 neuraminidase CDS human (NA)
augaaccccaaucagaagaucauuaccauaggcagcgugucccugacaaucucuacuauuugcuucuuuaugcagaucgccauucucaucacgaccgucacacuucacuucaaacaguacgaguuuaacucacugccuaauaaccagguuauguugugugaaccaacuauaaucgagagaaauauuaccgaaaucguguauuuaacaaacaccacuauugagaaggaaaucugcccgaaacccgcugaguacaggaauuggaguaagccucagugugggauaacaggauucgcaccauuuagcaaagacaacuccauucggcugucugccgguggcgauaucuggguaacccgcgagcccuaugugucgugcgaccuagauaaguguuaccaauucgcgcucgggcagggaacgacucugaauaacguccauucaaauaacaccgugcgagaccguacaccuuauagaacucuucugaugaaugaauugggcguuccauuucaccucgguaccaaacaggugugcauugcuuggagcaguuccucuugucaugaugggaaggccuggcugcacgucugcaucacaggagacgauaagaacgcaaccgccagcuucaucuacaauggcaggcugguggacuccguaguuucauggaguaacgauauucuccggacgcaggagagcgaaugugugugcauaaacggcacuuguacagucgugaugaccgacgggaaugcuacuggaaaagcagauacaaagaucuuauuuauugaggaggguaaaaucgugcauaccucuaagcuguccggcucagcccaacacgucgaagagugcagcugcuauccccgcuacccugggguuagaugugugugcagggacaacuggaagggaaguaaucggccaauaauugauaucaacaucaaagaccacucuauuguauccagcuacguguguucgggccuugucggugacacgccgcgcaagucugauuccucaaguagcucccauugcuugaaucccaacaaugaagaagggggacacggcgugaaaggcugggcuuucgacgaugggaacgacguuuggaugggacgaaccaucaaugagacaucuagacuggguuaugagacuuuuaagguggucgagggcuggagcaacccuaaaucaaagcuacagauuaauaggcaagugauaguagaucguggggaccggaguggauacuccggcaucuucagcguugaagguaaaucuuguauuaaccgcugcuuuuauguggagcucaucagagggaggaaggaagagaccgaaguccuguggacaucaaauaguaucguggucuucuguggcacuagcggaaccuacggcacaggguccuggccagauggagccgaccuuaaccugaugcauauuuga

SEQ ID NO: 14329 - RNA, 1410 nt, Artificial Sequence
  FLUAV/H3N2/A/South Australia/34/2019__EPI1387330 neuraminidase CDS human (NA)
augaaccccaaucagaagaucauuaccauaggcagcgugucccugacaaucucuacuauuugcuucuuuaugcagaucgccauucucaucacgaccgucacacuucacuucaaacaguacgaguuuaacucaccuccaaauaaccagguuaugcugugugaaccgacuauaaucgagagaaauauuaccgaaaucguguauuugacaaacaccacuauugagaaggaaaucugccccaaaccugcugaguacaggaauuggaguaagccacagugugggauaacaggauucgcacccuuuagcaaagacaacuccauucgguuaucugccgguggcgauaucuggguaacccgcgagccuuaugugucgugcgaccuggauaaguguuaccaauucgcgcuagggcagggaacgacucucaauaacguccauucaaauaacaccgugcgagaccguacaccauauagaacucugcuuaugaaugaacugggcguucccuuucacuuggguaccaaacaggugugcauugcuuggagcaguuccucuugucaugaugggaaggccuggcuccacgucugcaucacaggagacgauaagaacgcaaccgccagcuucaucuacaauggcaggcugguggacuccguaguuucauggaguaacgauauucugcggacgcaggagagcgaaugugugugcauaaacggcacuuguacagucgugaugaccgacgggaaugcuacuggaaaagcagauacaaagauccucuuuauugaggaggguaaaaucgugcauaccucuaaguuauccggcucagcccaacacgucgaagagugcagcugcuauccucgcuacccagggguuagaugugugugcagggacaacuggaagggaaguaaucggccgauaauugauaucaacaucaaagaccacucuauuguaucccgcuacguguguagcggccuggucggugacacgccccgaaagucggauucuuccucaaguagccauugccuuaauccuaacaaugaaaaagggggacacggcgugaagggcugggcuuucgacgaugggaacgacguuuggaugggaagaaccaucaaugagacauccagguuggguuaugaaacuuuuaaaguggucgagggcuggucuaacccaaagagcaaacugcagauuaaucggcaagugauaguagaucguggggaccgcucaggauacaguggcaucuucuccguugaggguaagagcuguauuaacagaugcuuuuauguggaacuaaucagggggcggaaggaggaaaccgagguccucuggacaucuaauucaaucguggucuucuguggcaccaguggaacuuacggcacagggagcuggcccgauggagccgaccugaaccuuaugcauauuuga

SEQ ID NO: 14330 - RNA, 1398 nt, Artificial Sequence
  FLUAV/H7N9/A/chicken/Zhejiang/C483/2013(H7N9)__AGN69396.1 neuraminidase CDS human (NA)
augaaccccaaucagaagauccugugcaccagcgccacagcuauuauaaucggcgcaauugccgugcucaucgggauugcgaaccuuggacugaauaucgguuugcacuuaaaaccuggcuguaacugcucccauucucaaccagagacuacgaauaccucacagacaauaaucaacaauuacuauaacgaaacuaauauuaccaacauccagauggaggaaagaacaaguaggaauuucaacaaucugaccaaggggcuauguacuauuaacagcuggcacaucuacggaaaagacaaugcuguccggauaggcgaguccucugauguucucgugacacgcgaaccguauguaucgugcgaccccgaugagugucgauuuuacgcccugucacaggguaccacgauucgugggaagcauagcaacggaacuauccacgacagaagucaauauagggcacuuauuuccuggccucugucuagcccacccaccguguacaacucccgggucgagugcaucggcuggucaaguacaagcugucaugauggcaaaucucgcauguccaucugcauuucagggccuaauaacaaugccagcgcugugguuugguauaacagaaggccaguggcagaaauaaauacuugggcccggaacaucuugcgcacccaggagagugaaugugucugccacaauggagugugucccguaguuuucacagacgguucugcuaccggcccugccgauacgcgaauuuacuacuuuaaggaggggaagauccucaaaugggagucccugacuggaacagcgaagcacauagaagagugcagcugcuauggcgaaagaaccgguauuacuuguacaugcagggacaacuggcaggggucgaaucggccagugauccagaucgauccggucgcaaugacccauacgucucaauacauuuguucccccgugcugaccgacaacccucguccaaaugaucccaacaucggaaaaugcaaugacccuuauccaggcaacaauaacaacggcgugaagggguucucauaccucgauggagccaauacaugguuaggucgcacuauuaguaccgcuagcagauccggcuaugagaugcugaaaguccccaacgcccuuacagacgacaggucuaagccgauacaggggcagacuaucguuuugaaugcagauuggagcggauacucaggcaguuuuauggacuauugggcugaaggugauuguuaccgggccugcuucuacguggagcugauucgagggcgcccuaaggaggacaaaguaugguggaccuccaacagcaucgugucuauguguucaaguacagaauuucuaggccaguggaauuggcccgauggagcgaagaucgaguauuuccucuga

SEQ ID NO: 14331 - RNA, 1413 nt, Artificial Sequence
  FLUAV/H10N8/A/Jiangxi/IPB13/2013(H10N8)__AHK10769.1 neuraminidase CDS human (NA)
augaaccccaaucagaagaucauuaccauaggcagcgugucccuggggcucgucauccuuaacauucuguugcacaucguuucuauuacagugacuguauuagugcugccuggaaaugguaacaaugagucaugcaacgaaacggucaucagagaguacaaugaaaccgugaggguugagaaagugacacaauggcauaacacuaaugucauagaauauaucgagcggccagagaacgaccacuucaugaauaacaccgaagcccuaugugaugcuaagggcuuugcaccguucaguaaagacaaugggauucgcaucggaagccgaggccauguguuuguaauucgugagcccuucguuuccugcucuccuacagaauguagaaccuuuuuccucacucaggguucgcugcuuaacgauaagcacucaaaugggacagugaaagacaggagcccauaccggacccugaugagugucgagaucggacagucccccaacguguaucaggcccgcuuugaggcgguggcuuggucugccacggcaugccaugauggcaagaaguggaugacuauaggcgucaccgggccugacgccaaagcuguugcagugguacacuacggagguauuccaacagaugugaucaacagcugggccggcgacauuuugagaacucaagaauccucauguaccugcauccagggggaguguuucugggucaugacagauggacccgcuaauaggcaggcccaguaucgggcguuuaaggcaaaacaaggcaagaucgugggucaggccgaaauuaguuucaacgggggacacauagaggaaugcagcuguuacccuaaugagggcaaaguugagugcgugugucgcgacaacuggaccggcacgaaucgaccaguccucgugaucucuccggaucuguccuauagaguaggguaccugugcgcuggacuccccucagacacuccuaggggugaagauagccaguuuacaggcaguugcaccucuccaauggggaaccagggauacggcguuaaggguuucggguuucggcaaggcaaugacguguggaugggacguacuauuucccgcacaagcagaucgggcuucgagaucuuaaaggucaggaacgggugggugcaaaauucuaaagaacagauaaagcggcaggucgugguugacaaccugaauugguccggauauucagguaguuucacccuucccgccgaguugacgaaacgaaacugucuggugccuugcuuuuggguagaaaugauucgcggcaauccagaggagaagaccaucuggacaagcuccucuagcaucgucaugugugggguggaucaugaaauugcagacuggucauggcacgauggagcuauccuacccuucgacauugauaaaauguga

SEQ ID NO: 14332 - RNA, 1401 nt, Artificial Sequence
  FLUBV/H0N0/B/Colorado/06/2017__EPI1001930 neuraminidase CDS human (NA)
augcugcccagcaccauccagacacucacucuuuuccugacguccggcgggguguuguuaucucuguacgucucagccagucuaagcuaucuccuguacuccgacauucuucugaaguuuucuccuaccgagauaacagcuccaacuaugccguuggauugcgcaaacgccucgaauguucaagcggugaacagaucagcuaccaaaggaguaacacuccugcugcccgaaccugaguggaccuauccaaggcucagcugucccgguaguacuuuccagaaggccuuacugaucuccccucaccgguuuggcgaaacaaaaggaaauucugcaccacuuauuauccgcgagcccuucguggccugcgggccuaacgaauguaagcauuuugcuuugacccacuacgcagcccagccaggcgguuauuacaaugggacgcgaggagaccguaacaaacugagacaucuaauuagcgucaagcucggcaagaucccgacuguggaaaauuccauauuccacauggcugccuggucaggcagugcgugccaugaugggaaagaguggaccuauaucggaguugacggucccgauaacaaugcacugcuuaaggugaaauacggcgaggccuacacagacacuuaucacagcuacgcuaacaauauucugaggacccaggagucugccuguaacugcaucgggggaaauuguuauuugaugauuacagauggcuccgcaucaggugucagcgaaugccgguuucucaagauccgcgaggggagaauaauuaaagagaucuucccuaccggaagggugaagcacacggaagaguguacuugcggcuuugcuaguaacaagacaauugaaugugccugccgggacaaucgcuacaccgcgaaacgaccauucguaaagcugaacguugagacugauacagccgaaaucagauuaaugugcaccgacacguaucuggauacccccaggccuaacgacggcucuaucacagggccaugugaguccgauggagacaaagguagcggcgggauuaagggaggcuuugugcaucaacggaugaaaucgaagauaggucguugguacucucgcacuaugucccagaccgagagaauggggaugggccucuaugucaaauacggaggcgaccccugggcagauucagacgcucuugccuucaguggggugauggugagcaugaaggaaccgggaugguacuccuuugguuucgagaucaaggauaaaaagugcgacgucccuuguauuggcaucgaaaugguucacgaugggggaaaagagacauggcauucugcugccacugcaauauauugccugaugggcagcggucaguugcuaugggacaccgugacagggguagauauggcccuguga

SEQ ID NO: 14333 - RNA, 1401 nt, Artificial Sequence
  FLUBV/H0N0/B/Washington/02/2019__EPI1368872 neuraminidase CDS human (NA)
augcugcccagcaccauccagacacucacucuuuuccugacguccggcgggguguuguuaucucuguacgucucagccagucuaagcuaucuccuguacuccgacauucuucugaaguuuucuccuaccgagauaacagcuccaacuaugccguuggauugcgcaaacgccucgaauguucaagcggugaacagaucagcuaccaaaggaguaacacuccugcugcccgaaccugaguggaccuauccaaggcucagcugucccgguaguacuuuccagaaggccuuacugaucuccccucaccgguuuggcgaaacaaaaggaaauucugcaccacuuauuauccgcgagcccuucguggccugcgggccuaacgaauguaagcauuuugcuuugacccacuacgcagcccagccaggcgguuauuacaaugggacgcgaggagaccguaacaaacugagacaucuaauuagcgucaagcucggcaagaucccgacuguggaaaauuccauauuccacauggcugccuggucaggcagugcgugccaugaugggaaagaguggaccuauaucggaguugacggucccgauaacaaugcacugcuuaaggugaaauacggcgaggccuacacagacacuuaucacagcuacgcuaacaauauucugaggacccaggagucugccuguaacugcaucgggggaaauuguuauuugaugauuacagauggcuccgcaucaggugucagcgaaugccgguuucucaagauccgcgaggggagaauaauuaaagagaucuucccuaccggaagggugaagcacacggaagaguguacuugcggcuuugcuaguaacaagacaauugaaugugccugccgggacaaucgcuacaccgcgaaacgaccauucguaaagcugaacguugagacugauacagccgaaaucagauuaaugugcaccgacacguaucuggauacccccaggccuaacgacggcucuaucacagggccaugugaguccgauggagacaaagguagcggcgggauuaagggaggcuuugugcaucaacggaugaaaucgaagauaggucguugguacucucgcacuauguccaaaaccgagagaauggggaugggccucuaugucaaguacggaggcgaccccugggcagauucagacgcucuuacauucaguggggugauggugagcaugaaggaaccgggaugguacuccuuugguuucgagaucaaagauaagaaaugcgacgucccuuguauuggcaucgaaaugguucacgaugggggaaaggagacuuggcauucugccgcuaccgccauauauugccugaugggcagcggucaguugcuaugggacacagugaccgggguagauauggcacuguga

SEQ ID NO: 14334 - RNA, 1973 nt, Artificial Sequence
  FLUAV/H1N1/A/California/7/2009__ACP41953 hemagglutinin mRNA gc (HA)
aggagagucccgcagucggcguccagcggcucugcuuguucgugugugugucguugcaggccuuauucaagcuuaccaugaaggccauccuggugguccuccuguacaccuucgccaccgcgaacgccgacacgcugugcaucggcuaccacgccaacaacagcaccgacaccguggacaccgugcucgagaagaacgucacggugacccacuccgugaaccugcuggaggacaagcacaacgggaagcucugcaagcugcggggcgucgccccgcugcaccucgggaagugcaacaucgccggcuggauccuggggaacccggagugcgagagccuguccaccgcgagcuccuggagcuacaucguggagacccccuccagcgacaacggcacgugcuaccccggcgacuucaucgacuacgaggagcuccgcgagcagcuguccagcguguccagcuucgagcgguucgagaucuuccccaagaccuccagcuggccgaaccacgacuccaacaagggggucaccgccgccugcccccacgccggcgccaagagcuucuacaagaaccugaucuggcucgugaagaaggggaacuccuaccccaagcugagcaaguccuacaucaacgacaagggcaaggaggugcugguccucugggggauccaccaccccagcaccagcgcggaccagcagucccuguaccagaacgccgacgccuacguguucgugggcagcucccgcuacagcaagaaguucaagccggagaucgccauccggcccaagguccgcgaccaggagggccgcaugaacuacuacuggacccugguggagcccggggacaagaucaccuucgaggcgaccggcaaccucguggucccccgguacgccuucgccauggagcgcaacgccggguccggcaucaucaucagcgacacgccggugcacgacugcaacacgaccugccagacccccaagggcgccaucaacaccucccugcccuuccagaacauccaccccaucaccaucgggaagugcccgaaguacgucaagagcaccaagcugcggcucgcgaccggccugcgcaacauccccuccauccagagccgggggcuguucggcgccaucgccggguucaucgagggcggcuggacggggaugguggacggcugguacggguaccaccaccagaacgagcagggcagcggguacgccgccgaccucaaguccacgcagaacgcgaucgacgagaucaccaacaaggugaacagcgucaucgagaagaugaacacccaguucaccgccgugggcaaggaguucaaccaccuggagaagcggaucgagaaccugaacaagaaggucgacgacggcuuccucgacaucuggacguacaacgccgagcugcuggugcuccuggagaacgagcgcacccuggacuaccacgacuccaacgugaagaaccucuacgagaagguccggagccagcugaagaacaacgccaaggagaucgggaacggcugcuucgaguucuaccacaagugcgacaacacgugcauggaguccgugaagaacgggaccuacgacuaccccaaguacagcgaggaggccaagcugaaccgcgaggagaucgacggcgugaagcucgaguccacccggaucuaccagauccuggcgaucuacagcaccgucgccagcucccuggugcucguggucagccugggggccaucuccuucuggaugugcagcaacggcucccugcagugccgcaucugcaucugaggacuagucccuguucccagagcccacuuuuuuuucuuuuuuugaaauaaaauagccugucuuucagaucucaaaggcucuuuucagagccaccaaaaaaaaaaaaaaaaaaaaaaaaaaaaaaaaaaaaaaaaaaaaaaaaaaaaaaaaaaaaaaaaaaaaaaaaaaaaaaaaaaaaaaaaaaaaaaaaaaaaa

SEQ ID NO: 14335 - RNA, 1973 nt, Artificial Sequence
  FLUAV/H1N1/A/Michigan/45/2015__EPI662594 hemagglutinin mRNA gc (HA)
aggagagucccgcagucggcguccagcggcucugcuuguucgugugugugucguugcaggccuuauucaagcuuaccaugaaggccauccuggugguccuccuguacaccuucaccacggccaacgcggacacccugugcaucggcuaccacgccaacaacagcaccgacaccguggacacggugcucgagaagaacgucaccgugacccacuccgugaaccugcuggaggacaagcacaacgggaagcucugcaagcugcgcggcgucgcgccccugcaccucgggaagugcaacaucgccggcuggauccuggggaacccggagugcgagagccuguccaccgccagcuccuggagcuacaucguggagacguccaacagcgacaacgggaccugcuaccccggcgacuucaucaacuacgaggagcuccgggagcagcuguccagcguguccagcuucgagcgcuucgagaucuuccccaagaccuccagcuggcccaaccacgacuccaacaagggcgucaccgccgccugcccgcacgccggcgccaagagcuucuacaagaaccugaucuggcucgugaagaaggggaacuccuaccccaagcugaaccagagcuacaucaacgacaagggcaaggaggugcugguccucugggggauccaccaccccuccacgaccgcggaccagcagagccuguaccagaacgccgacgccuacguguucgugggcaccagccgguacuccaagaaguucaagcccgagaucgccacccgcccgaagguccgggaccaggagggccgcaugaacuacuacuggacgcugguggagcccggggacaagaucaccuucgaggccaccggcaaccucguggucccccgguacgcguucaccauggagcgcaacgccgggagcggcaucaucaucuccgacacgcccgugcacgacugcaacacgaccugccagaccccggagggcgccaucaacaccagccugcccuuccagaacauccaccccaucaccaucgggaagugccccaaguacgugaaguccaccaagcugcggcucgccaccggccugcgcaacgucccgagcauccagucccgggggcuguucggcgccaucgcgggguucaucgagggcggcuggacggggaugguggacggcugguacggguaccaccaccagaacgagcagggcagcggguacgccgccgaccucaaguccacccagaacgccaucgacaagaucaccaacaaggugaacagcgucaucgagaagaugaacacccaguucacggccgugggcaaggaguucaaccaccuggagaagcgcaucgagaaccugaacaagaaggucgacgacggcuuccucgacaucuggaccuacaacgcggagcugcuggugcuccuggagaacgagcggacccuggacuaccacgacuccaacgugaagaaccucuacgagaagguccgcaaccagcugaagaacaacgccaaggagaucgggaacggcugcuucgaguucuaccacaagugcgacaacacgugcauggagagcgugaagaacgggaccuacgacuaccccaaguacuccgaggaggccaagcugaaccgggagaagaucgacggcgugaagcucgagagcacccgcaucuaccagauccuggccaucuacuccaccgucgccagcucccuggugcucguggucagccugggggcgaucuccuucuggaugugcagcaacggcagccugcagugccggaucugcaucugaggacuagucccuguucccagagcccacuuuuuuuucuuuuuuugaaauaaaauagccugucuuucagaucucaaaggcucuuuucagagccaccaaaaaaaaaaaaaaaaaaaaaaaaaaaaaaaaaaaaaaaaaaaaaaaaaaaaaaaaaaaaaaaaaaaaaaaaaaaaaaaaaaaaaaaaaaaaaaaaaaaaa

SEQ ID NO: 14336 - RNA, 1973 nt, Artificial Sequence
  FLUAV/H1N1/A/Netherlands/602/2009__ACQ45338 hemagglutinin mRNA gc (HA)
aggagagucccgcagucggcguccagcggcucugcuuguucgugugugugucguugcaggccuuauucaagcuuaccaugaaggccauccuggugguccuccuguacaccuucgccaccgcgaacgccgacacgcugugcaucggcuaccacgccaacaacagcaccgacaccguggacaccgugcucgagaagaacgucacggugacccacuccgugaaccugcuggaggacaagcacaacgggaagcucugcaagcugcggggcgucgccccgcugcaccucgggaagugcaacaucgccggcuggauccuggggaacccggagugcgagagccuguccaccgcgagcuccuggagcuacaucguggagaccuccagcuccgacaacggcacgugcuaccccggcgacuucaucgacuacgaggagcuccgcgagcagcugagcuccgugagcuccuucgagcgguucgagaucuuccccaagaccagcuccuggcccaaccacgacagcaacaagggggucaccgccgccugcccgcacgccggcgcgaaguccuucuacaagaaccugaucuggcucgugaagaaggggaacagcuaccccaagcuguccaagagcuacaucaacgacaagggcaaggaggugcugguccucugggggauccaccaccccagcaccuccgccgaccagcagagccuguaccagaacgccgacgccuacguguucgugggcuccagccgcuacuccaagaaguucaagcccgagaucgccauccggccgaagguccgcgaccaggagggccggaugaacuacuacuggacgcugguggagcccggggacaagaucaccuucgaggcgaccggcaaccucguggucccccgcuacgccuucgccauggagcggaacgccgggagcggcaucaucaucuccgacacccccgugcacgacugcaacacgaccugccagaccccgaagggcgccaucaacaccagccugcccuuccagaacauccaccccaucacgaucgggaagugccccaaguacgugaaguccaccaagcugcgccucgcgaccggccugcggaacgucccgagcauccagucccgcgggcuguucggcgccaucgccggguucaucgagggcggcuggaccgggaugguggacggcugguacggguaccaccaccagaacgagcagggcagcggguacgccgccgaccucaaguccacgcagaacgcgaucgacgagaucaccaacaaggugaacagcgucaucgagaagaugaacacccaguucaccgccgugggcaaggaguucaaccaccuggagaagcggaucgagaaccugaacaagaaggucgacgacggcuuccucgacaucuggacguacaacgccgagcugcuggugcuccuggagaacgagcgcacccuggacuaccacgacuccaacgugaagaaccucuacgagaagguccggagccagcugaagaacaacgccaaggagaucgggaacggcugcuucgaguucuaccacaagugcgacaacaccugcauggaguccgugaagaacgggaccuacgacuaccccaaguacagcgaggaggccaagcugaaccgcgaggagaucgacggcgugaagcucgaguccacgcggaucuaccagauccuggcgaucuacagcaccgucgccagcucccuggugcucguggucagccugggggccaucuccuucuggaugugcagcaacggcucccugcagugccgcaucugcaucugaggacuagucccuguucccagagcccacuuuuuuuucuuuuuuugaaauaaaauagccugucuuucagaucucaaaggcucuuuucagagccaccaaaaaaaaaaaaaaaaaaaaaaaaaaaaaaaaaaaaaaaaaaaaaaaaaaaaaaaaaaaaaaaaaaaaaaaaaaaaaaaaaaaaaaaaaaaaaaaaaaaaa

SEQ ID NO: 14337 - RNA, 1973 nt, Artificial Sequence
  FLUAV/H3N2/A/Hong Kong/4801/2014__EPI643118 hemagglutinin mRNA gc (HA)
aggagagucccgcagucggcguccagcggcucugcuuguucgugugugugucguugcaggccuuauucaagcuuaccaugaagaccaucaucgcccugagcuacauccucugccugguguucgcccagaagauccccggcaacgacaacuccaccgcgacgcugugccucgggcaccacgccgucccgaacggcaccaucgugaagaccaucaccaacgaccgcaucgaggugacgaacgccaccgagcugguccagaacagcuccaucggggagaucugcgacagcccccaccagauccuggacggcgagaacugcacccucaucgacgcccugcugggggacccccagugcgacggcuuccagaacaagaagugggaccucuucguggagcgguccaaggccuacagcaacugcuaccccuacgacgugccggacuacgcgucccugcgcagccuggucgccuccagcggcacccucgaguucaacaacgaguccuucaacuggacgggggugacccagaacggcaccagcuccgccugcauccggcgcagcuccagcuccuucuucagccggcugaacuggcugacccaccucaacuacaaguaccccgcccugaacgugacgaugcccaacaacgagcaguucgacaagcuguacaucuggggcguccaccaccccgggaccgacaaggaccagaucuucccguacgcgcaguccagcgggcgcaucaucgugagcaccaagcggucccagcaggccgugauccccaacaucggcagccgcccccggauccgcgacaucccgucccggaucagcaucuacuggaccaucgucaagccgggcgacauccuccugaucaacuccacggggaaccugaucgccccgcgcggcuacuucaagcuccggagcgggaaguccagcaucaugcgcuccgacgcccccaucggcaagugcaagagcgagugcaucacccccaacggcuccaucccgaacgacaagcccuuccagaacgugaaccggaucaccuacggggccugcccccgcuacgugaagcacagcacccugaagcuggcgacgggcaugcggaacguccccgagaagcagacccgcgggaucuucggcgccaucgccggguucaucgagaacggcugggagggcaugguggacgggugguacggcuuccggcaccagaacuccgaggggcgcggccaggccgccgaccucaagagcacccaggcggccaucgaccagaucaacgggaagcugaaccggcugaucggcaagaccaacgagaaguuccaccagaucgagaaggaguucuccgagguggagggccgcauccaggaccucgagaaguacgucgaggacacgaagaucgaccuguggagcuacaacgccgagcugcucguggcccuggagaaccagcacaccaucgaccugaccgacuccgagaugaacaagcucuucgagaagaccaagaagcagcugcgcgagaacgccgaggacauggggaacggcugcuucaagaucuaccacaagugcgacaacgcgugcaucgggagcauccggaacggcacguacgaccacaacguguaccgcgacgaggcccugaacaaccgguuccagaucaagggggucgagcucaaguccggcuacaaggacuggauccuguggaucagcuucgccaucagcugcuuccugcucugcguggcccugcugggcuucaucaugugggccugccagaaggggaacauccgcugcaacaucugcaucugaggacuagucccuguucccagagcccacuuuuuuuucuuuuuuugaaauaaaauagccugucuuucagaucucaaaggcucuuuucagagccaccaaaaaaaaaaaaaaaaaaaaaaaaaaaaaaaaaaaaaaaaaaaaaaaaaaaaaaaaaaaaaaaaaaaaaaaaaaaaaaaaaaaaaaaaaaaaaaaaaaaaa

SEQ ID NO: 14338 - RNA, 2030 nt, Artificial Sequence
  FLUBV/H0N0/B/Brisbane/60/2008__FJ766840 hemagglutinin mRNA gc (HA)
aggagagucccgcagucggcguccagcggcucugcuuguucgugugugugucguugcaggccuuauucaagcuuaccaugaaggccaucaucgugcugcucauggucgugaccagcaacgccgaccggaucugcaccggcaucacguccagcaacuccccgcacguggucaagaccgcgacccagggggaggugaacgugaccggcgucaucccgcugacgaccacccccaccaagagccacuucgccaaccugaaagggacggagacccgcggcaagcucugccccaagugccugaacugcaccgaccuggacguggcccucgggcggcccaagugcaccggcaaaaucccguccgcccgcgugagcauccugcacgagguccggcccgugacguccggcugcuuccccaucaugcacgaccgcaccaagauccggcagcugcccaaccuccugcgcggguacgagcacauccggcugagcacccacaacgugaucaacgccgagaacgcgccgggcgggcccuacaagaucggcaccuccgggagcugccccaacaucacgaacggcaacggcuucuucgccaccauggccugggccguccccaagaacgacaagaacaaaaccgcgaccaacccgcucacgaucgaggugcccuacaucugcaccgagggggaggaccagaucaccguguggggcuuccacuccgacaacgagacccagauggccaagcuguacggggacagcaagccccagaaguucacguccagcgccaacggcgucaccacccacuacgugucccagaucggcggguuccccaaccagaccgaggacggcgggcugccgcagagcggccgcaucguggucgacuacauggugcagaaauccgggaagacgggcaccaucaccuaccagcggggcauccuccugccccagaagguguggugcgccagcgggcgcuccaaggucaucaaaggcagccugccccucaucggggaggccgacugccugcacgagaaguacggcgggcugaacaagagcaagcccuacuacaccggcgagcacgcgaaagccaucggcaacugcccgaucugggugaagacgccccucaagcuggccaacgggaccaaguaccggccgcccgccaaacugcucaaggagcgcggcuucuucggggccaucgcgggcuuccuggagggcgggugggagggcaugaucgccggguggcacggcuacaccucccacggggcccacggcguggccgucgccgcggaccucaagagcacccaggaggccaucaacaaaaucacgaagaaccugaacucccugagcgagcuggaggugaagaaccuccagcggcuguccggcgccauggacgagcugcacaacgagauccucgagcuggacgagaaggucgacgaccugcgcgccgacaccaucagcucccagaucgagcucgccgugcugcugagcaacgaggggaucaucaacuccgaggacgagcaccuccuggcgcuggagcggaaacucaagaagaugcugggccccagcgccguggagaucgggaacggcugcuucgagaccaagcacaagugcaaccagaccugccuggaccgcaucgccgccgggaccuucgacgcgggcgaguucucccuccccacguucgacagccugaacaucaccgccgccucccugaacgacgacggccuggacaaccacaccauccuccuguacuacagcaccgccgccuccagccuggcggucacgcucaugaucgccaucuucgugguguacauggucucccgggacaacgugagcugcuccaucugccugugaggacuagucccuguucccagagcccacuuuuuuuucuuuuuuugaaauaaaauagccugucuuucagaucucaaaggcucuuuucagagccaccaaaaaaaaaaaaaaaaaaaaaaaaaaaaaaaaaaaaaaaaaaaaaaaaaaaaaaaaaaaaaaaaaaaaaaaaaaaaaaaaaaaaaaaaaaaaaaaaaaaaa

SEQ ID NO: 14339 - RNA, 2027 nt, Artificial Sequence
  FLUBV/H0N0/B/Phuket/3073/2013__EPI540671 hemagglutinin mRNA gc (HA)
aggagagucccgcagucggcguccagcggcucugcuuguucgugugugugucguugcaggccuuauucaagcuuaccaugaaggccaucaucgugcugcucauggucgugaccagcaacgccgaccgcaucugcaccggcaucacguccagcaacuccccgcacguggucaagaccgcgacccagggggaggugaacgugaccggcgucaucccccugacgaccacccccaccaagagcuacuucgccaaccugaaggggacgcggacccgcggcaaacucugccccgacugccugaacugcaccgaccuggacguggcccucgggcggcccaugugcgugggcaccacgccguccgccaaggccagcauccugcacgagguccgccccgugaccuccggcugcuuccccaucaugcacgaccggaccaagauccgccagcugcccaaccuccugcggggguacgagaagauccgccugagcacccagaacgugaucgacgcggagaaagccccgggcgggcccuaccggcucggcacguccgggagcugccccaacgccaccuccaagaucggcuucuucgccaccauggcgugggccguccccaaggacaacuacaagaacgccaccaacccgcugacgguggaggugcccuacaucugcaccgagggcgaggaccagaucaccgucuggggguuccacagcgacaacaagacccagaugaaaucccuguacggcgacagcaacccccagaaguucacguccagcgccaacggggugaccacccacuacgugucccagaucggcgacuuccccgaccagaccgaggacggcgggcucccgcagagcggccgcaucgucguggacuacaugaugcagaagcccgggaagacgggcaccaucguguaccagcggggcguccugcugccccagaaaguguggugcgccuccgggcgcagcaaggugaucaagggcagccucccccugaucggggaggcggacugccugcacgaggaguacggcgggcucaacaaguccaaaccguacuacaccggcaagcacgccaaggccaucgggaacugccccaucugggucaagaccccgcugaaacuggccaacggcacgaaauaccggcccccggccaagcuccugaaggagcgcggcuucuucggggcgaucgccggcuuccuggagggcgggugggaggggaugaucgccggcuggcacggcuacaccagccacggggcccacggcguggccgucgcggccgaccucaaguccacccaggaggccaucaacaaaaucaccaagaaccugaacagccuguccgagcucgaggugaagaaccugcagcggcugagcggggccauggacgagcuccacaacgagauccuggagcuggacgagaagguggacgaccuccgcgccgacacgaucuccagccagaucgagcuggcgguccugcucuccaacgagggcaucaucaacagcgaggacgagcaccuccuggcccucgagcggaaacugaagaagaugcugggccccuccgccguggacaucgggaacggcugcuucgagaccaagcacaagugcaaccagaccugccucgaccgcaucgccgcggggaccuucaacgccggcgaguucagccugcccaccuucgacucccugaacaucacggccgccagccugaacgacgacgggcucgacaaccacaccauccugcuguacuacuccaccgccgcgagcucccucgccgugacccugaugcuggccaucuucaucgucuacauggugagccgggacaacguguccugcagcaucugccucugaggacuagucccuguucccagagcccacuuuuuuuucuuuuuuugaaauaaaauagccugucuuucagaucucaaaggcucuuuucagagccaccaaaaaaaaaaaaaaaaaaaaaaaaaaaaaaaaaaaaaaaaaaaaaaaaaaaaaaaaaaaaaaaaaaaaaaaaaaaaaaaaaaaaaaaaaaaaaaaaaaaaa

SEQ ID NO: 14340 - RNA, 1967 nt, Artificial Sequence
  FLUAV/H1N1/A/Brisbane/02/2018__EPI1212834 hemagglutinin mRNA gc (HA)
aggagagucccgcagucggcguccagcggcucugcuuguucgugugugugucguugcaggccuuauucaagcuuaccaugaaggccauccuggugguccuccuguacaccuucaccacggccaacgcggacacccugugcaucggcuaccacgccaacaacagcaccgacaccguggacacggugcucgagaagaacgucaccgugacccacuccgugaaccugcuggaggacaagcacaacgggaagcucugcaagcugggcggggucgcgccccugcaccucggcaagugcaacaucgccggguggauccugggcaacccggagugcgagagccuguccaccgcccgcagcugguccuacaucguggagacgagcaacuccgacaacgggaccugcuaccccggcgacuucaucaacuacgaggagcuccgggagcagcugagcuccgugagcuccuucgagcgcuucgagaucuuccccaagaccagcuccuggcccaaccacgacagcaacaagggcgucaccgccgccugcccgcacgccggggccaaguccuucuacaagaaccugaucuggcucgugaagaagggcaacagcuaccccaagcugaaccagacguacaucaacgacaaggggaaggaggugcugguccucuggggcauccaccacccgcccaccaccgcggaccagcagucccuguaccagaacgccgacgccuacguguucgugggcaccagccgguacuccaagaaguucaagcccgagaucgccacgcgccccaagguccgggaccgcgaggggcggaugaacuacuacuggacccugguggagcccggcgacaagaucaccuucgaggccaccgggaaccucguggucccccgcuacgcguucacgauggagcggaacgccggcagcggcaucaucaucagcgacaccccggugcacgacugcaacacgaccugccagaccgccgagggggccaucaacaccucccugcccuuccagaacgugcaccccgucaccaucggcaagugccccaaguacgucaagagcaccaagcugcgccucgccacggggcugcggaacgugccguccauccagagccgcggccuguucggggcgaucgccggcuucaucgagggcggguggaccggcaugguggacgggugguacggcuaccaccaccagaacgagcagggguccggcuacgccgccgaccucaagagcaacgccaucgacaagaucaccaacaaggugaacuccgucaucgagaagaugaacacccaguucacggcggugggcaaggaguucaaccaccuggagaagcggaucgagaaccugaacaagaagguggacgacggguuccucgacaucuggaccuacaacgccgagcugcugguccuccuggagaacgagcgcacccuggacuaccacgacagcaacgugaagaaccucuacgagaaggugcggaaccagcugaagaacaacgccaaggagaucggcaacgggugcuucgaguucuaccacaagugcgacaacacgugcauggaguccgucaagaacggcaccuacgacuaccccaaguacagcgaggaggccaagcugaaccgcgagaagaucgacggggugaagcucgaguccacccggaucuaccagauccuggccaucuacagcaccguggcguccagccugguccucguggugucccugggcgccaucagcuucuggaugugcuccaacggcagccugcagugccgcaucugcaucugaggacuagucccuguucccagagcccacuuuuuuuucuuuuuuugaaauaaaauagccugucuuucagaucucaaaggcucuuuucagagccaccaaaaaaaaaaaaaaaaaaaaaaaaaaaaaaaaaaaaaaaaaaaaaaaaaaaaaaaaaaaaaaaaaaaaaaaaaaaaaaaaaaaaaaaaaaaaaaaaaaaaa

SEQ ID NO: 14341 - RNA, 1967 nt, Artificial Sequence
  FLUAV/H1N1/A/Brisbane/02/2018__EPI1671767 hemagglutinin mRNA gc (HA)
aggagagucccgcagucggcguccagcggcucugcuuguucgugugugugucguugcaggccuuauucaagcuuaccaugaaggccauccuggugguccuccuguacaccuucaccacggccaacgcggacacccugugcaucggcuaccacgccaacaacagcaccgacaccguggacacggugcucgagaagaacgucaccgugacccacuccgugaaccugcuggaggacaagcacaacgggaagcucugcaagcugggcggggucgcgccccugcaccucggcaagugcaacaucgccggguggauccugggcaacccggagugcgagagccuguccaccgcccgcagcugguccuacaucguggagacgagcaacuccgacaacgggaccugcuaccccggcgacuucaucaacuacgaggagcuccgggagcagcugagcuccgugagcuccuucgagcgcuucgagaucuuccccaagaccagcuccuggcccaaccacgacagcaacaagggcgucaccgccgccugcccgcacgccggggccaaguccuucuacaagaaccugaucuggcucgugaagaagggcaacagcuaccccaagcugaaccagacguacaucaacgacaaggggaaggaggugcugguccucuggggcauccaccacccgcccaccaccgcggaccagcagucccuguaccagaacgccgacgccuacguguucgugggcaccagccgguacuccaagaaguucaagcccgagaucgccacgcgccccaagguccgggaccaggaggggcgcaugaacuacuacuggacccugguggagcccggcgacaagaucaccuucgaggccaccgggaaccucguggucccccgguacgcguucacgauggagcgcaacgccggcagcggcaucaucaucagcgacaccccggugcacgacugcaacacgaccugccagaccgccgagggggccaucaacaccucccugcccuuccagaacgugcaccccgucaccaucggcaagugccccaaguacgucaagagcaccaagcugcggcucgccacggggcugcgcaacgugccguccauccagagccggggccuguucggggcgaucgccggcuucaucgagggcggguggaccggcaugguggacgggugguacggcuaccaccaccagaacgagcagggguccggcuacgccgccgaccucaagagcaacgccaucgacaagaucaccaacaaggugaacuccgucaucgagaagaugaacacccaguucacggcggugggcaaggaguucaaccaccuggagaagcgcaucgagaaccugaacaagaagguggacgacggguuccucgacaucuggaccuacaacgccgagcugcugguccuccuggagaacgagcggacccuggacuaccacgacagcaacgugaagaaccucuacgagaaggugcgcaaccagcugaagaacaacgccaaggagaucggcaacgggugcuucgaguucuaccacaagugcgacaacacgugcauggaguccgucaagaacggcaccuacgacuaccccaaguacagcgaggaggccaagcugaaccgggagaagaucgacggggugaagcucgaguccacccgcaucuaccagauccuggccaucuacagcaccguggcguccagccugguccucguggugucccugggcgccaucagcuucuggaugugcuccaacggcagccugcagugccggaucugcaucugaggacuagucccuguucccagagcccacuuuuuuuucuuuuuuugaaauaaaauagccugucuuucagaucucaaaggcucuuuucagagccaccaaaaaaaaaaaaaaaaaaaaaaaaaaaaaaaaaaaaaaaaaaaaaaaaaaaaaaaaaaaaaaaaaaaaaaaaaaaaaaaaaaaaaaaaaaaaaaaaaaaaa

SEQ ID NO: 14342 - RNA, 1967 nt, Artificial Sequence
  FLUAV/H1N1/A/Guangdong-Maonan/SWL1536/2019__EPI1542570 hemagglutinin mRNA gc (HA)
aggagagucccgcagucggcguccagcggcucugcuuguucgugugugugucguugcaggccuuauucaagcuuaccaugaaggccauccuggugguccuccuguacaccuucaccacggccaacgcggacacccugugcaucggcuaccacgccaacaacagcaccgacaccguggacacggugcucgagaagaacgucaccgugacccacuccgugaaccugcuggaggacaagcacaacgggaagcucugcaagcugcgcggcgucgcgccccugcaccucgggaagugcaacaucgccggcuggauccuggggaacccggagugcgagagccuguccaccgcccggagcugguccuacaucguggagacgagcaacuccgacaacgggaccugcuaccccggcgacuucaucaacuacgaggagcuccgcgagcagcugagcuccgugagcuccuucgagcgguucgagaucuuccccaagaccagcuccuggcccaaccacgacagcgacaagggcgucaccgccgccugcccgcacgccggcgccaaguccuucuacaagaaccugaucuggcucgugaagaaggggaacagcuaccccaagcugaaccagacguacaucaacgacaagggcaaggaggugcugguccucugggggauccaccacccgcccaccaucgcggcccaggagucccuguaccagaacgccgacgccuacguguucgugggcaccagccgcuacuccaagaaguucaagcccgagaucgccacccggcccaagguccgcgaccaggagggccggaugaacuacuacuggacgcugguggagcccggggacaagaucaccuucgaggcgaccggcaaccucguggucccccgcuacgccuucaccauggagcgggacgccgggagcggcaucaucaucagcgacacgccggugcacgacugcaacacgaccugccagacccccgagggcgccaucaacaccucccugcccuuccagaacgugcaccccaucaccaucgggaagugcccgaaguacgucaagagcaccaagcugcgccucgccaccggccugcggaacgugcccuccauccagagccgcgggcuguucggcgcgaucgccggguucaucgagggcggcuggacggggaugguggacggcugguacggguaccaccaccagaacgagcagggcuccggguacgccgccgaccucaagagcaacgccaucgacaagaucaccaacaaggucaacuccgugaucgagaagaugaacacccaguucaccgcggucggcaaggaguucaaccaccuggagaagcggaucgagaaccugaacaagaagguggacgacggcuuccucgacaucuggacguacaacgccgagcugcuggugcuccuggagaacgagcgcacccuggacuaccacgacagcaacgucaagaaccucuacgagaaggugcggaaccagcugaagaacaacgccaaggagaucgggaacggcugcuucgaguucuaccacaagugcgacaacacgugcauggaguccgugaagaacgggaccuacgacuaccccaaguacagcgaggaggccaagcugaaccgcgagaagaucgacggcgucaagcucgaguccacccggaucuaccagauccuggccaucuacagcaccguggcguccagccuggugcucgucgugucccugggggccaucagcuucuggaugugcuccaacggcagccugcagugccgcaucugcaucugaggacuagucccuguucccagagcccacuuuuuuuucuuuuuuugaaauaaaauagccugucuuucagaucucaaaggcucuuuucagagccaccaaaaaaaaaaaaaaaaaaaaaaaaaaaaaaaaaaaaaaaaaaaaaaaaaaaaaaaaaaaaaaaaaaaaaaaaaaaaaaaaaaaaaaaaaaaaaaaaaaaaa

SEQ ID NO: 14343 - RNA, 1967 nt, Artificial Sequence
  FLUAV/H1N1/A/Guangdong-Maonan/SWL1536/2019__EPI1590725 hemagglutinin mRNA gc (HA)
aggagagucccgcagucggcguccagcggcucugcuuguucgugugugugucguugcaggccuuauucaagcuuaccaugaaggccauccuggugguccuccuguacaccuucaccacggccaacgcggacacccugugcaucggcuaccacgccaacaacagcaccgacaccguggacacggugcucgagaagaacgucaccgugacccacuccgugaaccugcuggaggacaagcacaacgggaagcucugcaagcugcgcggcgucgcgccccugcaccucgggaagugcaacaucgccggcuggauccuggggaacccggagugcgagagccuguccaccgcccggagcugguccuacaucguggagacgagcaacuccgacaacgggaccugcuaccccggcgacuucaucaacuacgaggagcuccgcgagcagcugagcuccgugagcuccuucgagcgguucgagaucuuccccaagaccagcuccuggcccaaccacgacagcgacaagggcgucaccgccgccugcccgcacgccggcgccaaguccuucuacaagaaccugaucuggcucgugaagaaggggaacagcuaccccaagcugaaccagacguacaucaacgacaagggcaaggaggugcugguccucugggggauccaccacccgcccaccaucgcggugcaggagucccuguaccagaacgccgacgccuacguguucgucggcaccagccgcuacuccaagaaguucaagcccgagaucgccacccggcccaaggugcgcgaccaggagggccggaugaacuacuacuggacgcugguggagcccggggacaagaucaccuucgaggccaccggcaaccucgucgugccccgcuacgcguucaccauggagcgggacgccgggagcggcaucaucaucagcgacacgccggugcacgacugcaacacgaccugccagacccccgagggcgccaucaacaccucccugcccuuccagaacguccaccccaucaccaucgggaagugcccgaaguacgucaagagcaccaagcugcgccucgccaccggccugcggaacgugcccuccauccagagccgcgggcuguucggcgccaucgcgggguucaucgagggcggcuggacggggaugguggacggcugguacggguaccaccaccagaacgagcagggcuccggguacgccgccgaccucaagagcaacgccaucgacaagaucaccaacaaggugaacuccgucaucgagaagaugaacacccaguucaccgccgugggcaaggaguucaaccaccuggagaagcggaucgagaaccugaacaagaagguggacgacggcuuccucgacaucuggacguacaacgcggagcugcugguccuccuggagaacgagcgcacccuggacuaccacgacagcaacgugaagaaccucuacgagaaggugcggaaccagcugaagaacaacgccaaggagaucgggaacggcugcuucgaguucuaccacaagugcgacaacacgugcauggaguccgucaagaacgggaccuacgacuaccccaaguacagcgaggaggccaagcugaaccgcgagaagaucgacggcgugaagcucgaguccacccggaucuaccagauccuggccaucuacagcaccguggccuccagccugguccucguggugucccugggggcgaucagcuucuggaugugcuccaacggcagccugcagugccgcaucugcaucugaggacuagucccuguucccagagcccacuuuuuuuucuuuuuuugaaauaaaauagccugucuuucagaucucaaaggcucuuuucagagccaccaaaaaaaaaaaaaaaaaaaaaaaaaaaaaaaaaaaaaaaaaaaaaaaaaaaaaaaaaaaaaaaaaaaaaaaaaaaaaaaaaaaaaaaaaaaaaaaaaaaaa

SEQ ID NO: 14344 - RNA, 1973 nt, Artificial Sequence
  FLUAV/H3N2/A/Singapore/INFIMH-16-0019/2016__EPI1106227 hemagglutinin mRNA gc (HA)
aggagagucccgcagucggcguccagcggcucugcuuguucgugugugugucguugcaggccuuauucaagcuuaccaugaagaccaucaucgcccugagcuacauccucugccugguguucgcccagaagauccccggcaacgacaacuccaccgcgacgcugugccucgggcaccacgccgucccgaacggcaccaucgugaagaccaucaccaacgaccgcaucgaggugacgaacgccaccgagcugguccagaacagcuccaucggggagaucugcgacagcccccaccagauccuggacggcgagaacugcacccucaucgacgcccugcugggggacccccagugcgacggcuuccagaacaagaagugggaccucuucguggagcgguccaaggccuacagcaacugcuaccccuacgacgugccggacuacgcgucccugcgcagccuggucgccuccagcggcacccucgaguucaagaacgaguccuucaacuggacgggggugacccagaacggcaccagcuccgccugcauccgggggagcuccagcuccuucuucagccgccugaacuggcugacccaccucaacuacacguaccccgcccugaacgugaccaugcccaacaaggagcaguucgacaagcuguacaucuggggcguccaccaccccgggaccgacaaggaccagaucuuccucuacgcgcaguccagcggccggaucaccgugagcacgaagcgcucccagcaggccgugaucccgaacaucggcagccggccccgcauccgggacauccccucccgcaucagcaucuacuggaccaucgucaagcccggggacauccugcugaucaacuccaccggcaaccucaucgccccgcggggguacuucaagauccgcagcggcaaguccagcaucaugcgguccgacgcccccaucggcaagugcaagagcgagugcaucacccccaacggguccauccccaacgacaagccguuccagaacgugaaccgcaucacguacggcgccugcccccgguacgugaagcacagcacccugaagcuggcgaccgggaugcgcaacguccccgagaagcagacccggggcaucuucggggccaucgccggcuucaucgagaacggcugggaggggaugguggacggcugguacggguuccgccaccagaacuccgagggccgggggcaggccgccgaccucaagagcacgcaggcggccaucgaccagaucaacggcaagcugaaccgccugaucggcaagaccaacgagaaguuccaccagaucgagaaggaguucuccgagguggaggggcggguccaggaccucgagaaguacguggaggacaccaagaucgaccuguggagcuacaacgccgagcugcucguggcccuggagaaccagcacaccaucgaccugacggacuccgagaugaacaagcuguucgagaagaccaagaagcagcuccgcgagaacgccgaggacaugggcaacgggugcuucaagaucuaccacaagugcgacaacgcgugcaucgagagcauccgcaacgagaccuacgaccacaacgucuaccgggacgaggcccugaacaaccgcuuccagaucaagggcguggagcucaaguccggguacaaggacuggauccuguggaucagcuucgccaucagcugcuuccugcucugcguggcccugcugggcuucaucaugugggccugccagaagggcaacauccggugcaacaucugcaucugaggacuagucccuguucccagagcccacuuuuuuuucuuuuuuugaaauaaaauagccugucuuucagaucucaaaggcucuuuucagagccaccaaaaaaaaaaaaaaaaaaaaaaaaaaaaaaaaaaaaaaaaaaaaaaaaaaaaaaaaaaaaaaaaaaaaaaaaaaaaaaaaaaaaaaaaaaaaaaaaaaaaa

SEQ ID NO: 14345 - RNA, 1973 nt, Artificial Sequence
  FLUAV/H3N2/A/Singapore/INFIMH-16-0019/2016__EPI1341068 hemagglutinin mRNA gc (HA)
aggagagucccgcagucggcguccagcggcucugcuuguucgugugugugucguugcaggccuuauucaagcuuaccaugaagaccaucaucgcccugagcuacauccucugccugguguucgcccagaagauccccggcaacgacaacuccaccgcgacgcugugccucgggcaccacgccgucccgaacggcaccaucgugaagaccaucaccaacgaccgcaucgaggugacgaacgccaccgagcugguccagaacagcuccaucggggagaucugcgacagcccccaccagauccuggacggcgagaacugcacccucaucgacgcccugcugggggacccccagugcgacggcuuccagaacaagaagugggaccucuucguggagcgguccaaggccuacagcaacugcuaccccuacgacgugccggacuacgcgucccugcgcagccuggucgccuccagcggcacccucgaguucaagaacgaguccuucaacuggacgggggugacccagaacggcaccagcuccgccugcauccgggggagcuccagcuccuucuucagccgccugaacuggcugacccaccucaacuacaaguaccccgcccugaacgugacgaugcccaacaaggagcaguucgacaagcuguacaucuggggcguccaccaccccgggaccgacaaggaccagaucuucccguacgcgcaguccagcggccggaucaccgugagcaccaagcgcucccagcaggccgugauccccaacaucggcagccggccccgcauccgggggauccccucccgcaucagcaucuacuggacgaucgucaagccgggcgacauccuccugaucaacuccaccgggaaccugaucgcgccccggggcuacuucaagauccgcagcggcaaguccagcaucaugcgguccgacgcccccaucgggaagugcaagagcgagugcaucacccccaacggcuccaucccgaacgacaagcccuuccagaacgugaaccgcaucaccuacggggccugcccccgguacgugaagcacagcacgcucaagcuggccaccggcaugcgcaacguccccgagaagcagacccgggggaucuucggcgccaucgccggcuucaucgagaacgggugggagggcaugguggacgggugguacggcuuccgccaccagaacuccgaggggcggggccaggccgccgaccucaagagcacccaggcggccaucgaccagaucaacggcaagcugaaccgccugaucgggaagacgaacgagaaguuccaccagaucgagaaggaguucuccgagguggagggccggguccaggaccuggagaaguacguggaggacaccaagaucgaccucuggagcuacaacgccgagcugcugguggcccucgagaaccagcacaccaucgaccugaccgacuccgagaugaacaagcuguucgagaagacgaagaagcagcuccgcgagaacgccgaggacauggggaacggcugcuucaagaucuaccacaagugcgacaacgcgugcaucgagagcauccgcaacgagaccuacgaccacaacgucuaccgggacgaggcccugaacaaccgcuuccagaucaaggggguggagcugaaguccggcuacaaggacuggauccucuggaucagcuucgccaucagcugcuuccugcugugcguggcccuccugggcuucaucaugugggccugccagaaggggaacauccggugcaacaucugcaucugaggacuagucccuguucccagagcccacuuuuuuuucuuuuuuugaaauaaaauagccugucuuucagaucucaaaggcucuuuucagagccaccaaaaaaaaaaaaaaaaaaaaaaaaaaaaaaaaaaaaaaaaaaaaaaaaaaaaaaaaaaaaaaaaaaaaaaaaaaaaaaaaaaaaaaaaaaaaaaaaaaaaa

SEQ ID NO: 14346 - RNA, 1973 nt, Artificial Sequence
  FLUAV/H3N2/A/Singapore/INFIMH-16-0019/2016 NYMC-X-307__EPI1259099 hemagglutinin mRNA gc (HA)
aggagagucccgcagucggcguccagcggcucugcuuguucgugugugugucguugcaggccuuauucaagcuuaccaugaagaccaucaucgcccugagcuacauccucugccugguguucgcccagaagauccccggcaacgacaacuccaccgcgacgcugugccucgggcaccacgccgucccgaacggcaccaucgugaagaccaucaccaacgaccgcaucgaggugacgaacgccaccgagcugguccagaacagcuccaucggggagaucugcgacagcccccaccagauccuggacggcgagaacugcacccucaucgacgcccugcugggggacccccagugcgacggcuuccagaacaagaagugggaccucuucguggagcgguccaaggccuacagcaacugcuaccccuacgacgugccggacuacgcgucccugcgcagccuggucgccuccagcggcacccucgaguucaagaacgaguccuucaacuggacgggggugacccagaacggcaccagcuccgccugcauccgggggagcuccagcuccuucuucagccgccugaacuggcugacccaccucaacuacaaguaccccgcccugaacgugacgaugcccaacaaggagcaguucgacaagcuguacaucuggggcguccaccaccccgggaccgacaaggaccagaucuucccguacgcgcaguccagcggccggaucaccgugagcaccaagcgcucccagcaggccgugauccccaacaucggcagccggccccgcauccgggggauccccucccgcaucagcaucuacuggacgaucgucaagccgggcgacauccuccugaucaacuccaccgggaaccugaucgcgccccggggcuacuucaagauccgcagcggcaaguccagcaucaugcgguccgacgcccccaucgggaagugcaagagcgagugcaucacccccaacggcuccaucccgaacgacaagcccuuccagaacgugaacaagaucaccuacggggccugcccccgcuacgugaagcacagcacgcucaagcuggccaccggcaugcggaacguccccgagaagcagacccgcgggaucuucggcgccaucgccggcuucaucgagaacgggugggagggcaugguggacgggugguacggcuuccggcaccagaacuccgaggggcgcggccaggccgccgaccucaagagcacccaggcggccaucgaccagaucaacggcaagcugaaccggcugaucgggaagacgaacgagaaguuccaccagaucgagaaggaguucuccgagguggagggccgcguccaggaccuggagaaguacguggaggacaccaagaucgaccucuggagcuacaacgccgagcugcugguggcccucgagaaccagcacaccaucgaccugaccgacuccgagaugaacaagcuguucgagaagacgaagaagcagcuccgggagaacgccgaggacauggggaacggcugcuucaagaucuaccacaagugcgacaacgcgugcaucgagagcauccgcaacgagaccuacgaccacaacgucuaccgcgacgaggcccugaacaaccgguuccagaucaaggggguggagcugaaguccggcuacaaggacuggauccucuggaucagcuucgccaucagcugcuuccugcugugcguggcccuccugggcuucaucaugugggccugccagaaggggaacauccgcugcaacaucugcaucugaggacuagucccuguucccagagcccacuuuuuuuucuuuuuuugaaauaaaauagccugucuuucagaucucaaaggcucuuuucagagccaccaaaaaaaaaaaaaaaaaaaaaaaaaaaaaaaaaaaaaaaaaaaaaaaaaaaaaaaaaaaaaaaaaaaaaaaaaaaaaaaaaaaaaaaaaaaaaaaaaaaaa

SEQ ID NO: 14347 - RNA, 1973 nt, Artificial Sequence
  FLUAV/H3N2/A/Singapore/INFIMH-16-0019/2016-CDC-LV18A__EPI1583318 hemagglutinin mRNA gc (HA)
aggagagucccgcagucggcguccagcggcucugcuuguucgugugugugucguugcaggccuuauucaagcuuaccaugaagaccaucaucgcccugagcuacauccucugccugguguucgcccagaagauccccggcaacgacaacuccaccgcgacgcugugccucgggcaccacgccgucccgaacggcaccaucgugaagaccaucaccaacgaccgcaucgaggugacgaacgccaccgagcugguccagaacagcuccaucggggagaucugcgacagcccccaccagauccuggacggcgagaacugcacccucaucgacgcccugcugggggacccccagugcgacggcuuccagaacaagaagugggaccucuucguggagcgguccaaggccuacagcaacugcuaccccuacgacgugccggacuacgcgucccugcgcagccuggucgccuccagcggcacccucgaguucaagaacgaguccuucaacuggacgggggugacccagaacggcaccagcuccgccugcauccgggggagcuccagcuccuucuucagccgccugaacuggcugacccaccucaacuacaaguaccccgcccugaacgugacgaugcccaacaaggagcaguucgacaagcuguacaucuggggcguccaccaccccgggaccgacaaggaccagaucuucccguacgcgcaguccagcggccggaucaucgugagcaccaagcgcucccagcaggccgugauccccaacaucggcagccggccccgcauccgggacauccccucccgcaucagcaucuacuggaccaucgucaagccgggggacauccuccugaucaacuccacgggcaaccugaucgcgccccggggguacuucaagauccgcagcggcaaguccagcaucaugcgguccgacgcccccaucggcaagugcaagagcgagugcaucacccccaacggguccaucccgaacgacaagcccuuccagaacgugaaccgcaucaccuacggcgccugcccccgguacgugaagcacagcacccucaagcuggccacggggaugcgcaacguccccgagaagcagacccggggcaucuucggggccaucgccggcuucaucgagaacggcugggaggggaugguggacggcugguacggguuccgccaccagaacuccgagggccgggggcaggccgccgaccucaagagcacccaggcggccaucgaccagaucaacggcaagcugaaccgccugaucggcaagaccaacgagaaguuccaccagaucgagaaggaguucuccgagguggaggggcggguccaggaccuggagaaguacguggaggacacgaagaucgaccucuggagcuacaacgccgagcugcugguggcccucgagaaccagcacaccaucgaccugaccgacuccgagaugaacaagcuguucgagaagaccaagaagcagcuccgcgagaacgccgaggacaugggcaacgggugcuucaagaucuaccacaagugcgacaacgcgugcaucgagagcauccgcaacgagacguacgaccacaacgucuaccgggacgaggcccugaacaaccgcuuccagaucaagggcguggagcugaaguccggguacaaggacuggauccucuggaucagcuucgccaucagcugcuuccugcugugcguggcccuccugggcuucaucaugugggccugccagaagggcaacauccggugcaacaucugcaucugaggacuagucccuguucccagagcccacuuuuuuuucuuuuuuugaaauaaaauagccugucuuucagaucucaaaggcucuuuucagagccaccaaaaaaaaaaaaaaaaaaaaaaaaaaaaaaaaaaaaaaaaaaaaaaaaaaaaaaaaaaaaaaaaaaaaaaaaaaaaaaaaaaaaaaaaaaaaaaaaaaaaa

SEQ ID NO: 14348 - RNA, 1973 nt, Artificial Sequence
  FLUAV/H3N2/A/Kansas/14/2017__EPI1146345 hemagglutinin mRNA gc (HA)
aggagagucccgcagucggcguccagcggcucugcuuguucgugugugugucguugcaggccuuauucaagcuuaccaugaagaccaucaucgcccugagcugcauccucugccugguguucgcccagaagauccccggcaacgacaacuccaccgcgacgcugugccucgggcaccacgccgucccgaacggcaccaucgugaagaccaucaccaacgaccgcaucgaggugacgaacgccaccgagcugguccagaacagcuccaucggggagaucugcgacagcccccaccagauccuggacggcgagaacugcacccucaucgacgcccugcugggggacccccagugcgacggcuuccagaacaagaagugggaccucuucguggagcggaacaaggccuacuccaacugcuaccccuacgacgugccggacuacgcgagccugcgcucccuggucgccagcuccggcacccucgaguucaacaacgagagcuucaacugggccggggugacgcagaacggcaccuccagcuccugcauccgggggagcaaguccagcuucuucucccgccugaacuggcugacccaccucaacagcaaguaccccgcccugaacgugaccaugcccaacaacgagcaguucgacaagcuguacaucuggggcguccaccaccccgggacggacaaggaccagaucucccucuacgcgcagagcagcggccggaucaccguguccaccaagcgcagccagcaggccgugaucccgaacaucggcucccggccccgcauccgggacauccccagccgcaucuccaucuacuggaccaucgucaagcccggggacauccugcugaucaacagcacgggcaaccucaucgccccgcggggguacuucaagauccgcuccggcaagagcuccaucaugcggagcgacgcccccaucggcaagugcaaguccgagugcaucacccccaacgggagcauccccaacgacaagccguuccagaacgugaaccgcaucaccuacggcgccugcccccgguacgugaagcaguccacccugaagcuggcgacggggaugcgcaacguccccgagcggcagacccgcggcaucuucggggccaucgccggcuucaucgagaacggcugggaggggaugguggacggcugguacggguuccggcaccagaacagcgagggccgcgggcaggccgccgaccucaaguccacccaggcggccaucgaccagaucaacggcaagcugaaccggcugaucggcaagaccaacgagaaguuccaccagaucgagaaggaguucagcgagguggaggggcgcauccaggaccucgagaaguacgucgaggacacgaagaucgaccugugguccuacaacgccgagcugcucguggcccuggagaaccagcacaccaucgaccugaccgacagcgagaugaacaagcuguucgagaagaccaagaagcagcuccgcgagaacgccgaggacaugggcaacgggugcuucaagaucuaccacaagugcgacaacgcgugcaugggcuccauccggaacgggacguacgaccacaacguguaccgcgacgaggcccugaacaaccgguuccagaucaagggcgucgagcucaagagcggcuacaaggacuggauccuguggaucagcuucgccaucuccugcuuccugcucugcguggcccugcugggguucaucaugugggccugccagaagggcaacauccgcugcaacaucugcaucugaggacuagucccuguucccagagcccacuuuuuuuucuuuuuuugaaauaaaauagccugucuuucagaucucaaaggcucuuuucagagccaccaaaaaaaaaaaaaaaaaaaaaaaaaaaaaaaaaaaaaaaaaaaaaaaaaaaaaaaaaaaaaaaaaaaaaaaaaaaaaaaaaaaaaaaaaaaaaaaaaaaaa

SEQ ID NO: 14349 - RNA, 1973 nt, Artificial Sequence
  FLUAV/H3N2/A/Kansas/14/2017__EPI1261067 hemagglutinin mRNA gc (HA)
aggagagucccgcagucggcguccagcggcucugcuuguucgugugugugucguugcaggccuuauucaagcuuaccaugaagaccaucaucgcccugagcugcauccucugccugguguucgcccagaagauccccggcaacgacaacuccaccgcgacgcugugccucgggcaccacgccgucccgaacggcaccaucgugaagaccaucaccaacgaccgcaucgaggugacgaacgccaccgagcugguccagaacagcuccaucggggagaucugcgacagcccccaccagauccuggacggcgagaacugcacccucaucgacgcccugcugggggacccccagugcgacggcuuccagaacaagaagugggaccucuucguggagcggaacaaggccuacuccaacugcuaccccuacgacgugccggacuacgcgagccugcgcucccuggucgccagcuccggcacccucgaguucaacaacgagagcuucaacugggccggggugacgcagaacggcaccuccagcuccugcauccgggggagcaaguccagcuucuucucccgccugaacuggcugacccaccucaacagcaaguaccccgcccugaacgugaccaugcccaacaacgagcaguucgacaagcuguacaucuggggcguccaccaccccgggacggacaagaaccagaucucccucuacgcgcagagcagcggccggaucaccguguccaccaagcgcagccagcaggccgugaucccgaacaucggcucccggccccgcauccgggacauccccagccgcaucuccaucuacuggaccaucgucaagcccggggacauccugcugaucacgagcaccggcaaccucaucgccccgcggggguacuucaagauccgcuccggcaagagcuccaucaugcggagcgacgcccccaucggcaagugcaaguccgagugcaucacccccaacgggagcauccccaacgacaagccguuccagaacgugaaccgcaucaccuacggcgccugcccccgguacgugaagcaguccacgcugaagcuggcgaccgggaugcgcaacguccccgagcggcagacccgcggcaucuucggggccaucgccggcuucaucgagaacggcugggaggggaugguggacggcugguacggguuccggcaccagaacagcgagggccgcgggcaggccgccgaccucaaguccacccaggcggccaucgaccagaucaacggcaagcugaaccggcugaucggcaagacgaacgagaaguuccaccagaucgagaaggaguucagcgagguggaggggcgcauccaggaccucgagaaguacgucgaggacaccaagaucgaccugugguccuacaacgccgagcugcucguggcccuggagaaccagcacaccaucgaccugaccgacagcgagaugaacaagcuguucgagaagacgaagaagcagcuccgcgagaacgccgaggacaugggcaacgggugcuucaagaucuaccacaagugcgacaacgcgugcaugggcuccauccggaacgggaccuacgaccacaacguguaccgcgacgaggcccugaacaaccgguuccagaucaagggcgucgagcucaagagcggcuacaaggacuggauccuguggaucagcuucgccaucuccugcuuccugcucugcguggcccugcugggguucaucaugugggccugccagaagggcaacauccgcugcaacaucugcaucugaggacuagucccuguucccagagcccacuuuuuuuucuuuuuuugaaauaaaauagccugucuuucagaucucaaaggcucuuuucagagccaccaaaaaaaaaaaaaaaaaaaaaaaaaaaaaaaaaaaaaaaaaaaaaaaaaaaaaaaaaaaaaaaaaaaaaaaaaaaaaaaaaaaaaaaaaaaaaaaaaaaaa

SEQ ID NO: 14350 - RNA, 1973 nt, Artificial Sequence
  FLUAV/H3N2/A/Kansas/14/2017__EPI1691978 hemagglutinin mRNA gc (HA)
aggagagucccgcagucggcguccagcggcucugcuuguucgugugugugucguugcaggccuuauucaagcuuaccaugaagaccaucaucgcccugagcugcauccucugccugguguucgcccagaagauccccggcaacgacaacuccaccgcgacgcugugccucgggcaccacgccgucccgaacggcaccaucgugaagaccaucaccaacgaccgcaucgaggugacgaacgccaccgagcugguccagaacagcuccaucggggagaucugcgacagcccccaccagauccuggacggcgagaacugcacccucaucgacgcccugcugggggacccccagugcgacggcuuccagaacaagaagugggaccucuucguggagcggaacaaggccuacuccaacugcuaccccuacgacgugccggacuacgcgagccugcgcucccuggucgccagcuccggcacccucgaguucaacaacgagagcuucaacugggccggggugacgcagaacggcaccuccagcuccugcauccgggggagcaaguccagcuucuucucccgccugaacuggcugacccaccucaacagcaaguaccccgcccugaacgugaccaugcccaacaacgagcaguucgacaagcuguacaucuggggcguccaccaccccgugacggacaagaaccagaucucccucuacgcgcagagcagcgggcggaucaccguguccaccaagcgcagccagcaggccgucaucccgaacaucggcuaccggccccgcauccgggacauccccucccgcaucagcaucuacuggaccaucgugaagcccggcgacauccugcugaucaacuccacggggaaccucaucgccccgcggggcuacuucaagauccgcagcgggaaguccagcaucaugcgguccgacgcccccaucggcaagugcaagagcgagugcaucacccccaacggcuccauccccaacgacaagccguuccagaacgugaaccgcaucaccuacggggccugcccccgguacgucaagcagagcacccugaagcuggcgacgggcaugcgcaacgugcccgagcggcagacccgcgggaucuucggcgccaucgccggguucaucgagaacggcugggagggcaugguggacgggugguacggcuuccggcaccagaacuccgaggggcgcggccaggccgccgaccucaagagcacccaggcggccaucgaccagaucaacgggaagcugaaccggcugaucggcaagaccaacgagaaguuccaccagaucgagaaggaguucuccgaggucgagggccgcauccaggaccucgagaaguacguggaggacacgaagaucgaccuguggagcuacaacgccgagcugcucguggcccuggagaaccagcacaccaucgaccugaccgacuccgagaugaacaagcuguucgagaagaccaagaagcagcuccgcgagaacgccgaggacauggggaacggcugcuucaagaucuaccacaagugcgacaacgcgugcauggggagcauccggaacggcacguacgaccacaacgucuaccgcgacgaggcccugaacaaccgguuccagaucaaggggguggagcucaaguccggcuacaaggacuggauccuguggaucagcuucgccaucagcugcuuccugcucugcguggcccugcugggcuucaucaugugggccugccagaaggggaacauccgcugcaacaucugcaucugaggacuagucccuguucccagagcccacuuuuuuuucuuuuuuugaaauaaaauagccugucuuucagaucucaaaggcucuuuucagagccaccaaaaaaaaaaaaaaaaaaaaaaaaaaaaaaaaaaaaaaaaaaaaaaaaaaaaaaaaaaaaaaaaaaaaaaaaaaaaaaaaaaaaaaaaaaaaaaaaaaaaa

SEQ ID NO: 14351 - RNA, 1973 nt, Artificial Sequence
  FLUAV/H3N2/A/Kansas/14/2017 CBER-22B CDC19A__EPI1388416 hemagglutinin mRNA gc (HA)
aggagagucccgcagucggcguccagcggcucugcuuguucgugugugugucguugcaggccuuauucaagcuuaccaugaagaccaucaucgcccugagcugcauccucugccugguguucgcccagaagauccccggcaacgacaacuccaccgcgacgcugugccucgggcaccacgccgucccgaacggcaccaucgugaagaccaucaccaacgaccgcaucgaggugacgaacgccaccgagcugguccagaacagcuccaucggggagaucugcgacagcccccaccagauccuggacggcgagaacugcacccucaucgacgcccugcugggggacccccagugcgacggcuuccagaacaagaagugggaccucuucguggagcggaacaaggccuacuccaacugcuaccccuacgacgugccggacuacgcgagccugcgcucccuggucgccagcuccggcacccucgaguucaacaacgagagcuucaacugggccggggugacgcagaacggcaccuccagcuccugcauccgggggagcaaguccagcuucuucucccgccugaacuggcugacccaccucaacagcaaguaccccgcccugaacgugaccaugcccaacaacgagcaguucgacaagcuguacaucuggggcguccaccaccccgugacggacaagaaccagaucucccucuacgcgcagagcagcgggcggaucaccguguccaccaagcgcagccagcaggccgucaucccgaacaucggcuaccggccccgcauccgggacauccccucccgcaucagcaucuacuggaccaucgugaagcccggcgacauccugcugaucaacuccacggggaaccucaucgccccgcggggcuacuucaagauccgcagcgggaaguccagcaucaugcgguccgacgcccccaucggcaagugcaagagcgagugcaucacccccaacggcuccauccccaacgacaagccguuccagaacgugaaccgcaucaccuacggggccugcccccgguacgucaagcagagcacccugaagcuggcgacgggcaugcgcaacgugcccgagcggcagacccgcgggaucuucggcgccaucgccggguucaucgagaacggcugggagggcaugguggacgggugguacggcuuccggcaccagaacuccgaggggcgcggccaggccgccgaccucaagagcacccaggcggccaucgaccagaucaacgggaagcugaaccggcugaucggcaagaccaacgagaaguuccaccagaucgagaaggaguucuccgaggucgagggccgcauccaggaccucgagaaguacguggaggacacgaagaucgaccuguggagcuacaacgccgagcugcucguggcccuggagaaccagcacaccaucgaccugaccgacuccgagaugaacaagcuguucgagaagaccaagaagcagcuccgcgagaacgccgaggacauggggaacggcugcuucaagaucuaccacaagugcgacaacgcgugcaucgggagcauccggaacggcacguacgaccacaacgucuaccgcgacgaggcccugaacaaccgguuccagaucaaggggguggagcucaaguccggcuacaaggacuggauccuguggaucagcuucgccaucagcugcuuccugcucugcguggcccugcugggcuucaucaugugggccugccagaaggggaacauccgcugcaacaucugcaucugaggacuagucccuguucccagagcccacuuuuuuuucuuuuuuugaaauaaaauagccugucuuucagaucucaaaggcucuuuucagagccaccaaaaaaaaaaaaaaaaaaaaaaaaaaaaaaaaaaaaaaaaaaaaaaaaaaaaaaaaaaaaaaaaaaaaaaaaaaaaaaaaaaaaaaaaaaaaaaaaaaaaa

SEQ ID NO: 14352 - RNA, 1973 nt, Artificial Sequence
  FLUAV/H3N2/A/Switzerland/8060/2017__EPI1154878 hemagglutinin mRNA gc (HA)
aggagagucccgcagucggcguccagcggcucugcuuguucgugugugugucguugcaggccuuauucaagcuuaccaugaagaccaucaucgcccugagcuacauccucugccugguguucgcccagaagauccccggcaacgacaacuccaccgcgacgcugugccucgggcaccacgccgucccgaacggcaccaucgugaagaccaucaccaacgaccgcaucgaggugacgaacgccaccgagcugguccagaacagcuccaucggggagaucugcgacagcccccaccagauccuggacggcgagaacugcacccucaucgacgcccugcugggggacccccagugcgacggcuuccagaacaagaagugggaccucuucguggagcgguccaaggccuacagcuccugcuaccccuacgacgugccggacuacgcgagccugcgcucccuggucgccagcuccggcacccucgaguucaacaacgagagcuucaacuggacgggggugaagcagaacggcaccuccagcgccugcauccggaaguccagcuccagcuucuucucccgccugaacuggcugacccaccucaacuacaccuaccccgcccugaacgugacgaugcccaacaacgagcaguucgacaagcuguacaucuggggcguccaccaccccgggaccgacaaggaccagaucuuccucuacgcgcagagcagcgggcggaucaccguguccaccaagcgcagccagcaggccgugaucccgaacaucggcucccggccccgcauccgggacauccccagccgcaucuccaucuacuggacgaucgucaagcccggcgacauccugcugaucaacagcaccgggaaccucaucgccccgcggggcuacuucaagauccaguccggcaagagcuccaucaugcgcagcgacgcccccaucgggaagugcaaguccgagugcaucacccccaacggcagcauccccaacgacaagccguuccagaacgugaaccggaucaccuacggggccugcccccgcuacgugaagcacuccacgcugaagcuggcgaccggcaugcggaacguccccgagaagcagacccgcgggaucuucggcgccaucgccggguucaucgagaacggcugggagggcaugguggacgggugguacggcuuccggcaccagaacagcgaggggcgcggccaggccgccgaccucaaguccacccaggcggccaucgaccagaucaacgggaagcugaaccggcugaucggcaagacgaacgagaaguuccaccagaucgagaaggaguucagcgagguggagggccgcauccaggaccucgagaaguacgucgaggacaccaagaucgaccugugguccuacaacgccgagcugcucguggcccuggagaaccagcacaccaucgaccugaccgacagcgagaugaacaagcuguucgagaagacgaagaagcagcuccgggagaacgccgaggacauggggaacggcugcuucaagaucuaccacaagugcgacaacgcgugcaucggguccauccgcaacggcaccuacgaccacaacguguaccgcgacgaggcccugaacaaccgguuccagaucaagggggucgagcucaagagcggcuacaaggacuggauccuguggaucagcuucgccaucuccugcuuccugcucugcguggcccugcugggcuucaucaugugggccugccagaaggggaacauccgcugcaacaucugcaucugaggacuagucccuguucccagagcccacuuuuuuuucuuuuuuugaaauaaaauagccugucuuucagaucucaaaggcucuuuucagagccaccaaaaaaaaaaaaaaaaaaaaaaaaaaaaaaaaaaaaaaaaaaaaaaaaaaaaaaaaaaaaaaaaaaaaaaaaaaaaaaaaaaaaaaaaaaaaaaaaaaaaa

SEQ ID NO: 14353 - RNA, 1973 nt, Artificial Sequence
  FLUAV/H3N2/A/Switzerland/8060/2017__EPI1266285 hemagglutinin mRNA gc (HA)
aggagagucccgcagucggcguccagcggcucugcuuguucgugugugugucguugcaggccuuauucaagcuuaccaugaagaccaucaucgcccugagcuacauccucugccugguguucgcccagaagauccccggcaacgacaacuccaccgcgacgcugugccucgggcaccacgccgucccgaacggcaccaucgugaagaccaucaccaacgaccgcaucgaggugacgaacgccaccgagcugguccagaacagcuccaucggggagaucugcgacagcccccaccagauccuggacggcgagaacugcacccucaucgacgcccugcugggggacccccagugcgacggcuuccagaacaagaagugggaccucuucguggagcgguccaaggccuacagcuccugcuaccccuacgacgugccggacuacgcgagccugcgcucccuggucgccagcuccggcacccucgaguucaacaacgagagcuucaacuggacgggggugaagcagaacggcaccuccagcgccugcauccggaaguccagcuccagcuucuucucccgccugaacuggcugacccaccucaacuacaaguaccccgcccugaacgugaccaugcccaacaacgagcaguucgacaagcuguacaucuggggcguccaccaccccgggacggacaaggaccagaucuucccguacgcgcagagcagcgggcggaucaccguguccaccaagcgcagccagcaggccgugauccccaacaucggcucccggccccgcauccgggacauccccagccgcaucuccaucuacuggaccaucgucaagccgggcgacauccuccugaucaacagcacggggaaccugaucgcgccccggggcuacuucaagauccaguccggcaagagcuccaucaugcgcagcgacgcccccaucgggaagugcaaguccgagugcaucacccccaacggcagcaucccgaacgacaagcccuuccagaacgugaaccggaucaccuacggggccugcccccgcuacgugaagcacuccacccucaagcuggccacgggcaugcggaacguccccgagaagcagacccgcgggaucuucggcgccaucgccggguucaucgagaacggcugggagggcaugguggacgggugguacggcuuccggcaccagaacagcgaggggcgcggccaggccgccgaccugaaguccacccaggcggccaucgaccagaucaacgggaagcucaaccggcugaucggcaagaccaacgagaaguuccaccagaucgagaaggaguucagcgagguggagggccgcauccaggaccuggagaaguacgucgaggacacgaagaucgaccucugguccuacaacgccgagcugcugguggcccucgagaaccagcacaccaucgaccugaccgacagcgagaugaacaagcuguucgagaagaccaagaagcagcuccgggagaacgccgaggacauggggaacggcugcuucaagaucuaccacaagugcgacaacgcgugcaucggguccauccgcaacggcacguacgaccacaacguguaccgcgacgaggcccugaacaaccgguuccagaucaagggggucgagcucaagagcggcuacaaggacuggauccuguggaucagcuucgccaucuccugcuuccugcugugcguggcccuccugggcuucaucaugugggccugccagaaggggaacauccgcugcaacaucugcaucugaggacuagucccuguucccagagcccacuuuuuuuucuuuuuuugaaauaaaauagccugucuuucagaucucaaaggcucuuuucagagccaccaaaaaaaaaaaaaaaaaaaaaaaaaaaaaaaaaaaaaaaaaaaaaaaaaaaaaaaaaaaaaaaaaaaaaaaaaaaaaaaaaaaaaaaaaaaaaaaaaaaaa

SEQ ID NO: 14354 - RNA, 1973 nt, Artificial Sequence
  FLUAV/H3N2/A/Hong Kong/2671/2019__EPI1543098 hemagglutinin mRNA gc (HA)
aggagagucccgcagucggcguccagcggcucugcuuguucgugugugugucguugcaggccuuauucaagcuuaccaugaagaccaucaucgcccugagcuacauccucugccugguguucacccagaagauccccggcaacgacaacuccacggccacccugugccucgggcaccacgcggucccgaacggcaccaucgugaagaccaucacgaacgaccgcaucgaggugaccaacgccaccgagcugguccagaacagcuccaucggggagaucugcgacagcccccaccagauccuggacggcgggaacugcacccucaucgacgcccugcugggcgacccccagugcgacggcuuccagaacaagaagugggaccucuucguggagcggucccgcgccuacagcaacugcuaccccuacgacgugccggacuacgccucccugcggagccuggucgcguccagcgggacgcucgaguucaagaacgaguccuucaacugggccggcgugacccagaacggcaagagcuucuccugcauccgcgggagcuccagcuccuucuucagccggcugaacuggcugacccaccucaacuacaccuaccccgcccugaacgugacgaugcccaacaaggagcaguucgacaagcuguacaucuggggcguccaccaccccgggaccgacaaggaccagaucucccucuacgcccagagcagcggccgcaucaccguguccaccaagcggagccagcaggcggugaucccgaacaucgggucccgcccccggauccgcgacauccccagccggaucuccaucuacuggacgaucgucaagcccggcgacauccugcugaucaacagcaccgggaaccucaucgccccgcgcggcuacuucaagauccgguccggcaagagcuccaucaugcgcagcgacgcccccaucgggaagugcaaguccgagugcaucacccccaacggcagcauccccaacgacaagccguuccagaacgugaaccggaucaccuacggggccugcccccgcuacgugaagcaguccacgcugaagcuggccaccggcaugcggaacguccccgagaagcagacccgcgggaucuucggcgcgaucgccggcuucaucgagaacgggugggagggcaugguggacgggugguacggcuuccggcaccagaacagcgaggggcgcggccaggccgccgaccucaaguccacccaggccgcgaucgaccagaucaacggcaagcugaaccggcugaucgggaagacgaacgagaaguuccaccagaucgagaaggaguucagcgagguggagggccgcguccaggaccucgagaaguacguggaggacaccaagaucgaccugugguccuacaacgccgagcugcucguggcccuggagaaccagcacaccaucgaccugaccgacagcgagaugaacaagcuguucgagaagacgaagaagcagcuccgcgagaacgccgaggacauggggaacggcugcuucaagaucuaccacaagugcgacaacgccugcaucggguccauccggaacgagaccuacgaccacaacgucuaccgcgacgaggcgcugaacaaccgguuccagaucaagggcguggagcucaagagcggcuacaaggacuggauccuguggaucagcuucgccaucuccugcuuccugcucugcguggcccugcugggguucaucaugugggccugccagaagggcaacauccgcugcaacaucugcaucugaggacuagucccuguucccagagcccacuuuuuuuucuuuuuuugaaauaaaauagccugucuuucagaucucaaaggcucuuuucagagccaccaaaaaaaaaaaaaaaaaaaaaaaaaaaaaaaaaaaaaaaaaaaaaaaaaaaaaaaaaaaaaaaaaaaaaaaaaaaaaaaaaaaaaaaaaaaaaaaaaaaaa

SEQ ID NO: 14355 - RNA, 1973 nt, Artificial Sequence
  FLUAV/H3N2/A/Hong Kong/2671/2019__EPI1642843 hemagglutinin mRNA gc (HA)
aggagagucccgcagucggcguccagcggcucugcuuguucgugugugugucguugcaggccuuauucaagcuuaccaugaagaccaucaucgcccugagcuacauccucugccugguguucacccagaagauccccggcaacgacaacuccacggccacccugugccucgggcaccacgcggucccgaacggcaccaucgugaagaccaucacgaacgaccgcaucgaggugaccaacgccaccgagcugguccagaacagcuccaucggggagaucugcgacagcccccaccagauccuggacggcgggaacugcacccucaucgacgcccugcugggcgacccccagugcgacggcuuccagaacaagaagugggaccucuucguggagcggucccgcgccuacagcaacugcuaccccuacgacgugccggacuacgccucccugcggagccuggucgcguccagcgggacgcucgaguucaagaacgaguccuucaacugggccggcgugacccagaacggcaagagcuucuccugcauccgcgggagcuccagcuccuucuucagccggcugaacuggcugacccaccucaacuacaucuaccccgcccugaacgugaccaugcccaacaaggagcaguucgacaagcuguacaucuggggcguccaccaccccgugacggacaaggaccagaucucccucuacgcccagagcagcgggcgcaucaccguguccaccaagcggagccagcaggcggucaucccgaacaucggcucccgcccccggauccgcaacauccccagccggaucuccaucuacuggaccaucgugaagcccggggacauccugcugaucaacagcacgggcaaccucaucgccccgcgcggguacuucaagauccgguccggcaagagcuccaucaugcgcagcgacgcccccaucggcaagugcaaguccgagugcaucacccccaacgggagcauccccaacgacaagccguuccagaacgugaaccggaucaccuacggcgccugcccccgcuacgucaagcaguccacccugaagcuggccacggggaugcggaacgugcccgagaagcagacccgcggcaucuucggggcgaucgccggcuucaucgagaacggcugggaggggaugguggacggcugguacggguuccggcaccagaacagcgagggccgcgggcaggccgccgaccucaaguccacccaggccgcgaucgaccagaucaacggcaagcugaaccggcugaucggcaagaccaacgagaaguuccaccagaucgagaaggaguucagcgaggucgaggggcgcgugcaggaccucgagaaguacguggaggacacgaagaucgaccugugguccuacaacgccgagcugcucgucgcccuggagaaccagcacaccaucgaccugaccgacagcgagaugaacaagcuguucgagaagaccaagaagcagcuccgcgagaacgccgaggacaugggcaacgggugcuucaagaucuaccacaagugcgacaacgccugcaucggcuccauccggaacgagacguacgaccacaacguguaccgcgacgaggcgcugaacaaccgguuccagaucaaggggguggagcucaagagcggcuacaaggacuggauccuguggaucagcuucgccaucuccugcuuccugcucugcgucgcccugcugggcuucaucaugugggccugccagaaggggaacauccgcugcaacaucugcaucugaggacuagucccuguucccagagcccacuuuuuuuucuuuuuuugaaauaaaauagccugucuuucagaucucaaaggcucuuuucagagccaccaaaaaaaaaaaaaaaaaaaaaaaaaaaaaaaaaaaaaaaaaaaaaaaaaaaaaaaaaaaaaaaaaaaaaaaaaaaaaaaaaaaaaaaaaaaaaaaaaaaaa

SEQ ID NO: 14356 - RNA, 1973 nt, Artificial Sequence
  FLUAV/H3N2/A/Hong Kong/45/2019__EPI1691930 hemagglutinin mRNA gc (HA)
aggagagucccgcagucggcguccagcggcucugcuuguucgugugugugucguugcaggccuuauucaagcuuaccaugaagaccaucaucgcccugagcuacauccucugccugggcuucacccagaagauccccgggaacgacaacuccacggccacccugugccucggccaccacgcggugccgaacgggaccaucgucaagaccaucacgaacgaccgcaucgaggugaccaacgccaccgagcuggugcagaacagcuccaucggcgagaucugcgacagcccccaccagauccuggacgggggcaacugcacccucaucgacgcccugcugggcgacccccagugcgacggguuccagaacaagaagugggaccucuucgucgagcggucccgcgccuacagcaacugcuaccccuacgacgugccggacuacgccucccugcggagccugguggcguccagcggcacgcucgaguucaagaacgaguccuucaacugggccggggucacccagaacggcaagagcuucuccugcauccgcgggagcuccagcuccuucuucagccggcugaacuggcugacccaccucaacuacaccuaccccgcccugaacgugacgaugcccaacaaggagcaguucgacaagcuguacaucuggggcgugcaccaccccggcaccgacaaggaccagaucucccucuacgcccagagcagcgggcgcaucaccgucuccaccaagcggagccagcaggcggugaucccgaacaucggcucccgcccccggauccgcgacauccccagccggaucuccaucuacuggacgaucgugaagcccggggacauccugcugaucaacagcaccggcaaccucaucgccccgcgcggcuacuucaagauccgguccggcaagagcuccaucaugcgcagcgacgcccccaucgggaagugcaaguccgagugcaucacccccaacgggagcauccccaacgacaagccguuccagaacgucaaccggaucaccuacggcgccugcccccgcuacgugaagcagaacacgcugaagcuggccaccgggaugcggaacgugcccgagaagcagacccgcggcaucuucggcgcgaucgccggguucaucgagaacggcugggaggggauggucgacggcugguacggguuccggcaccagaacuccgagggccgcggccaggccgccgaccucaagagcacccaggccgcgaucgaccagaucaacgggaagcugaaccggcugaucggcaagacgaacgagaaguuccaccagaucgagaaggaguucuccgagguggaggggcgcgugcaggaccucgagaaguacgucgaggacaccaagaucgaccuguggagcuacaacgccgagcugcucguggcccuggagaaccagcacaccaucgaccugaccgacuccgagaugaacaagcuguucgagaagacgaagaagcagcuccgcgagaacgccgaggacaugggcaacgggugcuucaagaucuaccacaagugcgacaacgccugcaucggcagcauccggaacgagaccuacgaccacaacguguaccgcgacgaggcgcugaacaaccgguuccagaucaagggcgucgagcucaaguccggguacaaggacuggauccuguggaucagcuucgccaucagcugcuuccugcucugcguggcccugcugggcuucaucaugugggccugccagaaggggaacauccgcugcaacaucugcaucugaggacuagucccuguucccagagcccacuuuuuuuucuuuuuuugaaauaaaauagccugucuuucagaucucaaaggcucuuuucagagccaccaaaaaaaaaaaaaaaaaaaaaaaaaaaaaaaaaaaaaaaaaaaaaaaaaaaaaaaaaaaaaaaaaaaaaaaaaaaaaaaaaaaaaaaaaaaaaaaaaaaaa

SEQ ID NO: 14357 - RNA, 1973 nt, Artificial Sequence
  FLUAV/H3N2/A/South Australia/34/2019__EPI1387331 hemagglutinin mRNA gc (HA)
aggagagucccgcagucggcguccagcggcucugcuuguucgugugugugucguugcaggccuuauucaagcuuaccaugaagaccaucaucgcccugagcuacauccucugccugguguucgcccagaagauccccggcaacgacaacuccaccgcgacgcugugccucgggcaccacgccgucccgaacggcaccaucgugaagaccaucaccaacgaccgcaucgaggugacgaacgccaccgagcugguccagaacagcuccaucggggagaucugcgacagcccccaccagauccuggacggcgggaacugcacccucaucgacgcccugcugggcgacccccagugcgacggcuuccagaacaagaagugggaccucuucguggagcggucccgcgccuacagcaacugcuaccccuacgacgugccggacuacgcgucccugcggagccuggucgccuccagcgggacccucgaguucaagaacgaguccuucaacuggacgggcgugaagcagaacgggaccagcuccgccugcauccgcggcagcuccagcuccuucuucagccggcugaacuggcugacccaccucaacuacaccuaccccgcccugaacgugacgaugcccaacaaggagcaguucgacaagcuguacaucuggggcguccaccaccccgggaccgacaaggaccagaucuuccucuacgcgcaguccagcggccgcaucaccgugagcaccaagcggucccagcaggccgugaucccgaacaucggguuccgcccccggauccgcgacauccccagccggaucuccaucuacuggacgaucgucaagcccggcgacauccugcugaucaacagcaccgggaaccucaucgccccgcgcggcuacuucaagauccgguccggcaagagcuccaucaugcgcagcgacgcccccaucgggaagugcaaguccgagugcaucacccccaacggcagcauccccaacgacaagccguuccagaacgugaaccggaucaccuacggggccugcccccgcuacgugaagcaguccacgcugaagcuggcgaccggcaugcggaacguccccgagaagcagacccgcgggaucuucggcgccaucgccggcuucaucgagaacgggugggagggcaugauggacgggugguacggcuuccggcaccagaacagcgaggggcgcggccaggccgccgaccucaaguccacccaggcggccaucgaccagaucaacggcaagcugaaccggcugaucgggaagacgaacgagaaguuccaccagaucgagaaggaguucagcgagguggagggccgcgugcaggaccucgagaaguacgucgaggacaccaagaucgaccugugguccuacaacgccgagcugcucguggcccuggagaaccagcacaccaucgaccugaccgacagcgagaugaacaagcuguucgagaagacgaagaagcagcuccgcgagaacgccgaggacauggggaacggcugcuucaagaucuaccacaagugcgacaacgcgugcaucggguccauccggaacgagaccuacgaccacaacguguaccgcgacgaggcccugaacaaccgguuccagaucaagggcgucgagcucaagagcggcuacaaggacuggauccuguggaucuccuucgccaucagcugcuuccugcucugcaucgcccugcugggguucaucaugugggccugccagaagggcaacauccgcugcaacaucugcaucugaggacuagucccuguucccagagcccacuuuuuuuucuuuuuuugaaauaaaauagccugucuuucagaucucaaaggcucuuuucagagccaccaaaaaaaaaaaaaaaaaaaaaaaaaaaaaaaaaaaaaaaaaaaaaaaaaaaaaaaaaaaaaaaaaaaaaaaaaaaaaaaaaaaaaaaaaaaaaaaaaaaaa

SEQ ID NO: 14358 - RNA, 1973 nt, Artificial Sequence
  FLUAV/H3N2/A/South Australia/34/2019__EPI1440494 hemagglutinin mRNA gc (HA)
aggagagucccgcagucggcguccagcggcucugcuuguucgugugugugucguugcaggccuuauucaagcuuaccaugaagaccaucaucgcccugagcuacauccucugccugguguucgcccagaagauccccggcaacgacaacuccaccgcgacgcugugccucgggcaccacgccgucccgaacggcaccaucgugaagaccaucaccaacgaccgcaucgaggugacgaacgccaccgagcugguccagaacagcuccaucggggagaucugcgacagcccccaccagauccuggacggcgggaacugcacccucaucgacgcccugcugggcgacccccagugcgacggcuuccagaacaagaagugggaccucuucguggagcggucccgcgccuacagcaacugcuaccccuacgacgugccggacuacgcgucccugcggagccuggucgccuccagcgggacccucgaguucaagaacgaguccuucaacuggacgggcgugaagcagaacgggaccagcuccgccugcauccgcggcagcuccagcuccuucuucagccggcugaacuggcugacccaccucaacuacaaguaccccgcccugaacgugaccaugcccaacaaggagcaguucgacaagcuguacaucuggggcguccaccaccccaucacggacaaggaccagaucuuccucuacgcgcaguccagcgggcgcaucaccgugagcaccaagcggucccagcaggccgugaucccgaacaucggcuuccgcccccggauccgcgacauccccagccggaucuccaucuacuggaccaucgucaagcccggggacauccugcugaucaacagcacgggcaaccucaucgccccgcgcggguacuucaagauccgguccggcaagagcuccaucaugcgcagcgacgcccccaucggcaagugcaaguccgagugcaucacccccaacgggagcauccccaacgacaagccguuccagaacgugaaccggaucaccuacggcgccugcccccgcuacgugaagcaguccacccugaagcuggcgacggggaugcggaacguccccgagaagcagacccgcggcaucuucggggccaucgccggcuucaucgagaacggcugggaggggaugauggacggcugguacggguuccggcaccagaacagcgagggccgcgggcaggccgccgaccucaaguccacccaggcggccaucgaccagaucaacggcaagcugaaccggcugaucggcaagaccaacgagaaguuccaccagaucgagaaggaguucagcgagguggaggggcgcgugcaggaccucgagaaguacgucgaggacacgaagaucgaccugugguccuacaacgccgagcugcucguggcccuggagaaccagcacaccaucgaccugaccgacagcgagaugaacaagcuguucgagaagaccaagaagcagcuccgcgagaacgccgaggacaugggcaacgggugcuucaagaucuaccacaagugcgacaacgcgugcaucggcuccauccggaacgagacguacgaccacaacguguaccgcgacgaggcccugaacaaccgguuccagaucaagggggucgagcucaagagcggcuacaaggacuggauccuguggaucuccuucgccaucagcugcuuccugcucugcaucgcccugcugggcuucaucaugugggccugccagaaggggaacauccgcugcaacaucugcaucugaggacuagucccuguucccagagcccacuuuuuuuucuuuuuuugaaauaaaauagccugucuuucagaucucaaaggcucuuuucagagccaccaaaaaaaaaaaaaaaaaaaaaaaaaaaaaaaaaaaaaaaaaaaaaaaaaaaaaaaaaaaaaaaaaaaaaaaaaaaaaaaaaaaaaaaaaaaaaaaaaaaaa

SEQ ID NO: 14359 - RNA, 1955 nt, Artificial Sequence
  FLUAV/H7N9/A/chicken/Zhejiang/C483/2013(H7N9)__AGN69400.1 hemagglutinin mRNA gc (HA)
aggagagucccgcagucggcguccagcggcucugcuuguucgugugugugucguugcaggccuuauucaagcuuaccaugaacacccagauccugguguucgcccucaucgccaucauccccaccaacgcggacaagaucugccugggccaccacgccgucagcaacgggacgaaggugaacacccugaccgagcgcggcguggaggucgugaacgccaccgagacgguggagcggaccaacaucccgcgcaucugcuccaaggggaagaagaccgucgaccucggccagugcgggcugcugggcaccaucacgggcccgccccagugcgaccaguuccucgaguucagcgccgaccugaucaucgagcggcgcgagggguccgacgugugcuaccccggcaaguucgugaacgaggaggcccugcggcagauccuccgcgagagcgggggcaucgacaaggaggcgaugggguucaccuacuccggcauccggaccaacggcgccaccagcgccugccgccgguccgggagcuccuucuacgccgagaugaaguggcugcugagcaacacggacaacgcggccuucccgcagaugaccaaguccuacaagaacacccgcaagagccccgcccucaucgucuggggcauccaccacuccgugagcaccgccgagcagacgaagcuguacggguccggcaacaagcuggugaccgucggcagcuccaacuaccagcagagcuucgugcccucccccggggcccggccccaggugaacggccagagcgggcgcaucgacuuccacuggcucaugcugaaccccaacgacaccgucaccuucagcuucaacggcgcguucaucgcccccgaccgggccuccuuccugcgcggcaagagcauggggauccaguccggcguccagguggacgccaacugcgagggggacugcuaccacagcggcgggacgaucaucuccaaccuccccuuccagaacaucgacagccgggccgugggcaagugcccgcgcuacgugaagcagcggucccugcugcucgcgaccgggaugaagaacgugcccgagauccccaagggccgcggccuguucggggccaucgccggcuucaucgagaacgggugggagggccugaucgacgggugguacggcuuccggcaccagaacgcccagggcgaggggaccgccgcggacuacaagagcacccaguccgccaucgaccagaucacgggcaagcucaaccgccugaucgagaagaccaaccagcaguucgagcugaucgacaacgaguucaacgaggucgagaagcagaucgggaacgugaucaacuggacccgggacagcaucaccgaggugugguccuacaacgccgagcuccuggucgccauggagaaccagcacacgaucgaccuggccgacagcgagauggacaagcucuacgagcgcgugaagcgccagcugcgggagaacgcggaggaggacggcaccggcugcuucgagaucuuccacaagugcgacgacgacugcauggccuccauccgcaacaacaccuacgaccacagcaaguaccgggaggaggccaugcagaaccgcauccagaucgaccccgucaagcuguccagcggguacaaggacgugauccucugguucuccuucggcgccagcugcuucauccugcuggcgaucgugauggggcucgucuucaucugcgugaagaacggcaacaugcggugcaccaucugcaucugaggacuagucccuguucccagagcccacuuuuuuuucuuuuuuugaaauaaaauagccugucuuucagaucucaaaggcucuuuucagagccaccaaaaaaaaaaaaaaaaaaaaaaaaaaaaaaaaaaaaaaaaaaaaaaaaaaaaaaaaaaaaaaaaaaaaaaaaaaaaaaaaaaaaaaaaaaaaaaaaaaaaa

SEQ ID NO: 14360 - RNA, 1958 nt, Artificial Sequence
  FLUAV/H10N8/A/Jiangxi/IPB13/2013(H10N8)__AHK10761.1 hemagglutinin mRNA gc (HA)
aggagagucccgcagucggcguccagcggcucugcuuguucgugugugugucguugcaggccuuauucaagcuuaccauguacaagaucguggucaucaucgcccugcucggcgccgugaaggggcuggacaagaucugccugggccaccacgcgguggccaacgggaccaucgucaagacccucacgaacgagcaggaggaggugaccaacgccaccgagaccguggagagcacgggcaucaaccgccugugcaugaaggggcggaagcacaaggaccugggcaacugccaccccaucggcaugcucaucgggaccccggccugcgaccugcaccugaccggcaugugggacacccucaucgagcgcgagaacgccaucgcguacugcuaccccggggccacggucaacguggaggcccugcggcagaagaucauggaguccggcgggaucaacaagaucagcaccggcuucaccuacggcuccagcaucaacuccgccgggaccacgcgcgcgugcaugcggaacggcgggaacagcuucuacgccgagcugaaguggcucguguccaagagcaagggccagaacuucccccagaccaccaacaccuaccgcaacacggacaccgccgagcaccugaucauguggggcauccaccaccccuccagcacccaggagaagaacgaccuguacgggacccagucccucagcaucuccgucggcagcuccacguaccggaacaacuucgugccgguggucggggcccgcccccaggugaacggccagagcgggcggaucgacuuccacuggacccuggugcagcccggcgacaacaucaccuucucccacaacggcgggcugaucgcccccagccgcgucuccaagcucaucggccgggggcugggcauccagagcgacgcgccgaucgacaacaacugcgagagcaagugcuucuggcgcgggggcuccaucaacacccggcugcccuuccagaaccucagcccccgcacggugggccagugccccaaguacgugaaccggcgcucccugaugcuggccaccgggaugcggaacgucccggagcucauccagggccgcgggcuguucggcgccaucgccggguuccuggagaacggcugggagggcaugguggacgggugguacggcuuccggcaccagaacgcccaggggaccggccaggcggccgacuacaagagcacccaggccgccaucgaccagaucacgggcaagcucaaccgccugguggagaagaccaacaccgaguucgaguccaucgagagcgaguucuccgagaucgagcaccagaucgggaacgucaucaacuggaccaaggacagcaucacggacaucuggaccuaccaggccgagcugcucguggcgauggagaaccagcacaccaucgacauggccgacuccgagaugcugaaccuguacgagcgggugcgcaagcagcuccgccagaacgccgaggaggacggcaaggggugcuucgagaucuaccacgccugcgacgacagcugcauggaguccauccggaacaacaccuacgaccacagccaguaccgcgaggaggcccugcugaaccggcucaacaucaaccccgucacgcuguccagcggcuacaaggacaucauccugugguucuccuucggggcgagcugcuucgugcuccuggccgucgugaugggccuguucuucuucugccucaagaacggcaacaugcgcugcaccaucugcaucugaggacuagucccuguucccagagcccacuuuuuuuucuuuuuuugaaauaaaauagccugucuuucagaucucaaaggcucuuuucagagccaccaaaaaaaaaaaaaaaaaaaaaaaaaaaaaaaaaaaaaaaaaaaaaaaaaaaaaaaaaaaaaaaaaaaaaaaaaaaaaaaaaaaaaaaaaaaaaaaaaaaaa

SEQ ID NO: 14361 - RNA, 2024 nt, Artificial Sequence
  FLUBV/H0N0/B/Colorado/06/2017__EPI1011552 hemagglutinin mRNA gc (HA)
aggagagucccgcagucggcguccagcggcucugcuuguucgugugugugucguugcaggccuuauucaagcuuaccaugaaggccaucaucgugcugcucauggucgugaccagcuccgccgaccgcaucugcaccggcaucacgagcuccaacagcccccacguggucaagaccgcgacccagggggaggugaacgugaccggcgucaucccgcugacgaccacccccaccaagucccacuucgccaaccugaaggggacggagacccggggcaagcucugccccaagugccugaacugcaccgaccuggacguggcccucgggcgccccaagugcaccggcaagaucccgagcgcccggguguccauccugcacgagguccgccccgugacgagcggcugcuuccccaucaugcacgaccggaccaagauccgccagcugcccaaccuccugcggggguacgagcacgugcgccuguccacccacaacgucaucaacgccgagggcgcgcccgggggccccuacaagaucgggaccagcggcuccugccccaacaucacgaacggcaacggguucuucgccaccauggccugggccgugcccgacaagaacaagaccgcgaccaacccgcucacgaucgaggugcccuacgucugcaccgagggcgaggaccagaucaccguguggggguuccacagcgacaacgagacccagauggccaagcuguacggcgacuccaagccccagaaguucacgagcuccgccaacggcgugaccacccacuacgucagccagaucgggggcuuccccaaccagaccgaggacgggggccugccgcaguccgggcggaucgugguggacuacaugguccagaaguccggcaagacgggcaccaucaccuaccagcgcgggauccuccugccccagaagguguggugcgccagcggccggagcaaggugaucaaggggagccugccccucaucggcgaggccgacugccugcacgagaaguacgggggccugaacaaguccaagcccuacuacaccggcgagcacgcgaaggccaucgggaacugcccgaucugggucaagacgccccucaagcuggccaacggcaccaaguaccgcccgcccgccaagcugcucaaggagcggggguucuucggcgccaucgcgggguuccuggagggcggcugggaggggaugaucgccggcuggcacggguacaccagccacggcgcccacggcguggccgucgccgcggaccugaaguccacccaggaggccaucaacaagaucacgaagaaccucaacagccuguccgagcuggaggugaagaaccuccagcgccugagcggggccauggacgagcugcacaacgagauccucgagcuggacgagaagguggacgaccugcgggccgacaccaucuccagccagaucgagcucgccguccugcuguccaacgagggcaucaucaacagcgaggacgagcaccuccuggcgcuggagcgcaagcucaagaagaugcuggggccguccgccguggagaucggcaacgggugcuucgagaccaagcacaagugcaaccagaccugccuggacaagaucgccgccggcaccuucgacgcgggcgaguucagccuccccacguucgacucccugaacaucaccgccgccagccugaacgacgacgggcuggacaaccacaccauccuccuguacuacuccaccgccgccagcucccuggcggugacgcucaugaucgccaucuucgucguguacauggugagccgggacaacgucuccugcagcaucugccugugaggacuagucccuguucccagagcccacuuuuuuuucuuuuuuugaaauaaaauagccugucuuucagaucucaaaggcucuuuucagagccaccaaaaaaaaaaaaaaaaaaaaaaaaaaaaaaaaaaaaaaaaaaaaaaaaaaaaaaaaaaaaaaaaaaaaaaaaaaaaaaaaaaaaaaaaaaaaaaaaaaaaa

SEQ ID NO: 14362 - RNA, 2024 nt, Artificial Sequence
  FLUBV/H0N0/B/Colorado/06/2017__EPI1051642 hemagglutinin mRNA gc (HA)
aggagagucccgcagucggcguccagcggcucugcuuguucgugugugugucguugcaggccuuauucaagcuuaccaugaaggccaucaucgugcugcucauggucgugaccagcuccgccgaccgcaucugcaccggcaucacgagcuccaacagcccccacguggucaagaccgcgacccagggggaggugaacgugaccggcgucaucccgcugacgaccacccccaccaagucccacuucgccaaccugaaggggacggagacccggggcaagcucugccccaagugccugaacugcaccgaccuggacguggcccucgggcgccccaagugcaccggcaagaucccgagcgcccggguguccauccugcacgagguccgccccgugacgagcggcugcuuccccaucaugcacgaccggaccaagauccgccagcugcccaaccuccugcggggguacgagcacgugcgccuguccacccacaacgucaucaacgccgagggcgcgcccgggggccccuacaagaucgggaccagcggcuccugccccaacaucacgaacggcaacggguucuucgccaccauggccugggccgugcccgacaagaacaagaccgcgaccaacccgcucacgaucgaggugcccuacgucugcaccgagggcgaggaccagaucaccguguggggguuccacagcgacaccgagacgcagauggccaagcuguacggcgacuccaagccccagaaguucaccagcuccgccaacggcgugaccacccacuacgucagccagaucgggggcuuccccaaccagacggaggacgggggccugccgcaguccgggcggaucgugguggacuacaugguccagaaguccggcaagaccggcaccaucaccuaccagcgcgggauccuccugccccagaagguguggugcgccagcggccggagcaaggugaucaaggggagccugccccucaucggcgaggccgacugccugcacgagaaguacgggggccugaacaaguccaagcccuacuacacgggcgagcacgcgaaggccaucgggaacugcccgaucugggucaagacgccccucaagcuggccaacggcaccaaguaccgcccgcccgccaagcugcucaaggagcggggguucuucggcgccaucgcgggguuccuggagggcggcugggaggggaugaucgccggcuggcacggguacaccagccacggcgcccacggcguggccgucgccgcggaccugaaguccacccaggaggccaucaacaagaucaccaagaaccucaacagccuguccgagcuggaggugaagaaccuccagcgccugagcggggccauggacgagcugcacaacgagauccucgagcuggacgagaagguggacgaccugcgggccgacaccaucuccagccagaucgagcucgccguccugcuguccaacgagggcaucaucaacagcgaggacgagcaccuccuggcgcuggagcgcaagcucaagaagaugcuggggccguccgccguggagaucggcaacgggugcuucgagaccaagcacaagugcaaccagaccugccuggacaagaucgccgccggcacguucgacgcgggcgaguucagccuccccaccuucgacucccugaacaucaccgccgccagccugaacgacgacgggcuggacaaccacaccauccuccuguacuacuccacggccgccagcucccuggcggugacccucaugaucgccaucuucgucguguacauggugagccgggacaacgucuccugcagcaucugccugugaggacuagucccuguucccagagcccacuuuuuuuucuuuuuuugaaauaaaauagccugucuuucagaucucaaaggcucuuuucagagccaccaaaaaaaaaaaaaaaaaaaaaaaaaaaaaaaaaaaaaaaaaaaaaaaaaaaaaaaaaaaaaaaaaaaaaaaaaaaaaaaaaaaaaaaaaaaaaaaaaaaaa

SEQ ID NO: 14363 - RNA, 2024 nt, Artificial Sequence
  FLUBV/H0N0/B/Colorado/06/2017 BX-71__EPI1151760 hemagglutinin mRNA gc (HA)
aggagagucccgcagucggcguccagcggcucugcuuguucgugugugugucguugcaggccuuauucaagcuuaccaugaaggccaucaucgugcugcucauggucgugaccagcuccgccgaccgcaucugcaccggcaucacgagcuccaacagcccccacguggucaagaccgcgacccagggggaggugaacgugaccggcgucaucccgcugacgaccacccccaccaagucccacuucgccaaccugaaggggacggagacccggggcaagcucugccccaagugccugaacugcaccgaccuggacguggcccucgggcgccccaagugcaccggcaagaucccgagcgcccggguguccauccugcacgagguccgccccgugacgagcggcugcuuccccaucaugcacgaccggaccaagauccgccagcugcccaaccuccugcggggguacgagcacgugcgccuguccacccacaacgucaucaacgccgagggcgcgcccgggggccccuacaagaucgggaccagcggcuccugccccaacaucacgaacggcaacggguucuucgccaccauggccugggccgugcccgacaagaacaagaccgcgaccaacccgcucacgaucgaggugcccuacgucugcaccgagggcgaggaccagaucaccguguggggguuccacagcgacaccgagacgcagauggccaagcuguacggcgacuccaagccccagaaguucaccagcuccgccaacggcgugaccacccacuacgucagccagaucgggggcuuccccaaccagacggaggacgggggccggccgcaguccgggcgcaucgugguggacuacaugguccagaaguccggcaagaccggcaccaucaccuaccagcgggggauccugcucccccagaagguguggugcgccagcggccgcagcaaggugaucaaggggagccugccccugaucggcgaggccgacugccuccacgagaaguacgggggccugaacaaguccaagcccuacuacacgggcgagcacgcgaaggccaucgggaacugcccgaucugggucaagacgccccugaagcucgccaacggcaccaaguaccggccgcccgccaagcugcugaaggagcgcggguucuucggcgccaucgcgggguuccucgagggcggcugggaggggaugaucgccggcuggcacggguacaccagccacggcgcccacggcguggccgucgccgcggaccugaaguccacccaggaggccaucaacaagaucaccaagaaccugaacagccucuccgagcuggaggugaagaaccugcagcggcucagcggggccauggacgagcugcacaacgagauccuggagcucgacgagaagguggacgaccugcgcgccgacaccaucuccagccagaucgagcuggccguccuccuguccaacgagggcaucaucaacagcgaggacgagcaccuccuggcgcuggagcggaagcugaagaagaugcucgggccguccgccguggagaucggcaacgggugcuucgagaccaagcacaagugcaaccagaccugccuggacaagaucgccgccggcacguucgacgcgggcgaguucagccugcccaccuucgacucccucaacaucaccgccgccagccugaacgacgacgggcuggacaaccacaccauccugcucuacuacuccacggccgccagcucccuggcggugacccugaugaucgccaucuucgucguguacauggugagccgcgacaacgucuccugcagcaucugccucugaggacuagucccuguucccagagcccacuuuuuuuucuuuuuuugaaauaaaauagccugucuuucagaucucaaaggcucuuuucagagccaccaaaaaaaaaaaaaaaaaaaaaaaaaaaaaaaaaaaaaaaaaaaaaaaaaaaaaaaaaaaaaaaaaaaaaaaaaaaaaaaaaaaaaaaaaaaaaaaaaaaaa

SEQ ID NO: 14364 - RNA, 2021 nt, Artificial Sequence
  FLUBV/H0N0/B/Washington/02/2019__EPI1368874 hemagglutinin mRNA gc (HA)
aggagagucccgcagucggcguccagcggcucugcuuguucgugugugugucguugcaggccuuauucaagcuuaccaugaaggccaucaucgugcugcucauggucgugaccagcaacgccgaccgcaucugcaccggcaucacguccagcaacagcccccacguggucaagaccgcgacccagggggaggugaacgugaccggcgucaucccgcugacgaccacccccaccaagagccacuucgccaaccugaaggggacggagacccggggcaagcucugccccaagugccugaacugcaccgaccuggacguggcccucgggcgccccaagugcaccggcaagaucccguccgcccgggugagcauccugcacgagguccgccccgugacguccggcugcuuccccaucaugcacgaccggaccaagauccgccagcugcccaaccuccugcggggguacgagcacgugcgccugagcacccacaacgucaucaacgccgaggacgcgccgggccggcccuacgagaucgggaccuccggcagcugccccaacaucacgaacgggaacggcuucuucgccaccauggccugggccgugcccaagaacaagaccgcgaccaacccgcucacgaucgaggugcccuacaucugcaccgagggcgaggaccagaucaccgucuggggguuccacuccgacaacgagacccagauggccaagcuguacggcgacagcaagccccagaaguucacguccagcgccaacggggugaccacccacuacgugucccagaucggcggcuuccccaaccagaccgaggacgggggccugccgcagagcgggcgcaucgucguggacuacauggugcagaaguccggcaagacggggaccaucaccuaccagcggggcauccuccugccccagaaggucuggugcgccagcggccgcuccaaggugaucaaggggagccugccccucaucggcgaggccgacugccugcacgagaaguacgggggccugaacaagagcaagcccuacuacaccggggagcacgcgaaggccaucggcaacugcccgaucugggugaagacgccccucaagcuggccaacggcaccaaguaccggccgcccgccaagcugcucaaggagcgcggguucuucggcgccaucgcgggguuccuggagggcgggugggagggcaugaucgccggcuggcacggguacaccucccacggcgcccacggggucgccguggccgcggaccugaaguccacccaggaggccaucaacaagaucacgaagaaccucaacucccugagcgagcuggaggucaagaaccuccagcggcuguccggcgccauggacgagcugcacaacgagauccucgagcuggacgagaagguggacgaccugcgcgccgacaccaucagcucccagaucgagcucgccgugcugcugagcaacgagggcaucaucaacuccgaggacgagcaccuccuggcgcuggagcggaagcucaagaagaugcuggggcccagcgccgucgagaucggcaacgggugcuucgagaccaagcacaagugcaaccagaccugccuggaccgcaucgccgccggcaccuucgacgcgggggaguucucccuccccacguucgacagccugaacaucaccgccgccucccugaacgacgacggccuggacaaccacaccauccuccuguacuacagcaccgccgccuccagccuggcggugacgcucaugaucgccaucuucguggucuacauggugucccgggacaacgugagcugcuccaucugccugugaggacuagucccuguucccagagcccacuuuuuuuucuuuuuuugaaauaaaauagccugucuuucagaucucaaaggcucuuuucagagccaccaaaaaaaaaaaaaaaaaaaaaaaaaaaaaaaaaaaaaaaaaaaaaaaaaaaaaaaaaaaaaaaaaaaaaaaaaaaaaaaaaaaaaaaaaaaaaaaaaaaaa

SEQ ID NO: 14365 - RNA, 2021 nt, Artificial Sequence
  FLUBV/H0N0/B/Washington/02/2019__EPI1422452 hemagglutinin mRNA gc (HA)
aggagagucccgcagucggcguccagcggcucugcuuguucgugugugugucguugcaggccuuauucaagcuuaccaugaaggccaucaucgugcugcucauggucgugaccagcaacgccgaccgcaucugcaccggcaucacguccagcaacagcccccacguggucaagaccgcgacccagggggaggugaacgugaccggcgucaucccgcugacgaccacccccaccaagagccacuucgccaaccugaaggggacggagacccggggcaagcucugccccaagugccugaacugcaccgaccuggacguggcccucgggcgccccaagugcaccggcaagaucccguccgcccgggugagcauccugcacgagguccgccccgugacguccggcugcuuccccaucaugcacgaccggaccaagauccgccagcugcccaaccuccugcggggguacgagcacgugcgccugagcacccacaacgucaucaacgccgaggacgcgccgggccggcccuacgagaucgggaccuccggcagcugccccaacaucacgaacgggaacggcuucuucgccaccauggccugggccgugcccaagaacaagaccgcgaccaacccgcucacgaucgaggugcccuacaucugcaccgagggcgaggaccagaucaccgucuggggguuccacuccgacagcgagacccagauggccaagcuguacggcgacuccaagccccagaaguucacgagcuccgccaacggggugaccacccacuacgugagccagaucggcggcuuccccaaccagaccgaggacgggggccugccgcaguccgggcgcaucgucguggacuacauggugcagaaguccggcaagacggggaccaucaccuaccagcggggcauccuccugccccagaaggucuggugcgccuccggccgcagcaaggugaucaaggggagccugccccucaucggcgaggccgacugccugcacgagaaguacgggggccugaacaaguccaagcccuacuacaccggggagcacgcgaaggccaucggcaacugcccgaucugggugaagacgccccucaagcuggccaacggcaccaaguaccggccgcccgccaagcugcucaaggagcgcggguucuucggcgccaucgcgggguuccuggagggcgggugggagggcaugaucgccggcuggcacggguacaccagccacggcgcccacggggucgccguggccgcggaccugaaguccacccaggaggccaucaacaagaucacgaagaaccucaacagccuguccgagcuggaggucaagaaccuccagcggcugagcggcgccauggacgagcugcacaacgagauccucgagcuggacgagaagguggacgaccugcgcgccgacaccaucuccagccagaucgagcucgccgugcugcuguccaacgagggcaucaucaacagcgaggacgagcaccuccuggcgcuggagcggaagcucaagaagaugcuggggcccuccgccgucgagaucggcaacgggugcuucgagaccaagcacaagugcaaccagaccugccuggaccgcaucgccgccggcaccuucgacgcgggggaguucagccuccccacguucgacucccugaacaucaccgccgccagccugaacgacgacggccuggacaaccacaccauccuccuguacuacuccaccgccgccagcucccuggcggugacgcucaugaucgccaucuucguggucuacauggugagccgggacaacguguccugcagcaucugccugugaggacuagucccuguucccagagcccacuuuuuuuucuuuuuuugaaauaaaauagccugucuuucagaucucaaaggcucuuuucagagccaccaaaaaaaaaaaaaaaaaaaaaaaaaaaaaaaaaaaaaaaaaaaaaaaaaaaaaaaaaaaaaaaaaaaaaaaaaaaaaaaaaaaaaaaaaaaaaaaaaaaaa

SEQ ID NO: 14366 - RNA, 1682 nt, Artificial Sequence
  FLUAV/H1N1/A/California/7/2009__GQ906802 neuraminidase mRNA gc (NA)
aggagagucccgcagucggcguccagcggcucugcuuguucgugugugugucguugcaggccuuauucaagcuuaccaugaaccccaaccagaagaucaucaccaucggcuccgugugcaugaccaucgggauggccaaccugauccuccagaucggcaacaucaucuccaucuggaucucccacuccauccagcuggggaaccagaaccagaucgagacgugcaaccaguccgucaucaccuacgagaacaacaccugggugaaccagaccuacgugaacaucuccaacacgaacuucgccgcgggccaguccgucguguccgugaagcuggccgggaacagcucccucugcccggucuccggcugggccaucuacuccaaggacaacuccgugcggaucggcuccaagggggacgucuucgugauccgcgagccguucaucuccugcuccccccuggagugccggaccuucuuccugacccagggcgcccuccugaacgacaagcacuccaacgggaccaucaaggaccgcucccccuaccggacgcugauguccugcccgaucggcgaggugcccucccccuacaacucccgcuucgaguccgucgccugguccgcguccgccugccacgacgggaucaacuggcucaccaucggcaucuccggccccgacaacggggccguggccgugcugaaguacaacggcaucaucaccgacaccaucaaguccuggcggaacaacauccugcgcacgcaggaguccgagugcgcgugcgucaacggguccugcuucaccgugaugaccgacggcccguccaacggccaggccuccuacaagaucuuccggaucgagaaggggaagaucgugaaguccgucgagaugaacgcccccaacuaccacuacgaggagugcuccugcuaccccgacuccuccgagaucaccugcgugugccgcgacaacuggcacggcuccaaccggcccuggguguccuucaaccagaaccucgaguaccagaucggguacaucugcuccggcaucuucggggacaacccgcgccccaacgacaagacgggcuccugcggccccgucuccagcaacggggccaacggcgugaagggguucuccuucaaguacggcaacgggguguggaucggccggaccaaguccaucuccucccgcaacggcuucgagaugaucugggaccccaacggguggaccggcaccgacaacaacuucuccaucaagcaggacaucgucgggaucaacgagugguccggcuacuccggguccuucgugcagcacccggagcugacgggccuggacugcauccggcccugcuucuggguggagcucauccgcggccggcccaaggagaacaccaucuggaccuccggguccuccaucuccuucugcggcgucaacuccgacaccguggggugguccuggcccgacggcgccgagcugccguucacgaucgacaagugaggacuagucccuguucccagagcccacuuuuuuuucuuuuuuugaaauaaaauagccugucuuucagaucucaaaggcucuuuucagagccaccaaaaaaaaaaaaaaaaaaaaaaaaaaaaaaaaaaaaaaaaaaaaaaaaaaaaaaaaaaaaaaaaaaaaaaaaaaaaaaaaaaaaaaaaaaaaaaaaaaaaa

SEQ ID NO: 14367 - RNA, 1682 nt, Artificial Sequence
  FLUAV/H1N1/A/Michigan/45/2015__EPI662593 neuraminidase mRNA gc (NA)
aggagagucccgcagucggcguccagcggcucugcuuguucgugugugugucguugcaggccuuauucaagcuuaccaugaaccccaaccagaagaucaucaccaucggcagcaucugcaugaccaucgggauggccaaccugauccuccagaucggcaacaucaucuccaucugggugagccacuccauccagaucgggaaccagagccagaucgagacgugcaaccaguccgucaucaccuacgagaacaacaccugggugaaccagaccuacgugaacaucagcaacacgaacuucgccgcgggccaguccgucgugagcgugaagcuggccgggaacuccagccugugcccggucuccggcugggccaucuacagcaaggacaacuccgugcgcaucggcagcaagggggacguguucgucauccgggagcccuucaucuccugcagcccccucgagugccgcaccuucuuccugacccagggcgcccugcucaacgacaagcacuccaacgggaccaucaaggaccggagccccuaccgcacgcugauguccugcccgaucggcgaggugcccagccccuacaacagccgguucgaguccguggccuggagcgcguccgccugccacgacgggaucaacuggcugaccaucggcaucagcggccccgacuccggggccgucgccgugcucaaguacaacggcaucaucaccgacaccaucaagagcuggcgcaacaacauccugcggacgcaggaguccgagugcgcgugcgugaacgggagcugcuucaccaucaugaccgacggcccguccgacggccaggccagcuacaagaucuuccgcaucgagaaggggaagaucaucaaguccgucgagaugaaggcccccaacuaccacuacgaggagugcagcugcuaccccgacuccagcgagaucacgugcgugugccgggacaacuggcacggcuccaaccgccccugggugagcuucaaccagaaccuggaguaccagaugggguacaucugcuccggcgucuucggggacaacccgcggcccaacgacaagaccggcagcugcggccccguguccagcaacggggccaacggcgugaagggguucagcuucaaguacggcaacggggucuggaucggccgcaccaaguccaucagcucccggaagggcuucgagaugaucugggaccccaacggguggaccggcaccgacaacaaguucagcaucaagcaggacaucguggggaucaacgagugguccggcuacagcggguccuucgugcagcacccggagcucacgggccuggacugcauccgccccugcuucugggucgagcugauccggggccgccccgaggagaacaccaucuggaccagcggguccagcaucuccuucugcggcgugaacagcgacaccgucgggugguccuggcccgacggcgccgagcucccguucacgaucgacaagugaggacuagucccuguucccagagcccacuuuuuuuucuuuuuuugaaauaaaauagccugucuuucagaucucaaaggcucuuuucagagccaccaaaaaaaaaaaaaaaaaaaaaaaaaaaaaaaaaaaaaaaaaaaaaaaaaaaaaaaaaaaaaaaaaaaaaaaaaaaaaaaaaaaaaaaaaaaaaaaaaaaaa

SEQ ID NO: 14368 - RNA, 1682 nt, Artificial Sequence
  FLUAV/H1N1/A/Netherlands/602/2009__AGU92703 neuraminidase mRNA gc (NA)
aggagagucccgcagucggcguccagcggcucugcuuguucgugugugugucguugcaggccuuauucaagcuuaccaugaaccccaaccagaagaucaucaccaucggcagcgugugcaugaccaucgggauggccaaccugauccuccagaucggcaacaucaucuccaucuggaucagccacuccauccagcuggggaaccagaaccagaucgagacgugcaaccagagcgucaucaccuacgagaacaacaccugggugaaccagaccuacgugaacaucuccaacacgaacuucgccgcgggccagagcgucguguccgugaagcuggccgggaacagcucccucugcccggucagcggcugggccaucuacuccaaggacaacagcgugcgggugggcuccaagggggacgucuucgugauccgcgagccguucaucagcugcuccccccuggagugccggaccuucuuccugacccagggcgcccuccugaacgacaagcacagcaacgggaccaucaaggaccgcucccccuaccggacgcugaugagcugcccgaucggcgaggugcccucccccuacaacagccgcuucgagagcgucgccugguccgcgagcgccugccacgacgggaucaacuggcucaccaucggcaucuccggccccgacaacggggccguggccgugcugaaguacaacggcaucaucaccgacaccaucaagagcuggcggaacaacauccugcgcacgcaggaguccgagugcgcgugcgucaacgggagcugcuucaccgugaugaccgacggcccguccaacggccaggccagcuacaagaucuuccggaucgagaaggggaagaucgugaaguccgucgagaugaacgcccccaacuaccacuacgaggagugcagcugcuaccccgacuccagcgagaucaccugcgugugccgcgacaacuggcacggcuccaaccggcccugggugagcuucaaccagaaccucgaguaccagaucggguacaucugcuccggcaucuucggggacaacccgcgccccaacgacaagacgggcagcugcggccccgucuccagcaacggggccaacggcgugaagggguucuccuucaaguacggcaacgggguguggaucggccggaccaagagcaucagcucccgcaacggcuucgagaugaucugggaccccaacggguggaccggcaccgacaacaacuucagcaucaagcaggacaucgucgggaucaacgagugguccggcuacagcggguccuucauccagcacccggagcugacgggccuggacugcauccggcccugcuucuggguggagcucauccgcggccggcccaaggagaacaccaucuggaccagcggguccagcaucuccuucugcggcgucaacagcgacaccguggggugguccuggcccgacggcgccgagcugccguucacgaucgacaagugaggacuagucccuguucccagagcccacuuuuuuuucuuuuuuugaaauaaaauagccugucuuucagaucucaaaggcucuuuucagagccaccaaaaaaaaaaaaaaaaaaaaaaaaaaaaaaaaaaaaaaaaaaaaaaaaaaaaaaaaaaaaaaaaaaaaaaaaaaaaaaaaaaaaaaaaaaaaaaaaaaaaa

SEQ ID NO: 14369 - RNA, 1682 nt, Artificial Sequence
  FLUAV/H3N2/A/Hong Kong/4801/2014__EPI578429 neuraminidase mRNA gc (NA)
aggagagucccgcagucggcguccagcggcucugcuuguucgugugugugucguugcaggccuuauucaagcuuaccaugaaccccaaccagaagaucaucaccaucggcuccgugucccugaccaucuccacgaucugcuucuucaugcagaucgccauccucaucaccaccgucacccugcacuucaagcaguacgaguucaacuccccgcccaacaaccaggugaugcugugcgagcccacgaucaucgagcgcaacaucaccgagaucguguaccucaccaacaccacgaucgagaaggagaucugccccaagccggccgaguaccggaacugguccaagccccagugcgggaucaccggcuucgcgcccuucuccaaggacaacuccauccgccuguccgccgggggcgacaucugggucacccgggagcccuacguguccugcgacccggacaagugcuaccaguucgcccuggggcagggcaccacgcucaacaacgugcacuccaacaacaccguccgcgaccggacccccuaccgcacccugcugaugaacgagcucggcgugcccuuccaccuggggacgaagcaggucugcaucgccugguccuccagcuccugccacgacggcaaggccuggcugcacgucugcaucaccggggacgacaagaacgcgaccgccuccuucaucuacaacggccggcucguggacuccguggucagcugguccaaggacauccugcgcacccaggaguccgagugcaucugcaucaacgggacgugcaccguggugaugaccgacggcuccgccuccggcaaggccgacaccaagauccuguucaucgaggaggggaagaucguccacacguccacccucuccggcuccgcgcagcacguggaggagugcuccugcuacccccgguacccgggggugcgcugcgucugccgggacaacuggaagggcuccaaccgcccgaucguggacaucaacaucaaggaccacuccaucgugagcuccuacgucugcuccggccuggugggggacaccccgcggaagaacgacuccagcuccagcucccacugccuggaccccaacaacgaggagggcgggcacggcgugaaggggugggccuucgacgacggcaacgacgucuggaugggccgcaccaucaacgagacgucccggcucggguacgagaccuucaaggugaucgagggcugguccaacccgaaguccaagcugcagaccaaccgccaggucaucguggaccggggcgaccgcuccggguacuccgggaucuucuccguggagggcaaguccugcaucaaccggugcuucuacgucgagcugauccgcggccggaaggaggagaccgaggugcucuggacgagcaacuccaucguggucuucugcgggaccagcggcaccuacgggaccggcuccuggcccgacggggccgaccugaaccugaugcccaucugaggacuagucccuguucccagagcccacuuuuuuuucuuuuuuugaaauaaaauagccugucuuucagaucucaaaggcucuuuucagagccaccaaaaaaaaaaaaaaaaaaaaaaaaaaaaaaaaaaaaaaaaaaaaaaaaaaaaaaaaaaaaaaaaaaaaaaaaaaaaaaaaaaaaaaaaaaaaaaaaaaaaa

SEQ ID NO: 14370 - RNA, 1673 nt, Artificial Sequence
  FLUBV/H0N0/B/Brisbane/60/2008__EPI173278 neuraminidase mRNA gc (NA)
aggagagucccgcagucggcguccagcggcucugcuuguucgugugugugucguugcaggccuuauucaagcuuaccaugcugcccagcaccauccagacccucacgcuguuccugaccuccggcggggugcuccugagccuguacgucuccgccagccucuccuaccugcuguacagcgacauccuccugaaguucuccccgaccgagaucaccgcccccacgaugccccuggacugcgcgaacgccagcaacgugcaggccgugaaccgcuccgccaccaagggcgucacccuccugcugcccgagccggaguggaccuacccccggcucagcugccccggguccacguuccagaaggcccugcugaucagcccccaccgcuucggcgagaccaaggggaacuccgcgccgcucaucauccgggagcccuucaucgccugcggccccaacgagugcaagcacuucgcccugacccacuacgccgcgcagcccggcggguacuacaacggcacccgcggggaccggaacaagcugcgccaccucaucagcgugaagcugggcaagaucccgacgguggagaacuccaucuuccacauggccgccuggagcggguccgccugccacgacggcaaggaguggaccuacaucggcgucgacgggcccgacaacaacgcccugcucaaggugaaguacggcgaggcguacaccgacaccuaccacagcuacgccaacaagauccugcggacgcaggaguccgccugcaacugcaucgggggcaacugcuaccugaugaucaccgacggcagcgccagcgggguguccgagugccgcuuccucaagauccgggagggccgcaucaucaaggagaucuuccccaccgggcgggucaagcacaccgaggagugcacgugcggcuucgccagcaacaagaccaucgagugcgcgugccgcgacaacuccuacaccgccaagcggcccuucgugaagcugaacguggagaccgacacggccgagauccgccugaugugcaccgacaccuaccucgacaccccgcggcccaacgacgggagcaucacgggccccugcgaguccaacggcgacaaggggagcggcgggaucaagggcggguucguccaccagcgcauggaguccaagaucggccggugguacagccgcaccauguccaagaccgagcggaugggcauggggcuguacgugaaguacgacggcgaccccugggccgacagcgacgcccuggcguucuccggggugauggucagcaugaaggagccgggcugguacuccuucggguucgagaucaaggacaagaagugcgacgugcccugcaucggcaucgagauggugcacgacggcgggaaggagaccuggcacagcgccgccacggccaucuacugccucaugggcuccgggcagcugcugugggacaccgucaccggcguggacauggcccucugaggacuagucccuguucccagagcccacuuuuuuuucuuuuuuugaaauaaaauagccugucuuucagaucucaaaggcucuuuucagagccaccaaaaaaaaaaaaaaaaaaaaaaaaaaaaaaaaaaaaaaaaaaaaaaaaaaaaaaaaaaaaaaaaaaaaaaaaaaaaaaaaaaaaaaaaaaaaaaaaaaaaa

SEQ ID NO: 14371 - RNA, 1673 nt, Artificial Sequence
  FLUBV/H0N0/B/Phuket/3073/2013__EPI540672 neuraminidase mRNA gc (NA)
aggagagucccgcagucggcguccagcggcucugcuuguucgugugugugucguugcaggccuuauucaagcuuaccaugcugcccagcaccauccagacccucacgcuguuccugaccuccggcggggugcuccugagccuguacgucuccgccagccucuccuaccugcuguacagcgacauccuccugaaguucucccgcaccgaggugaccgccccgaucaugccccuggacugcgcgaacgccagcaacgugcaggccgucaaccgguccgccacgaagggcgugacgccccuccugcccgagccggaguggaccuacccccgccugagcugccccggguccaccuuccagaaggcccuccugaucagcccccaccgguucggcgagaccaaggggaacuccgcgccgcugaucauccgcgagcccuucaucgccugcggccccaaggagugcaagcacuucgcccucacccacuacgccgcgcagcccggcggguacuacaacggcacccgggaggaccgcaacaagcugcggcaccugaucagcgugaagcucgggaagaucccgaccgucgagaacuccaucuuccacauggccgccuggagcggcuccgccugccacgacgggcgcgaguggacguacaucggcguggacggccccgacagcaacgcccugcugaagaucaaguacggggaggcguacaccgacaccuaccacuccuacgccaagaacauccuccggacccaggagagcgccugcaacugcaucggcggggacugcuaccugaugaucacggacggccccgccagcggcaucuccgagugccgcuuccugaagauccgggaggggcgcaucaucaaggagaucuuccccaccggccgggugaagcacaccgaggagugcacgugcggguucgccagcaacaagaccaucgagugcgcgugccgcgacaacuccuacaccgccaagcggccguucgucaagcucaacguggagaccgacaccgccgagauccgccugaugugcacgaagaccuaccuggacacgccccggcccaacgacggcagcaucaccgggcccugcgaguccgacggcgacgagggcagcgggggcaucaagggcggguucgugcaccagcgcauggccuccaagaucgggcggugguacagccgcaccauguccaagaccaagcggaugggcaugggccucuacgucaaguacgacggggacccguggaccgacagcgaggcccuggcgcuguccggcgugauggugagcauggaggagcccgggugguacuccuucggcuucgagaucaaggacaagaagugcgacguccccugcaucgggaucgagauggugcacgacggcggcaagaccacguggcacagcgccgccaccgccaucuacugccucaugggguccggccagcugcugugggacaccgugaccggggucaacaugacgcucugaggacuagucccuguucccagagcccacuuuuuuuucuuuuuuugaaauaaaauagccugucuuucagaucucaaaggcucuuuucagagccaccaaaaaaaaaaaaaaaaaaaaaaaaaaaaaaaaaaaaaaaaaaaaaaaaaaaaaaaaaaaaaaaaaaaaaaaaaaaaaaaaaaaaaaaaaaaaaaaaaaaaa

SEQ ID NO: 14372 - RNA, 1682 nt, Artificial Sequence
  FLUAV/H1N1/A/Brisbane/02/2018__EPI1212833 neuraminidase mRNA gc (NA)
aggagagucccgcagucggcguccagcggcucugcuuguucgugugugugucguugcaggccuuauucaagcuuaccaugaaccccaaccagaagaucaucaccaucggcagcacgugcaugaccaucgggauggccaaccugauccuccagaucggcaacaucaucuccaucugggugagccacuccauccagaucgggaaccagagccagaucgagaccugcaaccaguccgucaucaccuacgagaacaacaccugggugaaccagacguacgugaacaucagcaacaccaacuucgccgcgcgccaguccgucgccagcgugaagcuggccggcaacuccagccugugcccgguguccgggugggccaucuacagcaaggacaacuccguccggaucggcagcaagggcgacguguucgugauccgcgagcccuucaucuccugcagcccccucgagugccggaccuucuuccugacccagggggcccugcucaacgacaagcacuccaacggcacgaucaaggaccgcagccccuaccggacccugauguccugcccgaucggggagguccccagccccuacaacagccgcuucgaguccguggcguggagcgccuccgccugccacgacggcaccaacuggcugaccaucgggaucagcggccccgacuccggcgccguggcgguccucaaguacaacgggaucaucacggacaccaucaagagcuggcggaacaacauccugcgcacccaggaguccgagugcgccugcgugaacggcagcugcuucaccaucaugacggacgggccguccgacggccaggccagcuacaagaucuuccggaucgagaagggcaagaucaucaaguccguggagaugaaggcccccaacuaccacuacgaggagugcagcugcuaccccgacuccagcgagaucacgugcgucugccgcgacaacuggcacggguccaaccggcccugggugagcuucaaccagaaccuggaguaccagaugggcuacaucugcuccgggguguucggcgacaacccgcgccccaacgacaagaccgggagcugcggccccgucuccagcaacggcgccaacggggugaagggcuucagcuucaaguacgggaacggcguguggaucgggcggaccaaguccaucagcucccgcaagggcuucgagaugaucugggaccccaacggcuggaccgggaccgacaacaaguucagcaucaagcaggacaucgucggcaucaacgagugguccggguacagcggcuccuucgugcagcacccggagcucaccgggcuggacugcauccggcccugcuucuggguggagcugauccgcggccggcccgaggagaacaccaucuggacgagcggcuccagcaucuccuucugcggggucgacagcgacaccgugggcugguccuggcccgacggggcggagcucccguucaccaucgacaagugaggacuagucccuguucccagagcccacuuuuuuuucuuuuuuugaaauaaaauagccugucuuucagaucucaaaggcucuuuucagagccaccaaaaaaaaaaaaaaaaaaaaaaaaaaaaaaaaaaaaaaaaaaaaaaaaaaaaaaaaaaaaaaaaaaaaaaaaaaaaaaaaaaaaaaaaaaaaaaaaaaaaa

SEQ ID NO: 14373 - RNA, 1682 nt, Artificial Sequence
  FLUAV/H1N1/A/Guangdong-Maonan/SWL1536/2019__EPI1542569 neuraminidase mRNA gc (NA)
aggagagucccgcagucggcguccagcggcucugcuuguucgugugugugucguugcaggccuuauucaagcuuaccaugaaccccaaccagaagaucaucaccaucggcagcaucugcaugaccaucgggauggccaaccugauccuccagaucggcaacaucaucuccaucugggugagccacuccauccagaucgggaaccagagccagaucgagacgugcaacaagaacgucaucaccuacgagaacaacaccugggugaaccagaccuacgugaacaucuccaacacgaacagcgccgcgcgccaguccgucgccagcgugaagcuggccggcaacuccagccugugcccgguguccgggugggccaucuacagcaaggacaacuccguccggaucggcagcaagggcgacguguucgugauccgcgagcccuucaucuccugcagcccccucgagugccggaccuucuuccugacccagggggcccugcucaacgacaagcacuccaacggcaccaucaaggaccgcagccccuaccggacgcugauguccugcccgaucggggagguccccagccccuacaacagccgcuucgaguccguggcguggagcgccuccgccugccacgacggcaccaacuggcugaccaucgggaucagcggccccgacuccggcgccguggcgguccucaaguacaacgggaucaucaccgacacgaucaagagcuggcggaacaacauccugcgcacccaggaguccgagugcgccugcgugaacggcagcugcuucaccaucaugaccgacgggccguccgacggccaggccagcuacaagaucuuccggaucgagaagggcaagaucaucaaguccguggagaugaaggcccccaacuaccacuacgaggagugcagcugcuaccccgacuccagcgagaucacgugcgucugccgcgacaacuggcacggguccaaccggcccugggugagcuucaaccagaaccuggaguaccagaugggcuacaucugcuccgggguguucggcgacaacccgcgccccaacgacaagaccgggagcugcggccccgucuccagcaacggcgccaacggggugaagggcuucagcuucaaguacgggaacggcguguggaucgggcggaccaaguccaucagcucccgcaagggcuucgagaugaucugggaccccaacggcuggaccgggacggacaacaaguucagcaagaagcaggacaucgucggcaucaacgagugguccggguacagcggcuccuucgugcagcacccggagcucaccgggcugaacugcauccggcccugcuucuggguggagcugauccgcggccggcccgaggagaacaccaucuggaccagcggcuccagcaucuccuucugcggggucgacagcgacaucgugggcugguccuggcccgacggggcggagcucccguucacgaucgacaagugaggacuagucccuguucccagagcccacuuuuuuuucuuuuuuugaaauaaaauagccugucuuucagaucucaaaggcucuuuucagagccaccaaaaaaaaaaaaaaaaaaaaaaaaaaaaaaaaaaaaaaaaaaaaaaaaaaaaaaaaaaaaaaaaaaaaaaaaaaaaaaaaaaaaaaaaaaaaaaaaaaaaa

SEQ ID NO: 14374 - RNA, 1682 nt, Artificial Sequence
  FLUAV/H3N2/A/Singapore/INFIMH-16-0019/2016__EPI1047603 neuraminidase mRNA gc (NA)
aggagagucccgcagucggcguccagcggcucugcuuguucgugugugugucguugcaggccuuauucaagcuuaccaugaaccccaaccagaagaucaucaccaucggcagcgugucccugaccaucagcacgaucugcuucuucaugcagaucgccauccucaucaccaccgucacccugcacuucaagcaguacgaguucaacuccccgcccaacaaccaggugaugcugugcgagcccacgaucaucgagcgcaacaucaccgagaucguguaccucaccaacaccacgaucgagaaggagaucugccccaagccggccgaguaccggaacuggagcaagccccagugcgggaucaccggcuucgcgcccuucuccaaggacaacagcauccgccuguccgccgggggcgacaucugggucacccgggagcccuacgugagcugcgacccggacaagugcuaccaguucgcccuggggcagggcaccacgcucaacaacgugcacuccaacaacaccguccgcgaccggacccccuaccgcacccugcugaugaacgagcucggcgugcccuuccaccuggggacgaagcaggucugcaucgccuggagcuccagcuccugccacgacggcaaggccuggcugcacgugugcaucaccggggacgacaagaacgcgaccgccagcuucaucuacaacggccggcucaucgacuccguggugagcugguccaaggacauccugcgcacccaggagagcgagugcgucugcaucaacgggacgugcaccguggugaugaccgacggcaacgccaccggcaaggccgacacgaagauccuguucaucgaggaggggaagaucguccacaccuccaagcucagcggcagcgcgcagcacguggaggagugcuccugcuacccccgguacccgggggugcgcugcgucugccgggacaacuggaagggcagcaaccgccccaucguggacaucaacaucaaggaccacuccaucgugagcuccuacgucugcagcggccuggugggggacaccccgcggaagaacgacuccagcuccagcucccacugccugaaccccaacaacgaggagggcgggcacggcgugaaggggugggccuucgacgacggcaacgacgucuggaugggccgcaccaucaacgagacgagccggcucggguacgagaccuucaagguggucgagggcugguccaaccccaagagcaagcugcagaucaaccgccaggugaucguggaccgcggggaccgguccggcuacagcgggaucuucuccgucgagggcaagagcugcaucaaccggugcuucuacguggagcugauccgcggccggaaggaggagaccgaggugcucuggaccuccaacagcaucgucguguucugcgggacgagcggcaccuacgggaccggcuccuggcccgacggggccgaccugaaccugaugcacaucugaggacuagucccuguucccagagcccacuuuuuuuucuuuuuuugaaauaaaauagccugucuuucagaucucaaaggcucuuuucagagccaccaaaaaaaaaaaaaaaaaaaaaaaaaaaaaaaaaaaaaaaaaaaaaaaaaaaaaaaaaaaaaaaaaaaaaaaaaaaaaaaaaaaaaaaaaaaaaaaaaaaaa

SEQ ID NO: 14375 - RNA, 1682 nt, Artificial Sequence
  FLUAV/H3N2/A/Kansas/14/2017__EPI1146344 neuraminidase mRNA gc (NA)
aggagagucccgcagucggcguccagcggcucugcuuguucgugugugugucguugcaggccuuauucaagcuuaccaugaaccccaaccagaagaucaucaccaucggcagcgugucccugaccaucagcacgaucugcuucuucaugcagaucgccauccucaucaccaccgucacccugcacuucaagcaguacgaguucaacuccccgcccaacaaccaggugaugcugugcgagcccacgaucaucgagcgcaacaucaccgagaucguguaccucaccaacaccacgaucgagcgggagaucugccccaagccggccgaguaccgcaacuggagcaagccccagugcgggaucaccggcuucgcgcccuucuccaaggacaacagcauccggcuguccgccgggggcgacaucugggucacccgcgagcccuacgugagcugcgacccggacaagugcuaccaguucgcccuggggcagggcaccacgaucaacaacgugcacuccaacaacaccgcccgggaccgcaccccgcaccggacccuccugaugaacgagcugggcguccccuuccaccucgggacgaagcaggucugcaucgccuggagcuccagcuccugccacgacggcaaggcguggcugcacgugugcaucaccggggacgacaagaacgccaccgccagcuucaucuacaacggccgccugguggacuccguggugagcugguccaaggacauccuccggacccaggagagcgagugcgucugcaucaacgggacgugcaccguggugaugaccgacggcaacgccaccggcaaggcggacacgaagauccuguucaucgaggaggggaagaucguccacaccuccaagcugagcggcagcgcccagcacguggaggagugcuccugcuacccccgcuacccgggggugcggugcgucugccgcgacaacuggaagggcagcaaccggcccaucguggacaucaacaucaaggaccacuccaucgugagcuccuacgucugcagcggccucgugggggacacgccccgcaagaccgacuccagcuccagcucccacugccugaaccccaacaacgagaagggcgggcacggcgugaaggggugggccuucgacgacggcaacgacgucuggaugggccggaccaucaacgagaccagccgccugggguacgagaccuucaagguggucgagggcugguccaaccccaagagcaagcuccagaucaaccggcaggucaucguggaccgcggggaccgguccggcuacagcgggaucuucuccguggagggcaagagcugcaucaaccgcugcuucuacguggagcugauccggggccgcaaggaggagaccgaggugcuguggacguccaacagcaucgucguguucugcgggaccagcggcaccuacgggaccggcuccuggcccgacggggccgaccucaaccugaugcacaucugaggacuagucccuguucccagagcccacuuuuuuuucuuuuuuugaaauaaaauagccugucuuucagaucucaaaggcucuuuucagagccaccaaaaaaaaaaaaaaaaaaaaaaaaaaaaaaaaaaaaaaaaaaaaaaaaaaaaaaaaaaaaaaaaaaaaaaaaaaaaaaaaaaaaaaaaaaaaaaaaaaaaa

SEQ ID NO: 14376 - RNA, 1682 nt, Artificial Sequence
  FLUAV/H3N2/A/Kansas/14/2017-CDC-LV24A__EPI1444881 neuraminidase mRNA gc (NA)
aggagagucccgcagucggcguccagcggcucugcuuguucgugugugugucguugcaggccuuauucaagcuuaccaugaaccccaaccagaagaucaucaccaucggcagcgugucccugaccaucagcacgaucugcuucuucaugcagaucgccauccucaucaccaccgucacccugcacuucaagcaguacgaguucaacuccccgcccaacaaccaggugaugcugugcgagcccacgaucaucgagcgcaacaucaccgagaucguguaccucaccaacaccacgaucgagcgggagaucugccccaagccggccgaguaccgcaacuggagcaagccccagugcgggaucaccggcuucgcgcccuucuccaaggacaacagcauccggcuguccgccgggggcgacaucugggucacccgcgagcccuacgugagcugcgacccggacaagugcuaccaguucgcccuggggcagggcaccacgaucaacaacgugcacuccaacaacaccgcccgggaccgcacgccccaccggacccuccugaugaacgagcugggcguccccuuccaccucgggaccaagcaggucugcaucgccuggagcuccagcuccugccacgacggcaaggcguggcugcacgugugcaucaccggggacgacaagaacgccaccgccagcuucaucuacaacggccgccugguggacuccguggugagcugguccaaggacauccuccggacccaggagagcgagugcgucugcaucaacgggacgugcaccguggugaugaccgacggcaacgccaccggcaaggcggacacgaagauccuguucaucgaggaggggaagaucguccacaccuccaagcugagcggcagcgcccagcacguggaggagugcuccugcuacccccgcuacccgggggugcggugcgucugccgcgacaacuggaagggcagcaaccggcccaucguggacaucaacaucaaggaccacuccaucgugagcuccuacgucugcagcggccucgugggggacacgccccgcaagaccgacaacuccagcuccagccacugccugaaccccaacaacgagaagggcgggcacggcgugaaggggugggccuucgacgacggcaacgacgucuggaugggccggaccaucaacgagaccucccgccugggguacgagaccuucaagguggucgagggcuggagcaacccgaaguccaagcuccagaucaaccggcaggucaucguggaccgcggggaccggagcggcuacuccgggaucuucagcguggagggcaaguccugcaucaaccgcugcuucuacguggagcugauccggggccgcaaggaggagaccgaggugcuguggacgagcaacuccaucgucguguucugcgggaccagcggcaccuacgggaccggcagcuggcccgacggggccgaccucaaccugaugcacaucugaggacuagucccuguucccagagcccacuuuuuuuucuuuuuuugaaauaaaauagccugucuuucagaucucaaaggcucuuuucagagccaccaaaaaaaaaaaaaaaaaaaaaaaaaaaaaaaaaaaaaaaaaaaaaaaaaaaaaaaaaaaaaaaaaaaaaaaaaaaaaaaaaaaaaaaaaaaaaaaaaaaaa

SEQ ID NO: 14377 - RNA, 1682 nt, Artificial Sequence
  FLUAV/H3N2/A/Switzerland/8060/2017__EPI1154879 neuraminidase mRNA gc (NA)
aggagagucccgcagucggcguccagcggcucugcuuguucgugugugugucguugcaggccuuauucaagcuuaccaugaaccccaaccagaagaucaucaccaucggcagcgugucccugaccaucagcacgaucugcuucuucaugcagaucgccauccucaucaccaccgucacccugcacuucaagcaguacgaguucaacuccccgcccaacaaccaggugaugcugugcgagcccacgaucaucgagcgcaacaucaccgagaucguguaccucaccaacaccacgaucgagaaggagaucugccccaagccggccgaguaccggaacuggagcaagccccagugcgggaucaccggcuucgcgcccuucuccaaggacaacagcauccgccuguccgccgggggcgacaucugggucacccgggagcccuacgugagcugcgacccggacaagugcuaccaguucgcccuggggcagggcaccacgcucaacaacgugcacuccaacaacaccguccgcgaccggacccccuaccgcacccugcugaugaacgagcucggcgugcccuuccaccuggggacgaagcaggucugcauggccuggagcuccagcuccugccacgacggcaaggccuggcugcacgugugcgugaccggggacgacaagaacgcgaccgccagcuucaucuacaacggccggcucguggacuccgucgugagcugguccaaggacauccugcgcacccaggagagcgagugcgugugcaucaacgggacgugcaccgucgugaugaccgacggcaacgccaccggcaaggccgacacgaagauccuguucaucgaggaggggaagaucgugcacaccuccaagcucagcggcagcgcgcagcacgucgaggagugcuccugcuacccccgguacccgggggugcgcugcgugugccgggacaacuggaagggcagcaaccgccccaucgucgacaucaacaucaaggaccacuccaucgugagcuccuacgugugcagcggccuggucggggacacgccccggaaguccgacagcuccagcuccagccacugccugaaccccaacaacgaggagggcgggcacggcgugaaggggugggccuucgacgacggcaacgacgucuggaugggccgcaccaucaacgagaccucccggcucggguacgagaccuucaaggugguggagggcuggagcaacuccaagagcaagcugcagaucaaccgccaggucaucguggaccgcggggaccgguccggcuacagcgggaucuucuccguggagggcaagagcugcaucaaccggugcuucuacgucgagcugauccgcggccggaaggaggagaccgaggugcucuggaccagcaacuccaucguggucuucugcgggacgagcggcaccuacgggaccggcuccuggccggacggggccgaccugaaccugaugcacaucugaggacuagucccuguucccagagcccacuuuuuuuucuuuuuuugaaauaaaauagccugucuuucagaucucaaaggcucuuuucagagccaccaaaaaaaaaaaaaaaaaaaaaaaaaaaaaaaaaaaaaaaaaaaaaaaaaaaaaaaaaaaaaaaaaaaaaaaaaaaaaaaaaaaaaaaaaaaaaaaaaaaaa

SEQ ID NO: 14378 - RNA, 1682 nt, Artificial Sequence
  FLUAV/H3N2/A/Switzerland/8060/2017(H3N2)-CDC-LV21A__EPI1364258 neuraminidase mRNA gc (NA)
aggagagucccgcagucggcguccagcggcucugcuuguucgugugugugucguugcaggccuuauucaagcuuaccaugaaccccaaccagaagaucaucaccaucggcagcgugucccugaccaucagcacgaucugcuucuucaugcagaucgccauccucaucaccaccgucacccugcacuucaagcaguacgaguucaacuccccgcccaacaaccaggugaugcugugcgagcccacgaucaucgagcgcaacaucaccgagaucguguaccucaccaacaccacgaucgagaaggagaucugccccaagccggccgaguaccggaacuggagcaagccccagugcgggaucaccggcuucgcgcccuucuccaaggacaacagcauccgccuguccgccgggggcgacaucugggucacccgggagcccuacgugagcugcgacccggacaagugcuaccaguucgcccuggggcagggcaccacgcucaacaacgugcacuccaacaacaccguccgcgaccggacccccuaccgcacccugcugaugaacgagcucggcgugcccuuccaccuggggacgaagcaggucugcauggccuggagcuccagcuccugccacgacggcaaggccuggcugcacgugugcgugaccggggacgacaagaacgcgaccgccagcuucaucuacaacggccggcucguggacuccgucgugagcugguccaaggacauccugcgcacccaggagagcgagugcgugugcaucaacgggacgugcaccgucgugaugaccgacggcaacgccaccggcaaggccgacacgaagauccuguucaucgaggaggggaagaucgugcacaccuccaagcucagcggcagcgcgcagcacgucgaggagugcuccugcuacccccgguacccgggggugcgcugcgugugccgggacaacuggaagggcagcaaccgccccaucgucgacaucaacaucaaggaccacuccaucgugagcuccuacgugugcagccggcuggucggcgacacgccccgcaaguccgacagcuccagcuccagccacugccugaaccccaacaacgaggagggcgggcacggggugaagggcugggccuucgacgacgggaacgacgucuggaugggccggaccaucaacgagaccucccgccucggcuacgagaccuucaaggugguggagggguggagcaacuccaagagcaagcugcagaucaaccggcaggucaucguggaccgcggcgaccgguccggguacagcggcaucuucuccguggagggcaagagcugcaucaaccgcugcuucuacgucgagcugauccgggggcgcaaggaggagaccgaggugcucuggaccagcaacuccaucguggucuucugcggcacgagcgggaccuacggcaccggguccuggccggacggcgccgaccugaaccugaugcacaucugaggacuagucccuguucccagagcccacuuuuuuuucuuuuuuugaaauaaaauagccugucuuucagaucucaaaggcucuuuucagagccaccaaaaaaaaaaaaaaaaaaaaaaaaaaaaaaaaaaaaaaaaaaaaaaaaaaaaaaaaaaaaaaaaaaaaaaaaaaaaaaaaaaaaaaaaaaaaaaaaaaaaa

SEQ ID NO: 14379 - RNA, 1682 nt, Artificial Sequence
  FLUAV/H3N2/A/Hong Kong/2671/2019__EPI1543099 neuraminidase mRNA gc (NA)
aggagagucccgcagucggcguccagcggcucugcuuguucgugugugugucguugcaggccuuauucaagcuuaccaugaaccccaaccagaagaucaucaccaucggcagcgugucccugaccaucagcacgaucugcuucuucaugcagaucgccauccucaucaccaccgucacccugcacuucaagcaguacgaguucaacuccccgcccaacaaccaggugaugcugugcgagcccacgaucaucgagcgcaacaucaccgagaucguguaccucaccaacaccacgaucgagaaggagaucugccccaagccggccgaguaccggaacuggagcaagccccagugcgggaucaccggcuucgcgcccuucuccaaggacaacagcauccgccuguccgccgggggcgacaucugggucacccgggagcccuacgugagcugcgaccuggacaagugcuaccaguucgcccucgggcagggcaccacgcugaacaacgugcacuccaacaacaccguccgcgaccggaccccguaccgcacccugcucaugaacgagcugggcgugcccuuccaccuggggacgaagcaggucugcaucgccuggagcuccagcuccugccacgacggcaaggccuggcuccacgugugcaucaccggggacgacaagaacgcgaccgccagcuucaucuacaacggccggcugguggacuccguggucagcugguccaacgacauccugcgcacccaggagagcgagugcgugugcaucaacgggacgugcaccguggucaugaccgacggcaacgccaccggcaaggccgacacgaagauccucuucaucgaggaggggaagaucgugcacaccuccaagcugagcggcagcgcgcagcacguggaggagugcuccugcuacccccgguaccccgggguccgcugcgugugccgggacaacuggaagggcagcaaccgcccgaucaucgacaucaacaucaaggaccacuccaucgugagcuccuacgucugcagcggccuggugggggacacgccccggaaguccgacagcuccagcuccagccacugccucaaccccaacaacgaggagggcgggcacggcgugaaggggugggccuucgacgacggcaacgacgucuggaugggccgcaccaucaacgagaccucccggcugggguacgagaccuucaagguggucgagggcuggagcaaccccaaguccaagcugcagaucaaccgccaggugaucguggaccgcggggaccggagcggcuacuccgggaucuucagcgucgagggcaaguccugcaucaaccggugcuucuacguggagcucauccgcggccggaaggaggagaccgaggugcuguggaccagcaacagcaucgucguguucugcgggacguccggcaccuacgggaccggcagcuggccggacggggccgaccugaaccucaugcacaccugaggacuagucccuguucccagagcccacuuuuuuuucuuuuuuugaaauaaaauagccugucuuucagaucucaaaggcucuuuucagagccaccaaaaaaaaaaaaaaaaaaaaaaaaaaaaaaaaaaaaaaaaaaaaaaaaaaaaaaaaaaaaaaaaaaaaaaaaaaaaaaaaaaaaaaaaaaaaaaaaaaaaa

SEQ ID NO: 14380 - RNA, 1682 nt, Artificial Sequence
  FLUAV/H3N2/A/Hong Kong/45/2019__EPI1691929 neuraminidase mRNA gc (NA)
aggagagucccgcagucggcguccagcggcucugcuuguucgugugugugucguugcaggccuuauucaagcuuaccaugaaccccaaccagaagaucaucaccaucggcagcgugucccugaccaucagcacgaucugcuucuucaugcagaucgccauccucaucaccaccgucacccugcacuucaagcaguacgaguucaacucccugccgaacaaccaggugaugcucugcgagcccacgaucaucgagcgcaacaucaccgagaucguguaccugaccaacaccacgaucgagaaggagaucugccccaagcccgccgaguaccggaacuggagcaagccgcagugcgggaucaccggcuucgcgcccuucuccaaggacaacagcauccgccuguccgccgggggcgacaucugggucacccgggagcccuacgugagcugcgaccucgacaagugcuaccaguucgcccuggggcagggcaccacgcugaacaacgugcacuccaacaacaccguccgcgaccggacccccuaccgcacccuccugaugaacgagcugggcgugccguuccaccucgggacgaagcaggucugcaucgccuggagcuccagcuccugccacgacggcaaggccuggcugcacgugugcaucaccggggacgacaagaacgcgaccgccagcuucaucuacaacggccggcugguggacuccguggucagcugguccaacgacauccuccgcacccaggagagcgagugcgugugcaucaacgggacgugcaccguggucaugaccgacggcaacgccaccggcaaggccgacacgaagauccuguucaucgaggaggggaagaucgugcacaccuccaagcugagcggcagcgcgcagcacguggaggagugcuccugcuacccccgguaccccgggguccgcugcgugugccgggacaacuggaagggcagcaaccgccccaucaucgacaucaacaucaaggaccacuccaucgugagcuccuacgucugcagcggccucgugggggacaccccgcggaaguccgacagcuccagcuccagccacugccugaaccccaacaacgaggagggcgggcacggcgugaaggggugggccuucgacgacggcaacgacgucuggaugggccgcaccaucaacgagacgucccggcugggguacgagaccuucaagguggucgagggcuggagcaaccccaaguccaagcuccagaucaaccgccaggugaucguggaccgcggggaccggagcggcuacuccgggaucuucagcgucgagggcaaguccugcaucaaccggugcuucuacguggagcugauccgcggccggaaggaggagaccgaggugcuguggaccagcaacagcaucgucguguucugcgggacguccggcaccuacgggaccggcagcuggcccgacggggccgaccucaaccugaugcacaucugaggacuagucccuguucccagagcccacuuuuuuuucuuuuuuugaaauaaaauagccugucuuucagaucucaaaggcucuuuucagagccaccaaaaaaaaaaaaaaaaaaaaaaaaaaaaaaaaaaaaaaaaaaaaaaaaaaaaaaaaaaaaaaaaaaaaaaaaaaaaaaaaaaaaaaaaaaaaaaaaaaaaa

SEQ ID NO: 14381 - RNA, 1682 nt, Artificial Sequence
  FLUAV/H3N2/A/South Australia/34/2019__EPI1387330 neuraminidase mRNA gc (NA)
aggagagucccgcagucggcguccagcggcucugcuuguucgugugugugucguugcaggccuuauucaagcuuaccaugaaccccaaccagaagaucaucaccaucggcagcgugucccugaccaucagcacgaucugcuucuucaugcagaucgccauccucaucaccaccgucacccugcacuucaagcaguacgaguucaacuccccgcccaacaaccaggugaugcugugcgagcccacgaucaucgagcgcaacaucaccgagaucguguaccucaccaacaccacgaucgagaaggagaucugccccaagccggccgaguaccggaacuggagcaagccccagugcgggaucaccggcuucgcgcccuucuccaaggacaacagcauccgccuguccgccgggggcgacaucugggucacccgggagcccuacgugagcugcgaccuggacaagugcuaccaguucgcccucgggcagggcaccacgcugaacaacgugcacuccaacaacaccguccgcgaccggaccccguaccgcacccugcucaugaacgagcugggcgugcccuuccaccuggggacgaagcaggucugcaucgccuggagcuccagcuccugccacgacggcaaggccuggcuccacgugugcaucaccggggacgacaagaacgcgaccgccagcuucaucuacaacggccggcugguggacuccguggucagcugguccaacgacauccugcgcacccaggagagcgagugcgugugcaucaacgggacgugcaccguggucaugaccgacggcaacgccaccggcaaggccgacacgaagauccucuucaucgaggaggggaagaucgugcacaccuccaagcugagcggcagcgcgcagcacguggaggagugcuccugcuacccccgguaccccgggguccgcugcgugugccgggacaacuggaagggcagcaaccgcccgaucaucgacaucaacaucaaggaccacuccaucgugagccgguacgucugcuccggccuggugggggacacgccccgcaagagcgacuccagcuccagcucccacugccucaaccccaacaacgagaagggcgggcacggcgugaaggggugggccuucgacgacggcaacgacgucuggaugggccggaccaucaacgagaccagccgccugggguacgagaccuucaagguggucgagggcugguccaaccccaagagcaagcugcagaucaaccggcaggucaucguggaccgcggggaccgguccggcuacagcgggaucuucuccguggagggcaagagcugcaucaaccgcugcuucuacguggagcucauccggggccgcaaggaggagaccgaggugcuguggaccuccaacagcaucgucguguucugcgggacgagcggcaccuacgggaccggcuccuggccggacggggccgaccugaaccucaugcacaucugaggacuagucccuguucccagagcccacuuuuuuuucuuuuuuugaaauaaaauagccugucuuucagaucucaaaggcucuuuucagagccaccaaaaaaaaaaaaaaaaaaaaaaaaaaaaaaaaaaaaaaaaaaaaaaaaaaaaaaaaaaaaaaaaaaaaaaaaaaaaaaaaaaaaaaaaaaaaaaaaaaaaa

SEQ ID NO: 14382 - RNA, 1670 nt, Artificial Sequence
  FLUAV/H7N9/A/chicken/Zhejiang/C483/2013(H7N9)__AGN69396.1 neuraminidase mRNA gc (NA)
aggagagucccgcagucggcguccagcggcucugcuuguucgugugugugucguugcaggccuuauucaagcuuaccaugaaccccaaccagaagauccugugcaccagcgccaccgccaucaucaucggcgcgaucgccgugcucaucgggaucgccaaccugggccugaacaucgggcuccaccugaagccgggcugcaacugcucccacagccagcccgagacgaccaacaccucccagaccaucaucaacaacuacuacaacgagacgaacaucaccaacauccagauggaggagcgcaccagccggaacuucaacaaccugaccaaggggcucugcacgaucaacuccuggcacaucuacggcaaggacaacgccguccgcaucggcgagagcuccgacgugcuggugacccgggagcccuacgucagcugcgaccccgacgagugccgcuucuacgcccugucccaggggaccaccauccggggcaagcacagcaacgggacgauccacgaccgcucccaguaccgggcgcucaucagcuggccgcuguccagcccgcccaccguguacaacucccgcguggagugcaucggcuggagcuccaccagcugccacgacgggaagucccggaugagcaucugcaucagcggccccaacaacaacgccuccgccgucgugugguacaaccgccggcccguggccgagaucaacaccugggcgcgcaacauccugcggacgcaggagagcgagugcgucugccacaacggcgugugccccguggucuucaccgacggguccgccaccggccccgccgacacccgcaucuacuacuucaaggaggggaagauccucaagugggagagccugacgggcaccgccaagcacaucgaggagugcuccugcuacggcgagcggaccgggaucacgugcacgugccgcgacaacuggcagggcagcaaccggcccgugauccagaucgacccgguggccaugacccacaccucccaguacaucugcagccccguccugaccgacaacccccgccccaacgacccgaacaucgggaagugcaacgaccccuaccccggcaacaacaacaacggggugaagggcuucuccuaccucgacggcgcgaacaccuggcuggggcggaccaucagcaccgccucccgcagcggcuacgagaugcugaaggugcccaacgcccucaccgacgaccgguccaagccgauccaggggcagacgaucguccugaacgccgacuggagcggcuacuccgggagcuucauggacuacugggccgagggcgacugcuaccgcgcgugcuucuacguggagcugauccgcggccggcccaaggaggacaaggugugguggaccuccaacagcaucgucuccaugugcagcagcaccgaguuccucgggcaguggaacuggcccgacggcgccaagaucgaguacuuccugugaggacuagucccuguucccagagcccacuuuuuuuucuuuuuuugaaauaaaauagccugucuuucagaucucaaaggcucuuuucagagccaccaaaaaaaaaaaaaaaaaaaaaaaaaaaaaaaaaaaaaaaaaaaaaaaaaaaaaaaaaaaaaaaaaaaaaaaaaaaaaaaaaaaaaaaaaaaaaaaaaaaaa

SEQ ID NO: 14383 - RNA, 1685 nt, Artificial Sequence
  FLUAV/H10N8/A/Jiangxi/IPB13/2013(H10N8)__AHK10769.1 neuraminidase mRNA gc (NA)
aggagagucccgcagucggcguccagcggcucugcuuguucgugugugugucguugcaggccuuauucaagcuuaccaugaaccccaaccagaagaucaucaccaucggcagcgugucccuggggcucgucauccugaacauccugcuccacaucgugagcaucaccgugacgguccuggugcugccgggcaacgggaacaacgaguccugcaacgagaccgugauccgcgaguacaacgagaccguccggguggagaaggugacccaguggcacaacacgaacgucaucgaguacaucgagcgccccgagaacgaccacuucaugaacaacaccgaggcccucugcgacgccaagggcuucgcgcccuucagcaaggacaacgggauccggaucggcucccgcggccacguguucgugauccgggagcccuucgucagcugcuccccgaccgagugccgcaccuucuuccugacgcaggggagccugcucaacgacaagcacuccaacggcaccgugaaggaccggagccccuaccgcacccugauguccguggagaucgggcagagccccaacgucuaccaggcccgguucgaggccguggccugguccgccaccgcgugccacgacggcaagaaguggaugacgaucggggugaccggccccgacgccaaggccgucgccguggugcacuacggcgggaucccgaccgacgucaucaacagcugggcgggcgacauccugcgcacccaggaguccagcugcacgugcauccagggggagugcuucugggugaugaccgacggccccgccaaccggcaggcccaguaccgcgccuucaaggccaagcagggcaagaucguggggcaggcggagaucuccuucaacggcgggcacaucgaggagugcagcugcuaccccaacgagggcaaggucgagugcgugugccgggacaacuggaccgggaccaaccgccccguccucgugaucuccccggaccugagcuaccgggugggcuaccugugcgccggccuccccagcgacacgccccgcggggaggacucccaguucaccggcagcugcaccucccccauggggaaccagggcuacggggucaagggcuucggcuuccggcaggggaacgacguguggaugggccgcaccaucagccggacgucccgcagcggguucgagauccugaaggugcggaacggcuggguccagaacuccaaggagcagaucaagcgccaggugguggucgacaaccugaacuggagcggguacuccggcagcuucacccucccggccgagcugaccaagcgcaacugccuggugcccugcuucuggguggagaugauccggggcaaccccgaggagaagaccaucuggacguccagcuccagcaucgucaugugcgggguggaccacgagaucgccgacugguccuggcacgacggcgccauccuccccuucgacaucgacaagaugugaggacuagucccuguucccagagcccacuuuuuuuucuuuuuuugaaauaaaauagccugucuuucagaucucaaaggcucuuuucagagccaccaaaaaaaaaaaaaaaaaaaaaaaaaaaaaaaaaaaaaaaaaaaaaaaaaaaaaaaaaaaaaaaaaaaaaaaaaaaaaaaaaaaaaaaaaaaaaaaaaaaaa

SEQ ID NO: 14384 - RNA, 1673 nt, Artificial Sequence
  FLUBV/H0N0/B/Colorado/06/2017__EPI1001930 neuraminidase mRNA gc (NA)
aggagagucccgcagucggcguccagcggcucugcuuguucgugugugugucguugcaggccuuauucaagcuuaccaugcugcccagcaccauccagacccucacgcuguuccugaccuccggcggggugcuccugagccuguacgucuccgccagccucuccuaccugcuguacagcgacauccuccugaaguucuccccgaccgagaucaccgcccccacgaugccccuggacugcgcgaacgccagcaacgugcaggccgugaaccgcuccgccaccaagggcgucacccuccugcugcccgagccggaguggaccuacccccggcucagcugccccggguccacguuccagaaggcccugcugaucagcccccaccgcuucggcgagaccaaggggaacuccgcgccgcucaucauccgggagcccuucguggccugcggccccaacgagugcaagcacuucgcccugacccacuacgccgcgcagcccggcggguacuacaacggcacccgcggggaccggaacaagcugcgccaccucaucagcgugaagcugggcaagaucccgacggucgagaacuccaucuuccacauggccgccuggagcggguccgccugccacgacggcaaggaguggaccuacaucggcguggacgggcccgacaacaacgcccugcucaaggugaaguacggcgaggcguacaccgacaccuaccacagcuacgccaacaacauccugcggacgcaggaguccgccugcaacugcaucgggggcaacugcuaccugaugaucaccgacggcagcgccagcggggucuccgagugccgcuuccucaagauccgggagggccgcaucaucaaggagaucuuccccaccgggcgggugaagcacaccgaggagugcacgugcggcuucgccagcaacaagaccaucgagugcgcgugccgcgacaaccgguacaccgccaagcgccccuucgugaagcugaacgucgagaccgacacggccgagauccggcugaugugcaccgacaccuaccucgacaccccgcgccccaacgacggguccaucacgggccccugcgagagcgacggcgacaagggguccggcgggaucaagggcggguucgugcaccagcggaugaaguccaagaucggccgcugguacagccggaccaugagccagaccgagcgcaugggcauggggcuguacgugaaguacggcggggaccccugggccgacuccgacgcccuggcguucagcggcgucaugguguccaugaaggagccggggugguacagcuucggcuucgagaucaaggacaagaagugcgacgugcccugcaucggcaucgagaugguccacgacgggggcaaggagaccuggcacuccgccgccacggccaucuacugccucauggggagcggccagcugcugugggacaccgugaccggcguggacauggcccucugaggacuagucccuguucccagagcccacuuuuuuuucuuuuuuugaaauaaaauagccugucuuucagaucucaaaggcucuuuucagagccaccaaaaaaaaaaaaaaaaaaaaaaaaaaaaaaaaaaaaaaaaaaaaaaaaaaaaaaaaaaaaaaaaaaaaaaaaaaaaaaaaaaaaaaaaaaaaaaaaaaaaa

SEQ ID NO: 14385 - RNA, 1673 nt, Artificial Sequence
  FLUBV/H0N0/B/Washington/02/2019__EPI1368872 neuraminidase mRNA gc (NA)
aggagagucccgcagucggcguccagcggcucugcuuguucgugugugugucguugcaggccuuauucaagcuuaccaugcugcccagcaccauccagacccucacgcuguuccugaccuccggcggggugcuccugagccuguacgucuccgccagccucuccuaccugcuguacagcgacauccuccugaaguucuccccgaccgagaucaccgcccccacgaugccccuggacugcgcgaacgccagcaacgugcaggccgugaaccgcuccgccaccaagggcgucacccuccugcugcccgagccggaguggaccuacccccggcucagcugccccggguccacguuccagaaggcccugcugaucagcccccaccgcuucggcgagaccaaggggaacuccgcgccgcucaucauccgggagcccuucguggccugcggccccaacgagugcaagcacuucgcccugacccacuacgccgcgcagcccggcggguacuacaacggcacccgcggggaccggaacaagcugcgccaccucaucagcgugaagcugggcaagaucccgacggucgagaacuccaucuuccacauggccgccuggagcggguccgccugccacgacggcaaggaguggaccuacaucggcguggacgggcccgacaacaacgcccugcucaaggugaaguacggcgaggcguacaccgacaccuaccacagcuacgccaacaacauccugcggacgcaggaguccgccugcaacugcaucgggggcaacugcuaccugaugaucaccgacggcagcgccagcggggucuccgagugccgcuuccucaagauccgggagggccgcaucaucaaggagaucuuccccaccgggcgggugaagcacaccgaggagugcacgugcggcuucgccagcaacaagaccaucgagugcgcgugccgcgacaaccgguacaccgccaagcgccccuucgugaagcugaacgucgagaccgacacggccgagauccggcugaugugcaccgacaccuaccucgacaccccgcgccccaacgacggguccaucacgggccccugcgagagcgacggcgacaagggguccggcgggaucaagggcggguucgugcaccagcggaugaaguccaagaucggccgcugguacagccggaccaugagcaagaccgagcgcaugggcauggggcuguacgugaaguacggcggggaccccugggccgacuccgacgcccugaccuucagcggcgucaugguguccaugaaggagccggggugguacagcuucggcuucgagaucaaggacaagaagugcgacgugcccugcaucggcaucgagaugguccacgacgggggcaaggagacguggcacuccgcggccaccgccaucuacugccucauggggagcggccagcugcugugggacaccgugaccggcguggacauggcccucugaggacuagucccuguucccagagcccacuuuuuuuucuuuuuuugaaauaaaauagccugucuuucagaucucaaaggcucuuuucagagccaccaaaaaaaaaaaaaaaaaaaaaaaaaaaaaaaaaaaaaaaaaaaaaaaaaaaaaaaaaaaaaaaaaaaaaaaaaaaaaaaaaaaaaaaaaaaaaaaaaaaaa

SEQ ID NO: 14386 - RNA, 1973 nt, Artificial Sequence
  FLUAV/H1N1/A/California/7/2009__ACP41953 hemagglutinin mRNA human (HA)
aggagagucccgcagucggcguccagcggcucugcuuguucgugugugugucguugcaggccuuauucaagcuuaccaugaaggccauccuggugguccuccuuuacaccuucgcuacagcaaacgccgacacucugugcauuggcuaucacgcgaauaacagcacggauaccguugacacaguguuggagaagaauguaacugugacccauuccgucaacuuacuggaagauaagcacaaugggaaacuauguaagcucagaggaguggcuccccugcaucuugguaaaugcaacauagccggcuggauccuggggaauccugagugugaaucuuugucaacagcaaguagcugguccuacauuguugagaccccaucuucggacaacggaacuugcuauccgggcgauuuuaucgacuacgaggagcucagggagcagcugucaagcgugaguuccuucgaacgguuugagauuuuccccaagacaucuagcuggccuaaucacgauuccaacaagggugucaccgccgcuuguccacaugcaggggccaaaucauuuuauaagaaucugaucuggcucgugaaaaagggaaacaguuaccccaaauuaagcaagucuuauauaaaugacaagggcaaagaaguacugguucuuuggggcauccaccacccuuccacgucagcugaucaacagagcuuguaccagaacgccgacgcguacguguucgucgggaguucucgcuauuccaagaaauuuaagccagagauugcaauccgacccaaagugcgugaucaggagggaagaaugaauuacuauuggacucugguggaaccuggugacaagauuaccuucgaggccacaggcaaccuagucguuccaagguacgcuuuugccauggaacggaacgcagggagcggaaucauaauuucggauacuccggugcaugacugcaauaccacaugucaaacccccaaaggcgcuaucaacacgucucucccuuuccagaauauucacccaaucacuaucgguaagugccccaaguauguaaaauccacaaagcugcgccuugccaccgggcugagaaacauuccuucaauacagaguaggggauuguuuggcgcgaucgccggcuucauugaagggggauggacugguaugguggacggcugguacggguaucaucaccagaaugaacaaggaagcggcuacgcagcugaucucaaauccacacagaacgccaucgacgagauaaccaauaaggucaacucugugauugagaaaaugaauacgcaguuuaccgcuguugguaaggaguucaaccaccuggaaaagcggaucgaaaauuuaaacaaaaagguggaugacggguuccuggauaucuggacauacaaugccgagcuccuuguccuguuggaaaacgagcgcacucuagacuaucaugauagcaaugugaaaaaccuguacgagaagguacgaucacagcucaaaaacaaugcaaaggaaauuggcaacggauguuuugaguucuaucacaagugcgacaauaccuguauggaaaguguuaaaaacggcacauacgauuauccaaaguacuccgaggaagccaaacugaauagagaggagaucgacggggugaaacuugaaagcacuaggauuuaucaaauacuggcuaucuacucuaccgucgcgucaaguuuggugcucgucgugagccugggagcaauuuccuuuuggaugugcucuaacgguucguuacagugccggaucuguaucugaggacuagucccuguucccagagcccacuuuuuuuucuuuuuuugaaauaaaauagccugucuuucagaucucaaaggcucuuuucagagccaccaaaaaaaaaaaaaaaaaaaaaaaaaaaaaaaaaaaaaaaaaaaaaaaaaaaaaaaaaaaaaaaaaaaaaaaaaaaaaaaaaaaaaaaaaaaaaaaaaaaaa

SEQ ID NO: 14387 - RNA, 1973 nt, Artificial Sequence
  FLUAV/H1N1/A/Michigan/45/2015__EPI662594 hemagglutinin mRNA human (HA)
aggagagucccgcagucggcguccagcggcucugcuuguucgugugugugucguugcaggccuuauucaagcuuaccaugaaggccauccuggugguccuccuuuacaccuucacaacugcuaacgcagacacgcugugcauuggcuaucacgccaauaacagcaccgauacaguugacacuguguuggagaagaauguaaccgugacacauuccgucaacuuacuggaagauaagcacaaugggaaacuauguaagcucagaggaguggcgccccugcaucuugguaaaugcaacauagcuggcuggauccuggggaauccugagugugaaucuuugucaaccgccaguagcugguccuacauuguugagacuucuaacucggacaauggaacaugcuauccaggcgauuuuaucaacuacgaagaacucagggagcagcugucaagcgugaguuccuucgaacgguuugagauuuucccgaagaccucuagcuggcccaaucacgacuccaacaagggugucacggcagccuguccucaugcuggggcaaaaucauuuuauaagaaucugaucuggcucgugaaaaagggaaacaguuacccaaaauuaaaucaaagcuauauaaacgauaagggcaaggaaguacugguucuuuggggcauccaccaccccucuacuaccgccgaccagcaguccuuguaccagaacgcugaugccuacguguucgucgggacaucacgcuauagcaaaaaguuuaaaccugagauugcgacucgaccaaaggugcgugaccaagagggaagaaugaauuacuauuggacccugguggaacccggugauaaaaucacauucgaggcaaccggcaaccuagucguuccuagguacgccuuuacgauggaacggaaugcugggaguggaauuaucauaucugacacuccagugcaugauugcaacacaaccugucagacuccggagggcgccauuaauacaucccuccccuuccagaacauccacccuauuaccaucgguaagugcccaaaauauguaaagagcacgaagcugcgccuugcaaccgggcugagaaaugugcccucgauccagucuaggggauuguuuggcgcuauugccggcuucauagaagggggauggacagguauggucgacggcugguacggguaucaucaccaaaacgagcagggauccggcuacgcggccgaccucaaaucaacucagaaugcaaucgauaagauuaccaacaaagugaauaguguuaucgagaagaugaacacacaguuuacugcuguggguaaagaguucaaucaccuggagaagcggauagaaaacuuaaauaagaaagucgacgauggguuccuggacauuuggaccuacaacgccgagcuccuugugcuguuggaaaacgagcgcacacuagauuaucaugacagcaauguaaagaaccuguacgagaaaguucgaaaucaacucaagaacaaugcuaaagaaaucggcaacggauguuuugaguucuaucacaagugcgauaauaccuguauggaauccgugaagaacggcacuuacgacuauccuaaauacucugaggaagccaagcugaauagagagaaaaucgauggggucaaacuugagagcacgaggauuuaucagauccuggcaauuuacucaacaguggccaguuccuugguccucgugguuagccugggagcuauaucuuuuuggaugugcucaaacgguaguuuacagugccggaucuguauuugaggacuagucccuguucccagagcccacuuuuuuuucuuuuuuugaaauaaaauagccugucuuucagaucucaaaggcucuuuucagagccaccaaaaaaaaaaaaaaaaaaaaaaaaaaaaaaaaaaaaaaaaaaaaaaaaaaaaaaaaaaaaaaaaaaaaaaaaaaaaaaaaaaaaaaaaaaaaaaaaaaaaa

SEQ ID NO: 14388 - RNA, 1973 nt, Artificial Sequence
  FLUAV/H1N1/A/Netherlands/602/2009__ACQ45338 hemagglutinin mRNA human (HA)
aggagagucccgcagucggcguccagcggcucugcuuguucgugugugugucguugcaggccuuauucaagcuuaccaugaaggccauccuggugguccuccuuuacaccuucgcuacagcaaacgccgacacucugugcauuggcuaucacgcgaauaacagcacggauaccguugacacaguguuggagaaaaauguaacugugacccauuccgucaacuuacuggaagauaagcacaaugggaaacuauguaagcucagaggaguggcuccccugcaucuugguaaaugcaacauagccggcuggauccuggggaauccugagugugaaucuuugucaacagcaaguagcugguccuacauuguugagaccucuucgucagacaacggaacuugcuauccaggcgauuuuaucgacuacgaggagcucagggagcagcugagcaguguguccucuuucgaacgguuugagauuuucccgaagacaagcuccuggcccaaucacgauucaaacaagggugucaccgccgcuuguccucaugcaggggccaaaaguuuuuauaagaaucugaucuggcucgugaaaaagggaaacagcuacccaaaauuaucuaaguccuauauaaaugacaagggcaaagaaguacugguucuuuggggcauccaccaccccucaacgagcgcugaucaacagaguuuguaccagaacgccgacgcguacguguucgucgggucuucccgcuauagcaagaaauuuaagccugagauugcaauccgaccaaaagugcgugaucaggagggaagaaugaauuacuauuggacucugguggaacccggugacaagauuaccuucgaggccacaggcaaccuagucguuccuagguacgcuuuugccauggaacggaacgcagggucgggaaucauaauuucugauacuccagugcaugacugcaauaccacaugucaaaccccgaaaggcgcuaucaacacgucccuccccuuccagaauauucacccuaucacuaucgguaagugcccaaaguauguaaaaucaacaaagcugcgccuugccaccgggcugagaaacgugcccaguauucagagcaggggauuguuuggcgcgauagccggcuucaucgaagggggauggacugguauggucgacggcugguacggguaucaucaccagaaugaacaaggauccggcuacgcagcugaucucaaaucuacacagaacgccauugacgagaucaccaauaaggugaacagcguuauagagaaaaugaauacgcaguuuaccgcuguggguaaggaguucaaccaccuggaaaagcggauugaaaauuuaaacaaaaaggucgaugacggguuccuggauaucuggacauacaaugccgagcuccuugugcuguuggaaaacgagcgcacucuagacuaucaugauucaaauguaaagaaccuguacgagaagguucgaagucagcucaaaaacaaugcaaaggaaaucggcaacggauguuuugaguucuaucacaagugcgacaauaccuguauggaauccgugaaaaacggcacauacgauuauccuaaguacagcgaggaagccaaacugaauagagaggagauugacggggucaaacuugaaucuacuaggaucuaucaaauucuggcuauauacucaaccguggcgaguagcuugguccucgugguuucccugggagcaaucucuuuuuggaugugcucgaacgguagcuuacagugccggauuuguaucugaggacuagucccuguucccagagcccacuuuuuuuucuuuuuuugaaauaaaauagccugucuuucagaucucaaaggcucuuuucagagccaccaaaaaaaaaaaaaaaaaaaaaaaaaaaaaaaaaaaaaaaaaaaaaaaaaaaaaaaaaaaaaaaaaaaaaaaaaaaaaaaaaaaaaaaaaaaaaaaaaaaaa

SEQ ID NO: 14389 - RNA, 1973 nt, Artificial Sequence
  FLUAV/H3N2/A/Hong Kong/4801/2014__EPI643118 hemagglutinin mRNA human (HA)
aggagagucccgcagucggcguccagcggcucugcuuguucgugugugugucguugcaggccuuauucaagcuuaccaugaagaccaucauugcccugagcuacauacucugccuuguguucgcucagaaaauccccggcaacgacaauuccacagcaacucuguguuuggggcaccaugccgucccuaacggaacgauuguuaagaccaucacaaaugauagaauugaggugacuaacgcgaccgaauuaguacaaaauucuucaaucggugagauaugcgacaguccacaccagauccuggauggcgaaaacuguacacuaauugacgcucuccugggggauccgcagugcgacggauuucagaauaaaaagugggaucuuuucguggagaggagcaaagccuauuccaacuguuaccccuaugacgucccugauuacgcaucucugcggucguugguggccucaagcggcacccucgaauuuaauaacgagaguuucaauuggacugguguuacacaaaacgggaccuccucugcuugcauccgccgaagcuccucaaguuucuucagccgucugaauuggcugacgcaucucaacuauaaguacccagcauuaaaugugacuaugcccaacaacgagcaguuugacaagcuguauauuuggggaguccaccauccuggcaccgauaaagaccagaucuucccauacgcccagucuuccggcagaauaauugugucaacaaagaggagccaacaggcuguaauccccaauauugggagucggccucgcaucagagauaucccaucuaggauuuccauauacuggacuaucguuaaaccgggagacauucuuuugaucaacagcaccgguaaucugauagcgccccggggcuauuuuaagcuacgcucggggaaaucuuccauuaugcgaucagacgccccuaucggaaaguguaagagugaaugcaucacaccaaacggcagcauucccaaugauaaaccuuuccagaacgugaauagaaucaccuacggugcauguccaagguaugucaagcacuccacgcucaaacuggccacugggaugcggaacgugcccgagaagcagacacguggaauuuuuggcgcuauagccggcuucaucgaaaaugggugggagggaaugguggacgguugguacggcuuucgccaccaaaacucugaggggagaggacaggcagcugaucuuaaaagcacccaggccgcgauugaccaaaucaauggcaagcugaacagguugaucgguaaaacuaaugaaaaguuccaucagauugagaaggaauuuucagaggucgaagggcggauacaggaucucgagaaauauguugaggacacaaagaucgaucuguggaguuacaacgccgaauuacugguggcacucgagaaucagcacaccauugaccuuacggauuccgaaaugaacaaacuguuugagaagaccaaaaagcaauugcgagaaaacgcugaggacaugggcaauggaugcuucaagaucuaucauaaaugugauaacgccugcauuggcagcauccgcaaugggacauacgaccacaacguauacagagacgaggcucuaaauaacagguuucagauaaagggaguggaacugaaaucugguuauaaggauuggauccucuggauuucauucgccaucaguugcuuucugcuuugugucgcacuguugggcuucauuaugugggccugccagaaagggaauauccgguguaacauaugcauuugaggacuagucccuguucccagagcccacuuuuuuuucuuuuuuugaaauaaaauagccugucuuucagaucucaaaggcucuuuucagagccaccaaaaaaaaaaaaaaaaaaaaaaaaaaaaaaaaaaaaaaaaaaaaaaaaaaaaaaaaaaaaaaaaaaaaaaaaaaaaaaaaaaaaaaaaaaaaaaaaaaaaa

SEQ ID NO: 14390 - RNA, 2030 nt, Artificial Sequence
  FLUBV/H0N0/B/Brisbane/60/2008__FJ766840 hemagglutinin mRNA human (HA)
aggagagucccgcagucggcguccagcggcucugcuuguucgugugugugucguugcaggccuuauucaagcuuaccaugaaggccaucauugugcugcucauggucguuaccagcaacgcugacagaauaugcacaggcaucacuuccucuaauucaccccacgugguaaaaacggcaacccagggggaggugaacgucacaggagugauuccucuuacuaccacaccaaccaagagucauuucgccaaucugaaagguacugaaacaaggggcaaguuguguccgaaaugcuuaaacuguaccgaucuggacguugcgcuagggcggcccaagugcacgggaaagaucccuagcgcucgcguguccauucuccacgagguccgaccagugacuucuggcuguuuucccaucaugcaugaucguaccaaaauaagacaacugccuaaucuucugagggguuacgaacacauccgguugucgacacauaacguaauuaaugccgagaacgcaccagggggacccuauaagaucggcacuucaggcagcugcccuaauauuaccaacgggaauggauucuuugccacaauggcuugggcaguuccgaaaaacgacaagaauaaaaccgccacgaacccacucacuaucgaagugcccuacauauguacagagggugaggaucagauuaccgucuggggcuuccacagugacaaugaaacucagauggcuaagcuguauggggauuccaagccucagaaauuuacaucuagcgccaacggagugaccacgcacuacgugucccaaaucggcgguuucccaaaccagaccgaggacgggggacugccccagucaggccgcauugucguugauuauauggugcagaagaguggcaaaacagggacuaucaccuaccaaagaggaauccucuuaccucagaagguauggugcgcgagcgguaggucuaaagugauuaagggcucccugccacuuauaggggaagcagacuguuugcaugagaaauauggaggccugaauaagucaaagcccuacuacacaggugagcacgccaaagcuaucgggaacugcccgauuugggucaagacuccucuaaaacucgccaauggcaccaaguaucggcccccagcaaaacugcuuaaggaacgcggauuuuucggcgcuaucgccggguuucuggagggagguugggaaggcaugauagcgggguggcauggauacacaagccacggcgcccacgguguggcaguugcugccgauuugaagaguacccaggaggcuauuaacaaaaucacuaagaaucucaacucucuguccgaauuagaggugaaaaaucugcagcgacucagcggggccauggacgagcuucauaacgaaauccuggaguuggaugaaaaggucgacgaccuaagagcagauacgauuucgucucaaaucgagcuggccgugcuccuguccaaugaaggcauuauaaacucagaggacgagcaccuucuggcuuuggaaaggaaacucaagaagaugcugggaccuagugcgguagagaucggcaauggguguuucgaaacaaaacauaagugcaaccagaccugcuuagaucggauugcagccggaacuuuugacgcuggugaguucagccugcccaccuuugauucccuaaauaucacagccgcaucucucaacgacgauggccuggacaaucacaccauccuuuuguauuacagcacugccgcuucaagucuggccguuacacucaugauugcaauauucguggucuauauggugucccgugauaacgucagcuguucuaucugccugugaggacuagucccuguucccagagcccacuuuuuuuucuuuuuuugaaauaaaauagccugucuuucagaucucaaaggcucuuuucagagccaccaaaaaaaaaaaaaaaaaaaaaaaaaaaaaaaaaaaaaaaaaaaaaaaaaaaaaaaaaaaaaaaaaaaaaaaaaaaaaaaaaaaaaaaaaaaaaaaaaaaaa

SEQ ID NO: 14391 - RNA, 2027 nt, Artificial Sequence
  FLUBV/H0N0/B/Phuket/3073/2013__EPI540671 hemagglutinin mRNA human (HA)
aggagagucccgcagucggcguccagcggcucugcuuguucgugugugugucguugcaggccuuauucaagcuuaccaugaaggccaucauugugcugcucauggucguuaccagcaacgcugacagaauaugcacaggcaucacuuccucuaauucaccccacgugguaaaaacggcaacccagggggaagugaacgucacaggagugauuccucuuacuaccacaccaaccaagaguuacuucgccaaucugaaagguacuaggacacggggcaaguuguguccggauugcuuaaacuguaccgaccuggauguugcgcuagggcgccccaugugcgugggaacgacuccuagcgcuaaagccuccauccuccaugaaguccgaccagugaccucuggcuguuuucccauuaugcacgaccguacaaagaucagacaacugccuaaucuucugagggguuaugagaagauacgguugucgacucagaacguaaucgaugcagaaaaagccccagggggacccuaccgccucggcaccucaggcagcugcccuaaugcuacaaguaagauuggguucuuugcaaccauggccugggcuguuccaaaagacaacuauaagaaugccacgaacccgcugacuguggagguccccuacaucuguacagaaggagaggaucagauuaccgugugggguuuccauuccgacaauaaaacucagaugaagucucuguauggcgauagcaacccucaaaaguuuacauccucagcgaauggggugaccacgcacuacgucagucagaucggagacuucccagaucagaccgaggacggcggucucccccagagcgggagaauaguuguggauuauaugaugcaaaaaccuggaaagacaggcacuauuguauaccagaggggcguguuacugccacagaaagucuggugcgcaucugggcgguccaaggugaucaaaggaucacuucccuugauuggugaagccgacugucugcaugaggaauacggcgggcuaaacaagagcaaaccguauuacaccggaaagcacgcuaaggccaucggcaauugcccuaucuggguuaaaacaccccucaagcuggcaaacgguacuaaauaucgcccuccagcuaaacuucugaaggagcgaggguuuuucggcgccauugcgggauuuuuggagggcgggugggaaggaaugauagccgguuggcacggcuacaccagucauggggcacacggaguggcugucgccgcugaccucaagucuacacaggaggccaucaacaagauuaccaaaaaucugaacuccuuaagcgaacuggaggugaagaaucuccaaagacuuucgggcgcaauggaugaacugcauaacgagaucuuggagcuagacgaaaaaguagaugaccugagggccgauacuauaucuucccagauugagcucgcuguucugcuuucaaaugaagguaucaucaacagugaggacgaacaccuguuggcgcucgagcggaagcugaaaaagauguuagggcccagcgcaguggauauuggcaauggauguuucgagacgaagcacaaaugcaaccagacaugccuggaccguaucgccgcuggcaccuuuaaugccggggaguucucccuaccaacuuuugauucucucaacauuaccgcagccagccugaaugacgauggacuugacaaccauacaauauugcuguauuacucaaccgcugccaguucccucgcagucacucugaugcuugcgaucuucauuguguauauggucagccgcgacaaugugucuuguucaaucugccugugaggacuagucccuguucccagagcccacuuuuuuuucuuuuuuugaaauaaaauagccugucuuucagaucucaaaggcucuuuucagagccaccaaaaaaaaaaaaaaaaaaaaaaaaaaaaaaaaaaaaaaaaaaaaaaaaaaaaaaaaaaaaaaaaaaaaaaaaaaaaaaaaaaaaaaaaaaaaaaaaaaaaa

SEQ ID NO: 14392 - RNA, 1967 nt, Artificial Sequence
  FLUAV/H1N1/A/Brisbane/02/2018__EPI1212834 hemagglutinin mRNA human (HA)
aggagagucccgcagucggcguccagcggcucugcuuguucgugugugugucguugcaggccuuauucaagcuuaccaugaaggccauccuggugguccuccuuuacaccuucacaacugcuaacgcagacacgcugugcauuggcuaucacgccaauaacagcaccgauacaguugacacuguguuggagaagaauguaaccgugacacauuccgucaacuuacuggaagauaagcacaaugggaaacuauguaagcucggagguguggcgccccugcaucuuggcaaaugcaacauagcuggguggauccugggaaauccugagugugaaucuuugucaaccgccagaaguuggagcuacauuguugagacuuccaacucugacaauggcacaugcuauccaggugauuuuaucaacuacgaagaacucagggagcagcugucgucagugagcaguuucgaacgguuugagauuuucccgaagaccuccucuuggcccaaucacgacagcaacaagggggucacggcagccuguccucaugcuggagcaaaauccuuuuauaagaaucugaucuggcucgugaaaaagggcaacucauacccaaaauuaaaucaaacuuauauaaacgauaagggcaaggaaguacugguucuuugggggauccaccaucccccuaccacagccgaccagcagaguuuguaccagaacgcugaugccuacguguucgucggaacuagccgcuauucuaaaaaguuuaaaccagagauugcgacccgacccaaggugcgugacagagaggguaggaugaauuacuauuggacacugguggaaccuggcgauaaaaucaccuucgaggcaacggggaaccuagucguuccacgguacgccuuuacuauggaacgcaaugcuggauccggcauuaucauaucagacacaccggugcacgauugcaacaccacuugucaaacagccgagggugcaauuaauaccagccuccccuuccagaacguacacccugugacgaucgggaagugcccaaaauaugucaagaguaccaagcugagacuugcuacaggacugaggaaugugcccucuauucagucccggggcuuguuuggcgccaucgcgggguucaucgaaggagguuggacuggcaugguugacgggugguacggauaucaucaccagaacgagcaaggcagcgguuacgccgcagaccucaaaucgaaugcuauugauaagauaaccaacaaagucaauucugugaucgagaagaugaacacacaguuuacugccguggggaaagaguucaaucaccuggagaagcgcauugaaaacuuaaauaagaaaguagacgauggcuuccuggacaucuggaccuacaacgcugagcuccuuguucuguuggaaaacgagcgaacacuagauuaucaugacuccaaugugaagaaccuguacgagaaagucagaaaucagcucaagaacaaugccaaagaaauaggaaacggcuguuuugaguucuaucacaagugcgauaauaccuguauggaaucagugaagaacgggacuuacgacuauccuaaauacagugaggaagcaaagcugaauagggagaaaauugauggagucaaacuugagagcacgcggaucuaucagauccuggccauuuacuccacaguggcuucuagcuugguucucgugguaucacugggugcgaucaguuuuuggaugugcuccaacggcagcuuacaaugccguauuuguauaugaggacuagucccuguucccagagcccacuuuuuuuucuuuuuuugaaauaaaauagccugucuuucagaucucaaaggcucuuuucagagccaccaaaaaaaaaaaaaaaaaaaaaaaaaaaaaaaaaaaaaaaaaaaaaaaaaaaaaaaaaaaaaaaaaaaaaaaaaaaaaaaaaaaaaaaaaaaaaaaaaaaaa

SEQ ID NO: 14393 - RNA, 1967 nt, Artificial Sequence
  FLUAV/H1N1/A/Brisbane/02/2018__EPI1671767 hemagglutinin mRNA human (HA)
aggagagucccgcagucggcguccagcggcucugcuuguucgugugugugucguugcaggccuuauucaagcuuaccaugaaggccauccuggugguccuccuuuacaccuucacaacugcuaacgcagacacgcugugcauuggcuaucacgccaauaacagcaccgauacaguugacacuguguuggagaagaauguaaccgugacacauuccgucaacuuacuggaagauaagcacaaugggaaacuauguaagcucggagguguggcgccccugcaucuuggcaaaugcaacauagcuggguggauccugggaaauccugagugugaaucuuugucaaccgccagaaguuggagcuacauuguugagacuuccaacucugacaauggcacaugcuauccaggugauuuuaucaacuacgaagaacucagggagcagcugucgucagugagcaguuucgaacgguuugagauuuucccgaagaccuccucuuggcccaaucacgacagcaacaagggggucacggcagccuguccucaugcuggagcaaaauccuuuuauaagaaucugaucuggcucgugaaaaagggcaacucauacccaaaauuaaaucaaacuuauauaaacgauaagggcaaggaaguacugguucuuugggggauccaccaucccccuaccacagccgaccagcagaguuuguaccagaacgcugaugccuacguguucgucggaacuagccgcuauucuaaaaaguuuaaaccagagauugcgacccgacccaaggugcgugaccaagaggguagaaugaauuacuauuggacacugguggaaccuggcgauaaaaucaccuucgaggcaacggggaaccuagucguuccaagguacgccuuuacuauggaacggaaugcuggauccggcauuaucauaucagacacaccggugcacgauugcaacaccacuugucagacagccgagggugcaauuaauaccagccuccccuuccagaacguacacccugugacgaucgggaagugcccaaaauaugucaagaguaccaagcugcgccuugcuacaggacugagaaaugugcccucuauucaguccaggggcuuguuuggcgccaucgcgggguucaucgaaggagguuggacuggcaugguugacgggugguacggauaucaucaccaaaacgagcagggcagcgguuacgccgcagaccucaaaucgaaugcuauugauaagauaaccaacaaagucaauucugugaucgagaagaugaacacacaguuuacugccguggggaaagaguucaaucaccuggagaagcggauugaaaacuuaaauaagaaaguagacgauggcuuccuggacaucuggaccuacaacgcugagcuccuuguucuguuggaaaacgagcgcacacuagauuaucaugacuccaaugugaagaaccuguacgagaaaguccgaaaucagcucaagaacaaugccaaagaaauaggaaacggcuguuuugaguucuaucacaagugcgauaauaccuguauggaaucagugaagaacgggacuuacgacuauccuaaauacagugaggaagcaaagcugaauagagagaaaauugauggagucaaacuugagagcacgaggaucuaucaaauccuggccauuuacuccacaguggcuucuagcuugguucucgugguaucacugggugcgaucaguuuuuggaugugcuccaacggcagcuuacagugccggauuuguauaugaggacuagucccuguucccagagcccacuuuuuuuucuuuuuuugaaauaaaauagccugucuuucagaucucaaaggcucuuuucagagccaccaaaaaaaaaaaaaaaaaaaaaaaaaaaaaaaaaaaaaaaaaaaaaaaaaaaaaaaaaaaaaaaaaaaaaaaaaaaaaaaaaaaaaaaaaaaaaaaaaaaaa

SEQ ID NO: 14394 - RNA, 1967 nt, Artificial Sequence
  FLUAV/H1N1/A/Guangdong-Maonan/SWL1536/2019__EPI1542570 hemagglutinin mRNA human (HA)
aggagagucccgcagucggcguccagcggcucugcuuguucgugugugugucguugcaggccuuauucaagcuuaccaugaaggccauccuggugguccuccuuuacaccuucacaacugcuaacgcagacacgcugugcauuggcuaucacgccaauaacagcaccgauacaguugacacuguguuggagaagaauguaaccgugacacauuccgucaacuuacuggaagauaagcacaaugggaaacuauguaagcucagaggaguggcgccccugcaucuugguaaaugcaacauagcuggcuggauccuggggaauccugagugugaaucuuugucaaccgccaggaguuggagcuacauuguugagacuuccaacucugacaauggaacaugcuauccaggcgauuuuaucaacuacgaggagcuccgggagcagcugucgucagugagcaguuucgaacgcuuugagauuuucccgaagaccuccucuuggcccaaucacgacagcgauaagggugucacggcagccuguccucaugcuggggcaaaauccuuuuauaagaaccugaucuggcucgugaaaaagggaaauucauacccaaaauuaaaccaaacuuauauaaaugacaagggcaaggaaguacugguucuuuggggcauccaccaucccccuaccauugccgcucaggagaguuuguaccagaacgccgaugcguacguguucgucgggacaagccgauauucuaaaaaguuuaaaccagagaucgcaacucgucccaaggugagagaccaggaaggaaggaugaacuacuauuggacccugguggagccuggugauaaaauuacauucgaagccaccggcaaucuagucguuccacgguacgcuuuuacgauggagcgcgacgccggguccggaaucauaauuucagauacuccggugcacgacugcaacacaaccugucaaacucccgaaggcgcaaucaauacaagccucccuuuccagaacguacacccaauuaccaucgguaagugccccaaauaugugaagaguacgaagcugagacuugcuaccgggcugaggaaugucccuucuauccagucccggggauuguuuggcgccauugcgggcuucauagaagggggauggacagguaugguggacggcugguacggguaucaucaccagaacgagcaaggaagcggcuacgccgcagaucucaaaucgaaugcuaucgacaagauuacuaacaaaguuaauucugugaucgaaaagaugaacacccaguuuacagccgucgguaaagaguucaaucaccuggaaaagcgcauagagaacuuaaauaagaaaguggaugacggguuccuggauauuuggacuuacaacgcugaacuccuuguacuguuggagaaugagcgaacccuagacuaucaugauuccaacguuaagaaccuguacgaaaaagugagaaaucagcucaagaacaaugccaaagagaucggcaacggauguuuugaguucuaucacaagugcgacaauacauguauggaaucagucaagaacggcaccuacgauuauccaaaauacagugaagaggcaaagcugaauagggagaaaaucgacggggugaaacuugaaagcacucggauuuaucagauccuggccauuuacuccacggucgcuucuagcuuggugcucguugugucacugggagcgauaaguuuuuggaugugcuccaacgguagcuuacaaugccguaucuguauuugaggacuagucccuguucccagagcccacuuuuuuuucuuuuuuugaaauaaaauagccugucuuucagaucucaaaggcucuuuucagagccaccaaaaaaaaaaaaaaaaaaaaaaaaaaaaaaaaaaaaaaaaaaaaaaaaaaaaaaaaaaaaaaaaaaaaaaaaaaaaaaaaaaaaaaaaaaaaaaaaaaaaa

SEQ ID NO: 14395 - RNA, 1967 nt, Artificial Sequence
  FLUAV/H1N1/A/Guangdong-Maonan/SWL1536/2019__EPI1590725 hemagglutinin mRNA human (HA)
aggagagucccgcagucggcguccagcggcucugcuuguucgugugugugucguugcaggccuuauucaagcuuaccaugaaggccauccuggugguccuccuuuacaccuucacaacugcuaacgcagacacgcugugcauuggcuaucacgccaauaacagcaccgauacaguugacacuguguuggagaagaauguaaccgugacacauuccgucaacuuacuggaagauaagcacaaugggaaacuauguaagcucagaggaguggcgccccugcaucuugguaaaugcaacauagcuggcuggauccuggggaauccugagugugaaucuuugucaaccgccaggaguuggagcuacauuguugagacuuccaacucugacaauggaacaugcuauccaggcgauuuuaucaacuacgaggagcuccgggagcagcugucgucagugagcaguuucgaacgcuuugagauuuucccgaagaccuccucuuggcccaaucacgacagcgauaagggugucacggcagccuguccucaugcuggggcaaaauccuuuuauaagaaccugaucuggcucgugaaaaagggaaauucauacccaaaauuaaaccaaacuuauauaaaugacaagggcaaggaaguacugguucuuuggggcauccaccaucccccuaccauugccgugcaggagaguuuguaccagaacgcugaugccuacgucuucguggggacaagccgauauucuaaaaaguuuaaaccagagaucgcgacucgucccaaggugagagaccaggaaggaaggaugaacuacuauuggacccuggucgagccuggugauaaaauuacauucgaagcaaccggcaaucuaguugugccacgguacgccuuuacgauggagcgcgacgcuggguccggaaucauaauuucagauacuccgguacacgacugcaacacaaccugucaaacucccgaaggcgccaucaauacaagccucccuuuccagaacgugcacccaauuaccaucgguaagugccccaaauaugucaagaguacgaagcugagacuugcaaccgggcugaggaaugugccuucuauccagucccggggauuguuuggcgcuauugccggcuucauagaagggggauggacagguaugguugacggcugguacggguaucaucaccagaacgagcaaggaagcggcuacgcggccgaucucaaaucgaaugcaaucgacaagauuacuaacaaagucaauucugugaucgaaaagaugaacacccaguuuacagcuguggguaaagaguucaaucaccuggaaaagcgcauagagaacuuaaauaagaaaguagaugacggguuccuggauauuuggacuuacaacgccgaacuccuuguucuguuggagaaugagcgaacccuagacuaucaugauuccaacgugaagaaccuguacgaaaaagucagaaaucagcucaagaacaaugcuaaagagaucggcaacggauguuuugaguucuaucacaagugcgacaauacauguauggaaucagugaagaacggcaccuacgauuauccaaaauacagugaagaggccaagcugaauagggagaaaaucgacggggucaaacuugaaagcacucggauuuaucagauccuggcaauuuacuccacgguggccucuagcuugguucucgugguaucacugggagcuauaaguuuuuggaugugcuccaacgguagcuuacaaugccguaucuguauuugaggacuagucccuguucccagagcccacuuuuuuuucuuuuuuugaaauaaaauagccugucuuucagaucucaaaggcucuuuucagagccaccaaaaaaaaaaaaaaaaaaaaaaaaaaaaaaaaaaaaaaaaaaaaaaaaaaaaaaaaaaaaaaaaaaaaaaaaaaaaaaaaaaaaaaaaaaaaaaaaaaaaa

SEQ ID NO: 14396 - RNA, 1973 nt, Artificial Sequence
  FLUAV/H3N2/A/Singapore/INFIMH-16-0019/2016__EPI1106227 hemagglutinin mRNA human (HA)
aggagagucccgcagucggcguccagcggcucugcuuguucgugugugugucguugcaggccuuauucaagcuuaccaugaagaccaucauugcccugagcuacauacucugccuuguguucgcucagaaaauccccggcaacgacaauuccacagcaacucuguguuuggggcaccaugccgucccuaacggaacgauuguuaagaccaucacaaaugauagaauugaggugacuaacgcgaccgaauuaguacaaaauucuucaaucggugagauaugcgacaguccacaccagauccuggauggcgaaaacuguacacuaauugacgcucuccugggggauccgcagugcgacggauuucagaauaaaaagugggaucuuuucguggagaggagcaaagccuauuccaacuguuaccccuaugacgucccugauuacgcaucucugcggucguugguggccucaagcggcacccucgaauuuaagaaugagaguuucaacuggacugguguuacacaaaaugggaccuccucugcuugcauccgcggaagcuccucaaguuucuucagccgacugaacuggcugacgcaucucaauuauacuuacccagcauuaaacgugaccaugcccaauaaggagcaguuugacaaacuguauauuuggggcguccaccauccuggcacagauaaggaccagaucuuccuuuacgcccagucuuccgggcguauaacugugucaaccaaaagaagccaacaggcuguaauuccaaacaucggaaguaggccccggauucgcgauaucccuucuagaaucuccauuuacuggacaauaguuaagccaggugacaucuugcugauuaacagcaccggcaaucuaaucgccccgaggggguauuuuaaaauacggucgggaaagucuuccauuaugcgcucagacgcgcccaucggcaaguguaaaagugaaugcaucacgccuaacgguagcauuccaaaugauaagcccuuccagaacgugaaucgaaucacuuacggggcauguccuagauaugucaaacacuccacacucaagcuggccaccggaaugaggaacgugccagagaaacagacucggggcauuuuuggcgcuauagccggguucaucgaaaauggaugggaggguaugguggacggcugguacggguuucgucaccaaaacucugagggacgcggccaggcagcugaucuuaagagcacacaggccgcgauugaccaaaucaaugguaaacugaacagauugaucgggaagaccaaugaaaaguuccaucagauugagaaagaauuuucagaggucgaaggcaggguucaggaucucgagaaguauguggaggacacgaaaauagaucuguggaguuacaacgccgaauuacugguagcacucgagaaucagcacaccaucgaccuuacagauuccgaaaugaacaagcuguuugagaaaacuaagaagcaauugcgggaaaaugcugaggacaugggaaacggcugcuucaaaauuuaucauaagugugauaacgccugcaucgagagcauucgaaaugaaaccuacgaccacaacguguaccgcgacgaggcucuaaauaacagauuucagaucaaaggggucgaacugaagucuggauauaaagauuggauacucuggaucucauucgccauuaguugcuuucugcuuuguguggcacuguuggguuucaucaugugggccugccagaagggcaauauuagguguaacaucugcauaugaggacuagucccuguucccagagcccacuuuuuuuucuuuuuuugaaauaaaauagccugucuuucagaucucaaaggcucuuuucagagccaccaaaaaaaaaaaaaaaaaaaaaaaaaaaaaaaaaaaaaaaaaaaaaaaaaaaaaaaaaaaaaaaaaaaaaaaaaaaaaaaaaaaaaaaaaaaaaaaaaaaaa

SEQ ID NO: 14397 - RNA, 1973 nt, Artificial Sequence
  FLUAV/H3N2/A/Singapore/INFIMH-16-0019/2016__EPI1341068 hemagglutinin mRNA human (HA)
aggagagucccgcagucggcguccagcggcucugcuuguucgugugugugucguugcaggccuuauucaagcuuaccaugaagaccaucauugcccugagcuacauacucugccuuguguucgcucagaaaauccccggcaacgacaauuccacagcaacucuguguuuggggcaccaugccgucccuaacggaacgauuguuaagaccaucacaaaugauagaauugaggugacuaacgcgaccgaauuaguacaaaauucuucaaucggugagauaugcgacaguccacaccagauccuggauggcgaaaacuguacacuaauugacgcucuccugggggauccgcagugcgacggauuucagaauaaaaagugggaucuuuucguggagaggagcaaagccuauuccaacuguuaccccuaugacgucccugauuacgcaucucugcggucguugguggccucaagcggcacccucgaauuuaagaaugagaguuucaacuggacugguguuacacaaaaugggaccuccucugcuugcauccgcggaagcuccucaaguuucuucagccgacugaacuggcugacgcaucucaauuauaaguacccagcauuaaacgugacuaugcccaauaaagagcaguuugacaagcuguauauuuggggcguccaccauccuggcaccgauaaagaccagaucuucccauacgcccagucuuccgggcguauaacagugucaacuaagagaagccaacaggcuguaauucccaacaucggaaguaggccucggauucgcgguaucccaucuagaaucuccauuuacuggaccauaguuaaaccgggcgauauccuuuugauuaacagcacagggaaucugaucgcccccaggggauauuuuaagauacggucgggcaagucuuccauuaugcgcucagacgcgccuaucgguaaauguaagagugaaugcaucaccccaaacgggagcauucccaaugacaaaccuuuccagaacgugaaucgaaucacguacggagcauguccaagauaugucaagcacuccacucuaaaacucgccacaggcaugaggaacgugcccgagaagcagacccggggcauuuuuggggcuauagccggauucaucgaaaaugguugggagggcaugguggaugggugguacggauuucgucaccaaaacucugagggccgcggucaggcagcugaccugaaaagcacucaggccgcgauugaucaaaucaaugggaaacuuaacagacugaucggcaagacaaaugaaaaguuccaucagauugagaaggaauuuucagaggucgaaggaaggguucaggacuuggagaaauauguggaggauaccaagauagaccucuggaguuacaacgccgaacuguuaguagcacuggagaaucagcacacgaucgaucucaccgacuccgaaaugaacaaacuuuuugagaagacaaagaaacaacugcgggaaaaugcugaggauaugggcaacgggugcuucaagauuuaucauaaaugugacaacgccugcaucgagagcauucgaaaugaaacuuacgaucacaacguguaccgcgacgaggcuuugaauaacagauuucagaucaagggagucgaacuaaaaucugguuauaaggacuggauacuguggaucucauucgccauuaguugcuuucuccuguguguggcacuucugggcuucaucaugugggccugccagaaggggaauauuagguguaacaucugcauaugaggacuagucccuguucccagagcccacuuuuuuuucuuuuuuugaaauaaaauagccugucuuucagaucucaaaggcucuuuucagagccaccaaaaaaaaaaaaaaaaaaaaaaaaaaaaaaaaaaaaaaaaaaaaaaaaaaaaaaaaaaaaaaaaaaaaaaaaaaaaaaaaaaaaaaaaaaaaaaaaaaaaa

SEQ ID NO: 14398 - RNA, 1973 nt, Artificial Sequence
  FLUAV/H3N2/A/Singapore/INFIMH-16-0019/2016 NYMC-X-307__EPI1259099 hemagglutinin mRNA human (HA)
aggagagucccgcagucggcguccagcggcucugcuuguucgugugugugucguugcaggccuuauucaagcuuaccaugaagaccaucauugcccugagcuacauacucugccuuguguucgcucagaaaauccccggcaacgacaauuccacagcaacucuguguuuggggcaccaugccgucccuaacggaacgauuguuaagaccaucacaaaugauagaauugaggugacuaacgcgaccgaauuaguacaaaauucuucaaucggugagauaugcgacaguccacaccagauccuggauggcgaaaacuguacacuaauugacgcucuccugggggauccgcagugcgacggauuucagaauaaaaagugggaucuuuucguggagaggagcaaagccuauuccaacuguuaccccuaugacgucccugauuacgcaucucugcggucguugguggccucaagcggcacccucgaauuuaagaaugagaguuucaacuggacugguguuacacaaaaugggaccuccucugcuugcauccgcggaagcuccucaaguuucuucagccgacugaacuggcugacgcaucucaauuauaaguacccagcauuaaacgugacuaugcccaauaaagagcaguuugacaagcuguauauuuggggcguccaccauccuggcaccgauaaagaccagaucuucccauacgcccagucuuccgggcguauaacagugucaacuaagagaagccaacaggcuguaauucccaacaucggaaguaggccucggauucgcgguaucccaucuagaaucuccauuuacuggaccauaguuaaaccgggcgauauccuuuugauuaacagcacagggaaucugaucgcccccaggggauauuuuaagauacggucgggcaagucuuccauuaugcgcucagacgcgccuaucgguaaauguaagagugaaugcaucaccccaaacgggagcauucccaaugacaaaccuuuccagaacgugaauaagaucacguacggagcauguccacgauaugucaaacacuccacucuaaagcucgccacaggcaugagaaacgugcccgagaaacagaccaggggcauuuuuggggcuauagccggauucaucgaaaaugguugggagggcaugguggaugggugguacggauuucggcaccaaaacucugagggccguggucaggcagcugaccuuaagagcacucaggccgcgauugaucaaaucaaugggaagcugaaccgccugaucggcaaaacaaaugaaaaguuccaucagauugagaaagaauuuucagaggucgaaggaagaguucaggacuuggagaaguauguggaggauaccaaaauagaccucuggaguuacaacgccgaacuguuaguagcacuggagaaucagcacacgaucgaucucaccgacuccgaaaugaacaaacuuuuugagaagacaaagaagcaacugagggaaaaugcugaggauaugggcaacgggugcuucaaaauuuaucauaagugugacaacgccugcaucgagagcauucggaaugaaacuuacgaucacaacguguaccgagacgaggcuuugaauaaccgcuuucagaucaaaggagucgaacuaaagucugguuauaaggacuggauacuguggaucucauucgccauuaguugcuuucuccuguguguggcacuucugggcuucaucaugugggccugccagaaagggaauauuagauguaacaucugcauaugaggacuagucccuguucccagagcccacuuuuuuuucuuuuuuugaaauaaaauagccugucuuucagaucucaaaggcucuuuucagagccaccaaaaaaaaaaaaaaaaaaaaaaaaaaaaaaaaaaaaaaaaaaaaaaaaaaaaaaaaaaaaaaaaaaaaaaaaaaaaaaaaaaaaaaaaaaaaaaaaaaaaa

SEQ ID NO: 14399 - RNA, 1973 nt, Artificial Sequence
  FLUAV/H3N2/A/Singapore/INFIMH-16-0019/2016-CDC-LV18A__EPI1583318 hemagglutinin mRNA human (HA)
aggagagucccgcagucggcguccagcggcucugcuuguucgugugugugucguugcaggccuuauucaagcuuaccaugaagaccaucauugcccugagcuacauacucugccuuguguucgcucagaaaauccccggcaacgacaauuccacagcaacucuguguuuggggcaccaugccgucccuaacggaacgauuguuaagaccaucacaaaugauagaauugaggugacuaacgcgaccgaauuaguacaaaauucuucaaucggugagauaugcgacaguccacaccagauccuggauggcgaaaacuguacacuaauugacgcucuccugggggauccgcagugcgacggauuucagaauaaaaagugggaucuuuucguggagaggagcaaagccuauuccaacuguuaccccuaugacgucccugauuacgcaucucugcggucguugguggccucaagcggcacccucgaauuuaagaaugagaguuucaacuggacugguguuacacaaaaugggaccuccucugcuugcauccgcggaagcuccucaaguuucuucagccgacugaacuggcugacgcaucucaauuauaaguacccagcauuaaacgugacuaugcccaauaaagagcaguuugacaagcuguauauuuggggcguccaccauccuggcaccgauaaagaccagaucuucccauacgcccagucuuccgggcguauaauugugucaacaaagagaagccaacaggcuguaauccccaacauuggaaguaggccucggauccgcgauaucccaucuagaauuuccauauacuggacuaucguuaaaccgggugacauucuuuugaucaacagcaccggcaaucugauagcccccaggggguauuuuaagauucggucgggaaagucuuccaucaugcgcucagacgcgccuaucggcaaauguaagagugaaugcauuacaccaaacgguagcauccccaaugauaaaccuuuccagaacgugaaucgaauuaccuacggggcauguccaagauaugucaagcacuccacgcuaaaacucgccacuggaaugaggaacgugcccgagaagcagacacggggcauauuuggcgcuaucgccggguucauugaaaauggaugggaggguaugguggacggcugguacggguuucgucaccaaaacucugagggacgcggccaggcagcugaucugaaaagcacccaggccgcgaucgaccaaaucaaugguaaacuuaacagacugauugggaagacuaaugaaaaguuccaucagauagagaaggaauuuucagaggucgaaggcaggguucaggauuuggagaaauauguggaggacacaaagaucgaucucuggaguuacaacgccgaacuguuaguagcacuggagaaucagcacaccauugaccucacggauuccgaaaugaacaaacuuuuugagaagaccaagaaacaacugcgggaaaaugcugaggacaugggaaacggcugcuucaagaucuaucauaaaugugauaacgccugcauugagagcauccgaaaugaaacauacgaccacaacguguaccgcgacgaggcuuugaauaacagauuucagauaaagggggucgaacuaaaaucuggauauaaggauuggauccuguggauuucauucgccaucaguugcuuucuccuguguguggcacuucuggguuucauuaugugggccugccagaagggcaauaucagguguaacauaugcauuugaggacuagucccuguucccagagcccacuuuuuuuucuuuuuuugaaauaaaauagccugucuuucagaucucaaaggcucuuuucagagccaccaaaaaaaaaaaaaaaaaaaaaaaaaaaaaaaaaaaaaaaaaaaaaaaaaaaaaaaaaaaaaaaaaaaaaaaaaaaaaaaaaaaaaaaaaaaaaaaaaaaaa

SEQ ID NO: 14400 - RNA, 1973 nt, Artificial Sequence
  FLUAV/H3N2/A/Kansas/14/2017__EPI1146345 hemagglutinin mRNA human (HA)
aggagagucccgcagucggcguccagcggcucugcuuguucgugugugugucguugcaggccuuauucaagcuuaccaugaagaccaucauugcccugagcugcauacucugucuuguguucgcucagaaaauccccggcaacgacaauuccacagcaacucugugcuuggggcaccaugccgucccuaacggaacgauuguuaagaccaucacaaaugauagaauugaggugacuaacgcgaccgaauuaguacaaaauucuucaaucggugagauaugugacaguccacaccagauccuggauggcgaaaacugcacacuaauugacgcucuccugggggauccgcagugugacggauuucagaauaaaaagugggaucuuuucguggagaggaacaaagccuacagcaauugcuaucccuacgacgucccugauuaugcaucccugcggucuuugguggccucgucaggcacccucgaauuuaacaaugagagcuucaacugggcugguguuacucaaaaugggacaaguuccucuuguauccgcggaagcaaguccucauuuuucagucgacugaacuggcugacccaucucaauagcaaguacccagcauuaaacgugacgaugcccaacaaugagcaguuugacaaacuguauauuuggggcguccaccauccuggcacugauaaggaccagaucucucuuuacgcccaguccucagggcguauaaccgugagcacaaaaagaagucaacaggcuguaauuccaaacaucggaucuaggccccggauucgcgauaucccuuccagaaucagcauuuauuggacuauaguuaagccaggugacaucuugcugauuaauucgaccggcaaccuaaucgccccgaggggguacuucaaaauacggucuggaaaguccucaauuaugcgcagugacgcgcccaucggcaagugcaaaagcgaauguaucacaccuaaugguuccauuccaaacgauaagcccuuucagaaugugaaccgaaucaccuacggggcaugcccuagauaugucaaacagucuacgcucaagcuggccacuggaaugaggaaugugccagagcggcaaacacguggcauuuucggcgcuauagccggguuuaucgaaaacggaugggaggguaugguggacggcugguacggguuccgccaccagaauagcgagggaagaggccaggcagcugaucuuaaaucaacccaagccgcgauugaccagaucaacgguaagcugaauagguugaucgggaaaacuaacgaaaaguuucaccagauugagaaggaguucagugaagucgaaggccggauacaggaucucgagaaauauguugaggacacaaagaucgaucugugguccuacaaugccgaauuacugguggcacucgagaaccaacauaccauugaccuuacggauagcgaaaugaacaaacuguucgagaagaccaaaaagcaguugcgagaaaaugcugaggacaugggaaacggcuguuuuaagaucuaucacaaaugcgauaaugccugcauggggucuauucgcaacggaacauacgaccauaauguauauagagacgaggcucuaaacaauagguuccagaucaaggguguggaacugaaaucaggcuacaaggauuggauacucuggaucaguuuugccauuagcuguuuccugcuuugcgucgcacuguugggguuuaucaugugggccugucagaaaggaaacauucggugcaauaucuguauaugaggacuagucccuguucccagagcccacuuuuuuuucuuuuuuugaaauaaaauagccugucuuucagaucucaaaggcucuuuucagagccaccaaaaaaaaaaaaaaaaaaaaaaaaaaaaaaaaaaaaaaaaaaaaaaaaaaaaaaaaaaaaaaaaaaaaaaaaaaaaaaaaaaaaaaaaaaaaaaaaaaaaa

SEQ ID NO: 14401 - RNA, 1973 nt, Artificial Sequence
  FLUAV/H3N2/A/Kansas/14/2017__EPI1261067 hemagglutinin mRNA human (HA)
aggagagucccgcagucggcguccagcggcucugcuuguucgugugugugucguugcaggccuuauucaagcuuaccaugaagaccaucauugcccugagcugcauacucugucuuguguucgcucagaaaauccccggcaacgacaauuccacagcaacucugugcuuggggcaccaugccgucccuaacggaacgauuguuaagaccaucacaaaugauagaauugaggugacuaacgcgaccgaauuaguacaaaauucuucaaucggugagauaugugacaguccacaccagauccuggauggcgaaaacugcacacuaauugacgcucuccugggggauccgcagugugacggauuucagaauaaaaagugggaucuuuucguggagaggaacaaagccuacagcaauugcuaucccuacgacgucccugauuaugcaucccugcggucuuugguggccucgucaggcacccucgaauuuaacaaugagagcuucaacugggcugguguuacucaaaaugggacaaguuccucuuguauccgcggaagcaaguccucauuuuucagucgacugaacuggcugacccaucucaauagcaaguacccagcauuaaacgugacgaugcccaacaaugagcaguuugacaaacuguauauuuggggcguccaccauccuggcacugauaagaaccagaucucucuuuacgcccaguccucagggcguauaaccgugagcacaaaaagaagucaacaggcuguaauuccaaauaucggaucuaggccccggauucgcgacaucccuuccagaaucagcauuuauuggacuauaguuaagccaggugauaucuugcugauuaccucgacaggcaaccuaaucgccccgaggggguacuucaaaauacggucuggaaaguccucaauuaugcgcagugacgcgcccaucggcaagugcaaaagcgaauguaucaccccuaaugguuccauuccaaacgacaagcccuuucagaaugugaaccgaaucacguacggggcaugcccuagauaugucaaacagucuacucucaagcuggccacaggaaugaggaaugugccagagcggcaaacccguggcauuuucggcgcuauagccggguuuaucgaaaacggaugggaggguaugguggauggcugguacggguuccgccaccagaauagcgagggaagaggccaggcagcugaccuuaaaucaacucaagccgcgauugaucagaucaacgguaagcugaauagguugaucgggaaaacaaacgaaaaguuucaccagauugagaaggaguucagugaagucgaaggccggauacaggaccucgagaaauauguugaggauaccaagaucgaccugugguccuacaaugccgaauuacugguggcacucgagaaccaacauacgauugaucuuaccgacagcgaaaugaacaaacuguucgagaagacuaaaaagcaguugcgagaaaaugcugaggauaugggaaacggcuguuuuaagaucuaucacaaaugcgacaaugccugcauggggucuauucgcaacggaacauacgaucauaauguauauagagacgaggcucuaaacaauagguuccagaucaaggguguggaacugaaaucaggcuacaaggacuggauacucuggaucaguuuugccauuagcuguuuccugcuuugcgucgcacuguugggguuuaucaugugggccugucagaaaggaaacauucggugcaauaucuguauaugaggacuagucccuguucccagagcccacuuuuuuuucuuuuuuugaaauaaaauagccugucuuucagaucucaaaggcucuuuucagagccaccaaaaaaaaaaaaaaaaaaaaaaaaaaaaaaaaaaaaaaaaaaaaaaaaaaaaaaaaaaaaaaaaaaaaaaaaaaaaaaaaaaaaaaaaaaaaaaaaaaaaa

SEQ ID NO: 14402 - RNA, 1973 nt, Artificial Sequence
  FLUAV/H3N2/A/Kansas/14/2017__EPI1691978 hemagglutinin mRNA human (HA)
aggagagucccgcagucggcguccagcggcucugcuuguucgugugugugucguugcaggccuuauucaagcuuaccaugaagaccaucauugcccugagcugcauacucugucuuguguucgcucagaaaauccccggcaacgacaauuccacagcaacucugugcuuggggcaccaugccgucccuaacggaacgauuguuaagaccaucacaaaugauagaauugaggugacuaacgcgaccgaauuaguacaaaauucuucaaucggugagauaugugacaguccacaccagauccuggauggcgaaaacugcacacuaauugacgcucuccugggggauccgcagugugacggauuucagaauaaaaagugggaucuuuucguggagaggaacaaagccuacagcaauugcuaucccuacgacgucccugauuaugcaucccugcggucuuugguggccucgucaggcacccucgaauuuaacaaugagagcuucaacugggcugguguuacucaaaaugggacaaguuccucuuguauccgcggaagcaaguccucauuuuucagucgacugaacuggcugacccaucucaauagcaaguacccagcauuaaacgugacgaugcccaacaaugagcaguuugacaaacuguauauuuggggcguccaccauccugugacugauaagaaccagaucucucuuuacgcccaguccucaggccguauaaccguaagcacaaaaagaagucaacaggcuguuauuccaaauaucggguauaggccccggauucgcgacaucccuucuagaaucuccauuuacuggacuauagugaagccaggagauaucuugcugauuaacagcaccgguaaucuaaucgccccgaggggcuacuucaaaauacggucggggaagucuuccauuaugcgcucagacgcgcccaucggaaagugcaaaagugaauguaucacaccuaacggcagcauuccaaaugacaagcccuuucagaacgucaaucgaaucaccuauggugcaugcccuagauacgugaaacaguccacgcucaagcuggccacugggaugaggaacgugccagagcggcaaacacguggaauuuucggcgcuauagccggcuuuaucgaaaaugggugggagggaauggucgaugguugguauggcuuccgccaccagaacucugaggggagaggacaggcagcugaccuuaaaagcacccaagccgcgauugaucagaucaauggcaagcugaacagguugaucgguaaaacuaaugaaaaguuucaccagauugagaaggaguucucagaaguugaagggcggauacaggaccucgagaaauacguggaggauacaaagaucgaccuguggaguuauaacgccgaauuacugguagcacucgagaaccaacauaccauugaucuuacggacuccgaaaugaauaaacuguucgagaagaccaaaaagcaguugcgagaaaacgcugaggauaugggcaauggauguuuuaagaucuaccacaaaugcgacaacgccugcaugggcagcauucgcaaugggacauaugaucauaacguguacagagacgaggcucuaaauaacagguuccagaucaagggagucgaacugaaaucugguuacaaggacuggauacucuggaucucauuugccauuaguuguuuccugcuuugcguggcacuguugggcuuuaucaugugggccugucagaaagggaauauucggugcaacaucuguauaugaggacuagucccuguucccagagcccacuuuuuuuucuuuuuuugaaauaaaauagccugucuuucagaucucaaaggcucuuuucagagccaccaaaaaaaaaaaaaaaaaaaaaaaaaaaaaaaaaaaaaaaaaaaaaaaaaaaaaaaaaaaaaaaaaaaaaaaaaaaaaaaaaaaaaaaaaaaaaaaaaaaaa

SEQ ID NO: 14403 - RNA, 1973 nt, Artificial Sequence
  FLUAV/H3N2/A/Kansas/14/2017 CBER-22B CDC19A__EPI1388416 hemagglutinin mRNA human (HA)
aggagagucccgcagucggcguccagcggcucugcuuguucgugugugugucguugcaggccuuauucaagcuuaccaugaagaccaucauugcccugagcugcauacucugucuuguguucgcucagaaaauccccggcaacgacaauuccacagcaacucugugcuuggggcaccaugccgucccuaacggaacgauuguuaagaccaucacaaaugauagaauugaggugacuaacgcgaccgaauuaguacaaaauucuucaaucggugagauaugugacaguccacaccagauccuggauggcgaaaacugcacacuaauugacgcucuccugggggauccgcagugugacggauuucagaauaaaaagugggaucuuuucguggagaggaacaaagccuacagcaauugcuaucccuacgacgucccugauuaugcaucccugcggucuuugguggccucgucaggcacccucgaauuuaacaaugagagcuucaacugggcugguguuacucaaaaugggacaaguuccucuuguauccgcggaagcaaguccucauuuuucagucgacugaacuggcugacccaucucaauagcaaguacccagcauuaaacgugacgaugcccaacaaugagcaguuugacaaacuguauauuuggggcguccaccauccugugacugauaagaaccagaucucucuuuacgcccaguccucaggccguauaaccguaagcacaaaaagaagucaacaggcuguuauuccaaauaucggguauaggccccggauucgcgacaucccuucuagaaucuccauuuacuggacuauagugaagccaggagauaucuugcugauuaacagcaccgguaaucuaaucgccccgaggggcuacuucaaaauacggucggggaagucuuccauuaugcgcucagacgcgcccaucggaaagugcaaaagugaauguaucacaccuaacggcagcauuccaaaugacaagcccuuucagaacgucaaucgaaucaccuauggugcaugcccuagauacgugaaacaguccacgcucaagcuggccacugggaugaggaacgugccagagcggcaaacacguggaauuuucggcgcuauagccggcuuuaucgaaaaugggugggagggaauggucgaugguugguauggcuuccgccaccagaacucugaggggagaggacaggcagcugaccuuaaaagcacccaagccgcgauugaucagaucaauggcaagcugaacagguugaucgguaaaacuaaugaaaaguuucaccagauugagaaggaguucucagaaguugaagggcggauacaggaccucgagaaauacguggaggauacaaagaucgaccuguggaguuauaacgccgaauuacugguagcacucgagaaccaacauaccauugaucuuacggacuccgaaaugaauaaacuguucgagaagaccaaaaagcaguugcgagaaaacgcugaggauaugggcaauggauguuuuaagaucuaccacaaaugcgacaacgccugcauuggcagcauccgcaaugggacauaugaucauaacguguacagagacgaggcucuaaauaacagguuccagauaaagggagucgaacugaaaucugguuacaaggacuggauccucuggauuucauuugccaucaguuguuuccugcuuugcguggcacuguugggcuuuauuaugugggccugucagaaagggaauauccggugcaacauauguauuugaggacuagucccuguucccagagcccacuuuuuuuucuuuuuuugaaauaaaauagccugucuuucagaucucaaaggcucuuuucagagccaccaaaaaaaaaaaaaaaaaaaaaaaaaaaaaaaaaaaaaaaaaaaaaaaaaaaaaaaaaaaaaaaaaaaaaaaaaaaaaaaaaaaaaaaaaaaaaaaaaaaaa

SEQ ID NO: 14404 - RNA, 1973 nt, Artificial Sequence
  FLUAV/H3N2/A/Switzerland/8060/2017__EPI1154878 hemagglutinin mRNA human (HA)
aggagagucccgcagucggcguccagcggcucugcuuguucgugugugugucguugcaggccuuauucaagcuuaccaugaagaccaucauugcccugagcuacauacucugccuuguguucgcucagaaaauccccggcaacgacaauuccacagcaacucuguguuuggggcaccaugccgucccuaacggaacgauuguuaagaccaucacaaaugauagaauugaggugacuaacgcgaccgaauuaguacaaaauucuucaaucggugagauaugcgacaguccacaccagauccuggauggcgaaaacuguacacuaauugacgcucuccugggggauccgcagugcgacggauuucagaauaaaaagugggaucuuuucguggagaggagcaaagccuauuccucuuguuaccccuaugacgucccugauuacgcaucgcugcggucauugguggccagcaguggcacccucgaauuuaacaaugaguccuucaacuggacugguguuaagcaaaaugggacaucuagcgcuugcauccgcaaguccucaaguagcuuuuucucucgacugaacuggcugacccaucucaauuauacguacccagcauuaaacgugacuaugcccaauaacgagcaguuugacaaacuguauauuuggggaguccaccauccuggcaccgauaaggaccagaucuuccuuuacgcccaguccucaggccguauaacagugagcacuaaaagaagucaacaggcuguaauuccaaacaucgggucuaggccccggauucgcgauaucccuuccagaaucagcauuuacuggaccauaguuaagccaggagacaucuugcugauuaauucgacagguaaccuaaucgccccgaggggcuauuuuaaaauacagucugggaaguccucaauuaugcggagugacgcgcccaucggaaaguguaaaagcgaaugcaucaccccuaauggcuccauuccaaacgauaagcccuuccagaaugugaaccgcaucacguacggugcauguccucgauaugucaaacacucuacucucaagcuggccacagggaugagaaaugugccagagaaacaaaccaggggaauuuuuggcgcuauagccggcuucaucgaaaacgggugggagggaaugguggacgguugguacggcuuucggcaccagaauagcgaggggcguggacaggcagcugaucuuaagucaacucaagccgcgauugaccagaucaacggcaaacugaaucgcuugaucgguaagacaaacgaaaaguuccaucagauugagaaagaguucagugaagucgaagggagaauacaggaucucgagaaguauguugaggacaccaaaaucgaucugugguccuacaaugccgaauuacugguggcacucgagaaccaacacacgauugaccuuaccgauagcgaaaugaauaagcuguuugagaaaacaaagaagcaguugagggaaaacgcugaggacaugggcaacggaugcuucaaaaucuaucauaagugugauaaugccugcauuggcucuauccggaacgggacuuacgaccacaauguauaccgagacgaggcucuaaacaaucgcuuucagauaaaaggaguggaacugaagucagguuauaaagauuggauccucuggauuaguuucgccaucagcugcuuucugcuuugugucgcacuguugggcuucauuaugugggccugccagaaggggaacaucagauguaauauaugcauuugaggacuagucccuguucccagagcccacuuuuuuuucuuuuuuugaaauaaaauagccugucuuucagaucucaaaggcucuuuucagagccaccaaaaaaaaaaaaaaaaaaaaaaaaaaaaaaaaaaaaaaaaaaaaaaaaaaaaaaaaaaaaaaaaaaaaaaaaaaaaaaaaaaaaaaaaaaaaaaaaaaaaa

SEQ ID NO: 14405 - RNA, 1973 nt, Artificial Sequence
  FLUAV/H3N2/A/Switzerland/8060/2017__EPI1266285 hemagglutinin mRNA human (HA)
aggagagucccgcagucggcguccagcggcucugcuuguucgugugugugucguugcaggccuuauucaagcuuaccaugaagaccaucauugcccugagcuacauacucugccuuguguucgcucagaaaauccccggcaacgacaauuccacagcaacucuguguuuggggcaccaugccgucccuaacggaacgauuguuaagaccaucacaaaugauagaauugaggugacuaacgcgaccgaauuaguacaaaauucuucaaucggugagauaugcgacaguccacaccagauccuggauggcgaaaacuguacacuaauugacgcucuccugggggauccgcagugcgacggauuucagaauaaaaagugggaucuuuucguggagaggagcaaagccuauuccucuuguuaccccuaugacgucccugauuacgcaucgcugcggucauugguggccagcaguggcacccucgaauuuaacaaugaguccuucaacuggacugguguuaagcaaaaugggacaucuagcgcuugcauccgcaaguccucaaguagcuuuuucucucgacugaacuggcugacccaucucaauuauaaauacccagcauuaaacgugacgaugcccaauaacgagcaguuugacaagcuguauauuuggggaguccaccauccuggcacugauaaagaccagaucuucccauacgcccaguccucaggccguauaaccgugagcacaaagagaagucaacaggcuguaauucccaacaucgggucuaggccucggauucgcgauaucccauccagaaucagcauuuacuggacuauaguuaaaccgggagacauccuuuugauuaauucgaccgguaaccugaucgcccccaggggcuauuuuaagauacagucugggaaguccucaauuaugcggagugacgcgccuaucggaaaauguaagagcgaaugcaucacaccaaauggcuccauucccaacgauaaaccuuuccagaaugugaaccgcaucaccuacggugcauguccacgauaugucaagcacucuacgcuaaaacucgccacugggaugagaaaugugcccgagaagcaaacaaggggaauuuuuggcgcuauagccggcuucaucgaaaacgggugggagggaaugguggacgguugguacggcuuucggcaccagaauagcgaggggcguggacaggcagcugaucugaaaucaacccaagccgcgauugaccagaucaacggcaaacuuaaucgccugaucgguaagacuaacgaaaaguuccaucagauugagaaggaguucagugaagucgaagggagaauacaggauuuggagaaauauguugaggacacaaagaucgaucucugguccuacaaugccgaacuguuaguggcacuggagaaccaacacaccauugaccucacggauagcgaaaugaauaaacuuuuugagaagaccaagaaacagcugagggaaaacgcugaggacaugggcaacggaugcuucaagaucuaucauaaaugugauaaugccugcauuggcucuauccggaacgggacauacgaccacaauguauaccgagacgaggcuuugaacaaucgcuuucagauaaagggaguggaacuaaaaucagguuauaaggauuggauccuguggauuaguuucgccaucagcugcuuucuccugugugucgcacuucugggcuucauuaugugggccugccagaaggggaacaucagauguaauauaugcauuugaggacuagucccuguucccagagcccacuuuuuuuucuuuuuuugaaauaaaauagccugucuuucagaucucaaaggcucuuuucagagccaccaaaaaaaaaaaaaaaaaaaaaaaaaaaaaaaaaaaaaaaaaaaaaaaaaaaaaaaaaaaaaaaaaaaaaaaaaaaaaaaaaaaaaaaaaaaaaaaaaaaaa

SEQ ID NO: 14406 - RNA, 1973 nt, Artificial Sequence
  FLUAV/H3N2/A/Hong Kong/2671/2019__EPI1543098 hemagglutinin mRNA human (HA)
aggagagucccgcagucggcguccagcggcucugcuuguucgugugugugucguugcaggccuuauucaagcuuaccaugaagaccaucauugcccugagcuacauacucugccuuguguucacacagaaaauccccggcaacgacaauuccacugcuacgcuguguuuggggcaccaugcagucccuaacggaaccauuguuaagacaaucacuaaugauagaauugaggugaccaacgccacagaauuaguacaaaauucuucaaucggugagauaugcgacaguccacaccagauccuggauggcgggaacuguacccuaauugacgcgcuccugggagauccgcagugcgacggcuuucagaauaaaaagugggaucuuuucguggaaaggagccgggcuuauuccaacuguuaccccuaugacgucccugauuacgccucucugcgcucguugguggcaucaagcgguacucucgaguuuaaaaaugaaaguuucaacugggccgggguuacacaaaauggaaaguccuuuucuugcauccgaggcagcuccucaaguuucuuuagccgucugaacuggcugacccaucucaauuauacguacccagcuuuaaacgugacuaugcccaauaaggagcaguucgacaaacuguauauuuggggcguccaccauccugggaccgauaaggaccagaucucucuuuacgcacaguccucaggaagaauaacagugagcacuaaaaggagucaacaggccguaauuccaaacaucgguucucggccccgcauuagagauaucccuuccaggaucagcauuuacuggaccauaguuaagccaggcgacaucuugcugauuaacucgacagggaaucuaaucgcuccgcggggauauuuuaaaauacgcucuggcaaguccucaauuaugcgaagugacgcccccaucgguaaguguaaaagcgagugcaucaccccuaacggguccauuccaaaugauaagcccuuccagaacgugaauagaaucacguacggagcguguccuagguaugucaaacagucuacucucaagcuggcaacaggcaugcggaacgugccagaaaaacaaacccguggcauuuuuggggccauagcuggauucaucgagaaugguugggaaggcaugguggacgggugguacggauuucgccaccagaacagcgagggcagaggucaggccgcagaucuuaagucaacucaagcugccauugaccagaucaaugggaaacugaacagguugaucggcaagacaaaugagaaguuccaccagauugaaaaagaguucagugaagucgagggacggguucaggaucucgaaaaguauguggaggacaccaaaauagaucugugguccuacaacgcggaguuacugguagcccucgaaaaucaacauacgaucgaccuuaccgauagcgagaugaacaagcuguuugagaaaacaaagaagcaguugcgagaaaaugcagaagacaugggcaacgggugcuucaaaauuuaucacaagugugauaacgcuugcaucggaucuauucgcaaugagacuuacgaccauaacguguacagagacgaggcccuaaauaacagguuucagaucaaaggugucgaacugaagucaggcuauaaagauuggauacucuggaucaguuucgcuauuagcugcuuucugcuuuguguggcccuguugggguucaucaugugggcaugccagaagggaaauauucgguguaacaucugcauaugaggacuagucccuguucccagagcccacuuuuuuuucuuuuuuugaaauaaaauagccugucuuucagaucucaaaggcucuuuucagagccaccaaaaaaaaaaaaaaaaaaaaaaaaaaaaaaaaaaaaaaaaaaaaaaaaaaaaaaaaaaaaaaaaaaaaaaaaaaaaaaaaaaaaaaaaaaaaaaaaaaaaa

SEQ ID NO: 14407 - RNA, 1973 nt, Artificial Sequence
  FLUAV/H3N2/A/Hong Kong/2671/2019__EPI1642843 hemagglutinin mRNA human (HA)
aggagagucccgcagucggcguccagcggcucugcuuguucgugugugugucguugcaggccuuauucaagcuuaccaugaagaccaucauugcccugagcuacauacucugccuuguguucacacagaaaauccccggcaacgacaauuccacugcuacgcuguguuuggggcaccaugcagucccuaacggaaccauuguuaagacaaucacuaaugauagaauugaggugaccaacgccacagaauuaguacaaaauucuucaaucggugagauaugcgacaguccacaccagauccuggauggcgggaacuguacccuaauugacgcgcuccugggagauccgcagugcgacggcuuucagaauaaaaagugggaucuuuucguggaaaggagccgggcuuauuccaacuguuaccccuaugacgucccugauuacgccucucugcgcucguugguggcaucaagcgguacucucgaguuuaaaaaugaaaguuucaacugggccgggguuacacaaaauggaaaguccuuuucuugcauccgaggcagcuccucaaguuucuuuagccgucugaacuggcugacccaucucaauuauauuuacccagcuuuaaacgugacgaugcccaauaaggagcaguucgacaaacuguauaucuggggcguccaccauccugugacugauaaggaccagauaucucuuuacgcacaguccucagggagaauuaccguaagcacaaaaaggagucaacaggccguuaucccaaacauuggaucucggccccgcaucagaaacaucccuuccaggauuagcauauacuggacuaucgugaagccaggugauauuuugcugaucaauucgaccggcaaccuaauagcuccgcggggguauuuuaaaauucgcucuggaaaguccucaaucaugcgaagugacgcccccaucggcaaguguaaaagcgagugcauuacaccuaaugguuccaucccaaacgacaagcccuuccagaaugucaacagaauuaccuacggggcguguccuagguaugugaaacagucuacgcucaagcuggcaacuggaaugcggaaugugccagaaaaacaaacacguggcauauuuggcgccaucgcuggguucauugagaacggaugggaagguauggucgauggcugguacggguuucgccaccagaauagcgagggaagaggccaggccgcagaccuuaagucaacccaagcugccaucgaucagaucaacgguaaacugaauagguugauugggaagacuaacgagaaguuccaccagauagaaaaagaguucagugaaguugagggccgggugcaggaccucgaaaaguauguagaggauacaaaaaucgaccugugguccuacaaugcggaguuacugguggcccucgaaaaccaacauaccauugaucuuacggacagcgagaugaauaagcuguuugagaaaaccaagaagcaguugcgagaaaacgcagaagauaugggaaacggcugcuucaaaaucuaucacaagugugacaaugcuugcauugggucuauccgcaacgagacauacgaucauaaugucuacagagacgaggcccuaaacaauagguuucagauaaaaggaguggaacugaagucagguuauaaagacuggauccucuggauuaguuucgcuaucagcugcuuucugcuuuguguugcccuguugggcuucauuaugugggcaugccagaaggggaacauccgguguaauauaugcauuugaggacuagucccuguucccagagcccacuuuuuuuucuuuuuuugaaauaaaauagccugucuuucagaucucaaaggcucuuuucagagccaccaaaaaaaaaaaaaaaaaaaaaaaaaaaaaaaaaaaaaaaaaaaaaaaaaaaaaaaaaaaaaaaaaaaaaaaaaaaaaaaaaaaaaaaaaaaaaaaaaaaaa

SEQ ID NO: 14408 - RNA, 1973 nt, Artificial Sequence
  FLUAV/H3N2/A/Hong Kong/45/2019__EPI1691930 hemagglutinin mRNA human (HA)
aggagagucccgcagucggcguccagcggcucugcuuguucgugugugugucguugcaggccuuauucaagcuuaccaugaagaccaucauugcccugagcuacauacucugccuuggcuucacacagaaaauccccgggaacgacaauuccacugcuacgcuguguuugggacaccaugcagugccuaacgguaccauugucaagacaaucacuaaugauagaauugagguuaccaacgccacagaauuagugcaaaauucuucaaucggcgagauaugcgacaguccacaccagauccuggaugggggaaacuguacccuaauugacgcgcuccugggcgauccgcagugcgacgguuuucagaauaaaaagugggaucuuuucguagaaaggagccgggcuuauuccaacuguuaccccuaugacgugccugauuacgccucucugcgcucguuggucgcaucaagcgggacucucgaguuuaaaaaugaaaguuucaacugggccggagugacacaaaauggcaaguccuuuucuugcauccgaggcagcuccucaaguuucuuuagccgucugaacuggcugacccaucucaauuauacguacccagcuuuaaacguuacuaugcccaauaaggagcaguucgacaaacuguauauuuggggagugcaccauccugggaccgauaaggaccagaucucucuuuacgcacaguccucagguagaauaacagucagcacuaaaaggagucaacaggccgugauuccaaacaucggcucucggccccgcauuagagauaucccuuccaggaucagcauuuacuggaccauaguaaagccaggggacaucuugcugauuaacucgacaggaaaucuaaucgcuccgcggggcuauuuuaaaauacgcucugguaaguccucaauuaugcgaagugacgcccccaucgggaaguguaaaagcgagugcaucaccccuaacggauccauuccaaaugauaagcccuuccagaacguuaauagaaucacguacggcgcguguccuagguaugugaaacagaacacucucaagcuggcaacaggcaugcggaaugucccagaaaaacaaacccgugggauuuuuggagccauagcugguuucaucgagaacggcugggaagggaugguggacggaugguacggcuuucgccaccaaaauucugaggguagagggcaggccgcagaucuuaagagcacucaggcugccauugaccagaucaacggcaaacugaauagguugaucggaaagacaaacgagaaguuccaccagauugaaaaagaguucucagaaguggagggccggguccaggaucucgaaaaguauguugaggacaccaaaauagaucuguggaguuacaaugcggaguuacugguggcccucgaaaaccaacauacgaucgaccuuaccgauuccgagaugaauaagcuguuugagaaaacaaagaagcaguugcgagaaaacgcagaagacauggggaacggaugcuucaaaauuuaucacaagugugauaaugcuugcaucgguagcauucgcaacgagacuuacgaccauaauguauacagagacgaggcccuaaacaauagguuucagaucaaaggcguggaacugaagucuggguauaaagauuggauacucuggaucucauucgcuauuaguugcuuucugcuuugugucgcccuguugggauucaucaugugggcaugccagaagggcaacauucgguguaauaucugcauaugaggacuagucccuguucccagagcccacuuuuuuuucuuuuuuugaaauaaaauagccugucuuucagaucucaaaggcucuuuucagagccaccaaaaaaaaaaaaaaaaaaaaaaaaaaaaaaaaaaaaaaaaaaaaaaaaaaaaaaaaaaaaaaaaaaaaaaaaaaaaaaaaaaaaaaaaaaaaaaaaaaaaa

SEQ ID NO: 14409 - RNA, 1973 nt, Artificial Sequence
  FLUAV/H3N2/A/South Australia/34/2019__EPI1387331 hemagglutinin mRNA human (HA)
aggagagucccgcagucggcguccagcggcucugcuuguucgugugugugucguugcaggccuuauucaagcuuaccaugaagaccaucauugcccugagcuacauacucugccuuguguucgcucagaaaauccccggcaacgacaauuccacagcaacucuguguuuggggcaccaugccgucccuaacggaacgauuguuaagaccaucacaaaugauagaauugaggugacuaacgcgaccgaauuaguacaaaauucuucaaucggugagauaugcgacaguccacaccagauccuggauggcgggaacuguacacuaauugacgcucuccugggagauccgcagugcgacggcuuucagaauaaaaagugggaucuuuucguggaaaggagccgggccuauuccaacuguuaccccuaugacgucccugauuacgcaucucugcgcucguugguggccucaagcgguacccucgaguuuaaaaaugaaaguuucaacuggacugggguuaagcaaaauggaacauccucugcuugcauccgaggcagcuccucaaguuucuuuagccgucugaacuggcugacccaucucaauuauacguacccagcauuaaacgugacuaugcccaauaaggagcaguuugacaaacuguauauuuggggcguccaccauccugggaccgauaaggaccagaucuuccuuuacgcccagucuuccggaagaauaacagugucaacuaaaaggagccaacaggcuguaauuccaaacaucgguuuucggccccgcauuagagauaucccuaguaggaucucuauuuacuggaccauaguuaagccaggcgacaucuugcugauuaacuccacagggaaucuaaucgccccgcggggauauuucaaaauacgcagcggcaagucgucuauuaugcgauccgacgcgcccaucgguaaguguaaaucagagugcaucaccccuaacgggaguauuccaaaugauaagcccuuucagaacgugaauagaaucacguacggagcauguccuagguaugucaaacagagcacucucaagcuggccacaggcaugcggaacgugccagaaaaacaaacccguggcauuuucggggcuauagccggauuuaucgagaaugguugggaaggcaugauggacgggugguacggauuccgccaccagaacuccgagggcagaggucaggcagcugaucuuaagucuacucaagccgcgauugaccagaucaaugggaaacugaacagguugaucggcaagacaaaugagaaguuccaccagauugaaaaagaguuuagcgaaguggagggacggguccaggaucucgaaaaguauguugaggacaccaaaauagaucuguggucauacaacgccgaguuacugguggcacucgaaaaucaacauacgaucgaccuuaccgauagugagaugaacaagcuguucgaaaagacaaagaagcaguugcgagagaaugcugaagacaugggcaacgggugcuuuaaaauuuaucacaagugugauaacgccugcaucggauccauucgcaaugagacuuacgaccauaacguauacagagacgaggcucuaaauaacagguuccagaucaaagguguggaacugaaaagcggcuauaaagauuggauacucuggaucucuuuugccauuucaugcuuccugcuuuguaucgcacuguugggguuuauuaugugggccugccagaagggaaauauccgguguaacauaugcauuugaggacuagucccuguucccagagcccacuuuuuuuucuuuuuuugaaauaaaauagccugucuuucagaucucaaaggcucuuuucagagccaccaaaaaaaaaaaaaaaaaaaaaaaaaaaaaaaaaaaaaaaaaaaaaaaaaaaaaaaaaaaaaaaaaaaaaaaaaaaaaaaaaaaaaaaaaaaaaaaaaaaaa

SEQ ID NO: 14410 - RNA, 1973 nt, Artificial Sequence
  FLUAV/H3N2/A/South Australia/34/2019__EPI1440494 hemagglutinin mRNA human (HA)
aggagagucccgcagucggcguccagcggcucugcuuguucgugugugugucguugcaggccuuauucaagcuuaccaugaagaccaucauugcccugagcuacauacucugccuuguguucgcucagaaaauccccggcaacgacaauuccacagcaacucuguguuuggggcaccaugccgucccuaacggaacgauuguuaagaccaucacaaaugauagaauugaggugacuaacgcgaccgaauuaguacaaaauucuucaaucggugagauaugcgacaguccacaccagauccuggauggcgggaacuguacacuaauugacgcucuccugggagauccgcagugcgacggcuuucagaauaaaaagugggaucuuuucguggaaaggagccgggccuauuccaacuguuaccccuaugacgucccugauuacgcaucucugcgcucguugguggccucaagcgguacccucgaguuuaaaaaugaaaguuucaacuggacugggguuaagcaaaauggaacauccucugcuugcauccgaggcagcuccucaaguuucuuuagccgucugaacuggcugacccaucucaauuauaaguacccagcauuaaacgugacgaugcccaauaaagagcaguuugacaagcuguauauuuggggcguccaccauccuaucacugauaaagaccagauauuccuuuacgcccagucuuccgggagaauuaccgugucaacaaagaggagccaacaggcuguaaucccaaacauuggauuucggccccgcaucagagauaucccuaguaggauuucuauauacuggacuaucguuaaaccaggugacauuuugcugaucaacuccaccggcaaucuaauagccccgcggggguauuucaagauucgcagcggaaagucgucuaucaugcgauccgacgcgcccaucggcaaauguaagucagagugcauuacaccuaacgguaguaucccaaaugauaaacccuuucagaacgugaauagaauuaccuacggggcauguccuagguaugucaagcagagcacgcucaaacuggccacuggaaugcggaacgugccagaaaagcaaacacguggcauauucggcgcuaucgccggguuuauugagaauggaugggaagguaugauggacggcugguacggguuccgccaccagaacuccgagggaagaggccaggcagcugaucuuaaaucuacccaagccgcgaucgaccagaucaaugguaagcugaacagguugauugggaagacuaaugagaaauuccaccagauagaaaaggaguuuagcgaaguggagggccggguccaggaucucgaaaaauauguugaggacacaaagaucgaucuguggucauacaacgccgaguuacugguggcacucgaaaaucaacauaccauugaccuuacggauagugagaugaacaaacuguucgaaaagaccaagaaacaguugcgagagaaugcugaagacaugggaaacggcugcuuuaagaucuaucacaaaugugauaacgccugcauuggguccauccgcaaugagacauacgaccauaacguauacagagacgaggcucuaaauaacagguuccagauaaagggaguggaacugaaaagcgguuauaaggauuggauccucuggauuucuuuugccaucucaugcuuccugcuuuguauugcacuguugggcuuuaucaugugggccugccagaaggggaauauacgguguaacauuugcaucugaggacuagucccuguucccagagcccacuuuuuuuucuuuuuuugaaauaaaauagccugucuuucagaucucaaaggcucuuuucagagccaccaaaaaaaaaaaaaaaaaaaaaaaaaaaaaaaaaaaaaaaaaaaaaaaaaaaaaaaaaaaaaaaaaaaaaaaaaaaaaaaaaaaaaaaaaaaaaaaaaaaaa

SEQ ID NO: 14411 - RNA, 1955 nt, Artificial Sequence
  FLUAV/H7N9/A/chicken/Zhejiang/C483/2013(H7N9)__AGN69400.1 hemagglutinin mRNA human (HA)
aggagagucccgcagucggcguccagcggcucugcuuguucgugugugugucguugcaggccuuauucaagcuuaccaugaacacccagauccugguguucgcccucauugcuauaauccccacaaaugcagacaagauuugccuuggccaccaugccgucagcaacgggacuaaaguuaauacgcugaccgagagaggaguggaaguagugaacgcgacagagacugucgaaaggaccaauaucccucggauuuguuccaaggguaaaaagacaguggauuugggccaaugcggguuacugggaaccaucacuggcccaccgcagugugaccaguuucuagaguucucugcugaucucauaaucgaacgccgagaggguucagacguuugcuaccccgggaaauuugugaacgaggaagcccugcgucagauucuuagagagaguggaggcaucgauaaggaagcaaugggcuucacauauagcgggauuaggaccaauggagccacguccgcuugucggcgcucugguucgucauuuuacgcagagaugaaguggcuguugagcaacacugacaaugccgcuuucccucaaaugaccaaaaguuauaagaacacaagaaaauccccagcccucaucgucuggggcauacaccauucugugagcacugcggagcagaccaagcuguacggguccggaaauaaacugguaacaguuggcucaaguaacuaucagcagagcuuugugcccucuccuggugcaaggccacaagucaaugggcaguccggacggauugauuuccacuggcucauguuaaaccccaaugacaccgugacguuuucauucaacggcgccuuuaucgcuccugaucgcgccagcuuccugcgaggcaagaguauggggauucagucuggagugcaggucgacgcaaacugcgaaggugauuguuaccauuccggcgggacuaucaucagcaaucuuccauuucaaaacauugacucgagagcuguuggaaagugcccgagguaugugaaacagcggucuuugcugcuagccacaggcaugaagaauguacccgagauaccuaaaggucguggccucuucggggcgaucgccggauucauugaaaacggcugggaggggcugaucgauggaugguacgguuuucgccaccagaaugcacaaggcgaagggaccgcugccgacuacaaguccacucagucagcuauagaccagauuacaggaaaacuuaacagacugaucgagaagaccaaucagcaauucgaguugaucgauaacgaauuuaaugagguggaaaaacagauuggcaacgucaucaauuggacgagggacaguauuaccgagguguggagcuauaacgccgaacuccugguugcaauggagaaucagcacacaauagauuuagccgacuccgagauggauaagcuguacgaacgggugaagcgacagcuccgcgagaacgcugaagaggacgguacuggguguuucgaaaucuuucauaaaugcgaugacgauuguauggcgucuauuagaaauaacaccuaugaccacagcaaguacagggaggaggcaaugcaaaaccggauccagaucgauccagucaaacuuucaaguggcuauaaggacgugauucugugguucuccuuuggagccagcugcuucauauugcuagcuaucguaaugggccugguuuuuauuugcgugaaaaaugggaacaugcgcuguacaaucugcauuugaggacuagucccuguucccagagcccacuuuuuuuucuuuuuuugaaauaaaauagccugucuuucagaucucaaaggcucuuuucagagccaccaaaaaaaaaaaaaaaaaaaaaaaaaaaaaaaaaaaaaaaaaaaaaaaaaaaaaaaaaaaaaaaaaaaaaaaaaaaaaaaaaaaaaaaaaaaaaaaaaaaaa

SEQ ID NO: 14412 - RNA, 1958 nt, Artificial Sequence
  FLUAV/H10N8/A/Jiangxi/IPB13/2013(H10N8)__AHK10761.1 hemagglutinin mRNA human (HA)
aggagagucccgcagucggcguccagcggcucugcuuguucgugugugugucguugcaggccuuauucaagcuuaccauguacaagaucguggucauuauagcccugcucggcgcuguuaaagggcuugacaagaucugccugggacaccaugcaguggccaacgguaccauuguaaaaacauugacuaaugagcaggaagaggugacgaacgcgaccgaaacagucgagagcacuggcaucaauagauuauguaugaaggggaggaaacacaaggaucugggaaacugccaucccauuggcaugcuaaucgguaccccugcuugugaccuccaccugacagggaugugggauacccuuauagaacgggagaaugccaucgcauauugcuacccaggagccacugugaacguugaggcucugcgccaaaagauuauggaauccggcggcaucaauaaaauuucuacaggguucaccuauggaucaaguaucaacagcgcagguacgacucgagccuguaugcguaauggcgggaacuccuuuuacgcugaguugaaguggcucgugucuaaaucgaagggacagaauuucccgcagaccacaaacacuuauagaaauaccgacacagccgaacaucugauaauguggggcauucaccaccccucaagcacccaggagaaaaacgaucuguacgguacgcaaagucucuccaucucugucgggagcuccacuuauaggaauaacuuugugccuguaguuggagcgcggccacaggugaacggccagucaggccgcauugacuuccauuggacauuaguccagcccggggauaauaucaccuuuagucacaacggaggucugaucgcaccuagcagagugucuaaacuuauuggcaggggguugggaauacaauccgacgccccaaucgauaauaacugcgagucaaaguguuucuggcggggcgguagcauuaauacucgccugcccuuucagaaccuaaguccucgaacaguggggcagugcccaaaguacgucaauagaaggucucucaugcuggcuaccggcaugcggaacguuccggaacuuauccagggacguggccuguucggggccauagcaggauuuuuggagaaugguugggaaggcaugguggacgggugguacggauuccgccaucaaaacgcucagggcacgggucaggccgcggauuauaaguccacccaagccgcaauugaccagaucacagggaaacucaauagacugguagagaagacuaacaccgaauuugagagcaucgagucggaguucucugaaauugaacaccagaucggcaaugugauuaacuggacaaaagauuccauaacugacaucuggaccuaccaggcugaguuacuggucgccauggaaaaucaacacacaauugacauggcugauucagagaugcucaaccuuuaugagagggugcggaagcagcugcgacagaacgccgaagaggacggaaaaggcuguuuugaaaucuaccaugcaugcgaugacaguuguauggagagcauccgcaauaacaccuaugaucacucccaguacagagaagaggccuugcuaaauaggcugaacauuaaucccguuacucucucuagcggguauaaggacauaauccugugguucucauucggagcuaguugcuuugugcuucuggcggucgugauggguuuguucuuuuucugccucaagaacggcaauaugcgguguacgauuugcaucugaggacuagucccuguucccagagcccacuuuuuuuucuuuuuuugaaauaaaauagccugucuuucagaucucaaaggcucuuuucagagccaccaaaaaaaaaaaaaaaaaaaaaaaaaaaaaaaaaaaaaaaaaaaaaaaaaaaaaaaaaaaaaaaaaaaaaaaaaaaaaaaaaaaaaaaaaaaaaaaaaaaaa

SEQ ID NO: 14413 - RNA, 2024 nt, Artificial Sequence
  FLUBV/H0N0/B/Colorado/06/2017__EPI1011552 hemagglutinin mRNA human (HA)
aggagagucccgcagucggcguccagcggcucugcuuguucgugugugugucguugcaggccuuauucaagcuuaccaugaaggccaucauugugcugcucauggucguuaccagcuccgcugacagaauaugcacaggcaucacuucuucaaacaguccccacgugguaaaaacggcaacccagggggaggugaaugucacaggagugauuccucuuacuaccacaccaaccaagagccauuucgccaaccugaaagguacugaaacaaggggcaaguuguguccgaaaugcuuaaauuguaccgaucuggacguugcgcuagggcggcccaagugcacgggaaagaucccuuccgcucgcgugucuauucuccacgagguccgaccagugacuucgggcuguuuucccaucaugcaugaucguaccaaaauaagacaacugccuaaccuucugagggguuacgaacacguacgguugucaacacauaauguuaucaacgccgagggggcaccaggaggccccuauaagauuggcacuagcgggaguugcccuaauaucaccaacggaaaugguuucuuugccacaauggcuugggcagugccagacaaaaacaagaccgccacgaauccgcucacuauugaaguccccuacguguguacagagggcgaggaucagaucaccguguggggguuccacuccgacaacgaaacucagauggcuaaacuguauggagauucuaagccucagaaguuuacaagcuccgccaauggcgucaccacgcacuacguuucacaaauagguggguucccaaaccagaccgaggacggaggccugccccagaguggccgcauugugguagauuauauggugcagaaaagcgggaagacaggaacuaucaccuaccaaagagguauucucuuaccucagaaagucuggugcgcgucuggcagguccaaggugaucaaagggucacugccacuuaucggagaagcagacuguuugcaugagaaguauggcggucugaauaaaagcaagcccuacuacacaggggagcacgccaaggcuauuggcaacugcccgauauggguuaaaacuccucuaaagcucgccaacggaaccaaauaucggcccccagcaaagcugcuuaaagaacgcggcuuuuucggggcuaucgccggauuucuggaggguggcugggaagggaugauugcgggauggcauggcuacacaagucacggugcccacgggguggcagucgcugccgauuugaagucuacccaggaggcuaucaauaagauaacuaaaaaccucaauucccugagcgaauuagaggugaagaaccugcagcgacucucgggcgccauggacgagcuucauaaugaaauucuggaguuggaugaaaaaguagacgaccuaagagcagauacgaucucuucccaaaucgagcuggccguucuccugucaaacgaaggaauuaucaauagugaggacgagcaccuucuggcuuuggaaaggaagcucaaaaagaugcugggcccuagcgcgguggagauugggaacggauguuucgaaacaaagcauaaaugcaaucagaccugcuuagauaagauagcagccgguacuuuugacgcuggcgaguucucccugcccaccuuugauucucuaaacaucacagccgcaagccucaaugacgaugggcuggacaaccacaccauucuuuuguauuacucaacugccgcuaguucccuggccgucacacucaugaucgcaaucuucguggucuauauggugagccgggauaauguuucuuguucaauuugccugugaggacuagucccuguucccagagcccacuuuuuuuucuuuuuuugaaauaaaauagccugucuuucagaucucaaaggcucuuuucagagccaccaaaaaaaaaaaaaaaaaaaaaaaaaaaaaaaaaaaaaaaaaaaaaaaaaaaaaaaaaaaaaaaaaaaaaaaaaaaaaaaaaaaaaaaaaaaaaaaaaaaaa

SEQ ID NO: 14414 - RNA, 2024 nt, Artificial Sequence
  FLUBV/H0N0/B/Colorado/06/2017__EPI1051642 hemagglutinin mRNA human (HA)
aggagagucccgcagucggcguccagcggcucugcuuguucgugugugugucguugcaggccuuauucaagcuuaccaugaaggccaucauugugcugcucauggucguuaccagcuccgcugacagaauaugcacaggcaucacuucuucaaacaguccccacgugguaaaaacggcaacccagggggaggugaaugucacaggagugauuccucuuacuaccacaccaaccaagagccauuucgccaaccugaaagguacugaaacaaggggcaaguuguguccgaaaugcuuaaauuguaccgaucuggacguugcgcuagggcggcccaagugcacgggaaagaucccuuccgcucgcgugucuauucuccacgagguccgaccagugacuucgggcuguuuucccaucaugcaugaucguaccaaaauaagacaacugccuaaccuucugagggguuacgaacacguacgguugucaacacauaauguuaucaacgccgagggggcaccaggaggccccuauaagauuggcacuagcgggaguugcccuaauaucaccaacggaaaugguuucuuugccacaauggcuugggcagugccagacaaaaacaagaccgccacgaauccgcucacuauugaaguccccuacguguguacagagggcgaggaucagaucaccguguggggguuccacuccgacacugaaacacagauggcuaaacuguauggagauucuaagccucagaaguuuaccagcuccgccaacggcgucacgacccacuacguuucacaaauagguggguucccaaaucagacagaggacggaggccugccccagaguggccgcauugugguagauuauauggugcagaaaagcgggaagacuggaaccaucacauaccaaagagguauucucuuaccucagaaagucuggugcgcgucuggcagguccaaggugaucaaagggucacugccacuuaucggagaagcagacuguuugcaugagaaguauggcggucugaacaaaagcaagcccuacuacacuggggagcacgccaaggcuauuggcaauugcccgauauggguuaaaaccccucuaaagcucgccaacggaacaaaauaucggcccccagcaaagcugcuuaaagaacgcggcuuuuucggggcuaucgccggauuucuggaggguggcugggaagggaugauugcgggauggcauggcuacaccagucacggugcccacgggguggcagucgcugccgauuugaagucuacucaggaggcuaucaacaagauaacgaaaaaucucaacucccugagcgaauuagaggugaagaaucugcagcgacucucgggcgccauggacgagcuucauaacgaaauucuggaguuggaugaaaaaguagacgaccuaagagcagauacaaucucuucccaaaucgagcuggccguucuccugucaaaugaaggaauuaucaacagugaggacgagcaccuucuggcuuuggaaaggaagcucaaaaagaugcugggcccuagcgcgguggagauugggaauggauguuucgaaaccaagcauaaaugcaaccagacuugcuuagauaagauagcagccgguaccuuugacgcuggcgaguucucccugcccacauuugauucucuaaauaucaccgccgcaagccucaacgacgaugggcuggacaaucacacuauucuuuuguauuacucaacagccgcuaguucccuggccgucacgcucaugaucgcaaucuucguggucuauauggugagccgggauaacguuucuuguucaauuugccugugaggacuagucccuguucccagagcccacuuuuuuuucuuuuuuugaaauaaaauagccugucuuucagaucucaaaggcucuuuucagagccaccaaaaaaaaaaaaaaaaaaaaaaaaaaaaaaaaaaaaaaaaaaaaaaaaaaaaaaaaaaaaaaaaaaaaaaaaaaaaaaaaaaaaaaaaaaaaaaaaaaaaa

SEQ ID NO: 14415 - RNA, 2024 nt, Artificial Sequence
  FLUBV/H0N0/B/Colorado/06/2017 BX-71__EPI1151760 hemagglutinin mRNA human (HA)
aggagagucccgcagucggcguccagcggcucugcuuguucgugugugugucguugcaggccuuauucaagcuuaccaugaaggccaucauugugcugcucauggucguuaccagcuccgcugacagaauaugcacaggcaucacuucuucaaacaguccccacgugguaaaaacggcaacccagggggaggugaaugucacaggagugauuccucuuacuaccacaccaaccaagagccauuucgccaaccugaaagguacugaaacaaggggcaaguuguguccgaaaugcuuaaauuguaccgaucuggacguugcgcuagggcggcccaagugcacgggaaagaucccuuccgcucgcgugucuauucuccacgagguccgaccagugacuucgggcuguuuucccaucaugcaugaucguaccaaaauaagacaacugccuaaccuucugagggguuacgaacacguacgguugucaacacauaauguuaucaacgccgagggggcaccaggaggccccuauaagauuggcacuagcgggaguugcccuaauaucaccaacggaaaugguuucuuugccacaauggcuugggcagugccagacaaaaacaagaccgccacgaauccgcucacuauugaaguccccuacguguguacagagggcgaggaucagaucaccguguggggguuccacuccgacacugaaacacagauggcuaaacuguauggagauucuaagccucagaaguuuaccagcuccgccaacggcgucacgacccacuacguuucacaaauagguggguucccaaaucagacagaggacggaggccgcccccagaguggcagaauugugguagauuauauggugcagaaaagcgggaagacuggaaccaucacauaccaaagggguauucugcucccucagaaagucuggugcgcgucuggccgguccaaggugaucaaagggucauuaccacugaucggagaagcagacugucuucaugagaaguauggcgguuugaacaaaagcaagcccuacuacacuggggagcacgccaaggcuauuggcaauugcccgauauggguuaaaaccccucugaagcuagccaacggaacaaaauaucgacccccagcaaagcuccugaaagaacgcggcuuuuucggggcuaucgccggauuucuugaggguggcugggaagggaugauugcgggauggcauggcuacaccagucacggugcccacgggguggcagucgcugccgaucugaagucuacucaggaggcuaucaacaagauaacgaaaaauuugaacucccucagcgaacuggaggugaagaauuuacagagacugucgggcgccauggacgagcuccauaacgaaauucuugagcuggaugaaaaaguagacgacuugagggcagauacaaucucuucccaaaucgagcuagccguucugcucucaaaugaaggaauuaucaacagugaggacgagcaucugcuugcucuggaacggaaguugaaaaagaugcucggcccuagcgcgguggagauugggaauggauguuucgaaaccaagcacaaaugcaaccagacuugccuggauaagauagcagccgguaccuuugacgcuggcgaguucuccuuacccacauuugauucucugaauaucaccgccgcaagccuaaacgacgaugggcucgacaaucacacuauucugcuuuauuacucaacagccgcuaguuccuuggccgucacgcugaugaucgcaaucuucguggucuauauggugagccgugauaacguuucuuguucaauuugccucugaggacuagucccuguucccagagcccacuuuuuuuucuuuuuuugaaauaaaauagccugucuuucagaucucaaaggcucuuuucagagccaccaaaaaaaaaaaaaaaaaaaaaaaaaaaaaaaaaaaaaaaaaaaaaaaaaaaaaaaaaaaaaaaaaaaaaaaaaaaaaaaaaaaaaaaaaaaaaaaaaaaaa

SEQ ID NO: 14416 - RNA, 2021 nt, Artificial Sequence
  FLUBV/H0N0/B/Washington/02/2019__EPI1368874 hemagglutinin mRNA human (HA)
aggagagucccgcagucggcguccagcggcucugcuuguucgugugugugucguugcaggccuuauucaagcuuaccaugaaggccaucauugugcugcucauggucguuaccagcaacgcugacagaauaugcacaggcaucacuuccucuaauucaccccacgugguaaaaacggcaacccagggggaagugaacgucacaggagugauuccucuuacuaccacaccaaccaagagucauuucgccaaucugaaagguacugaaacaaggggcaaguuguguccgaaaugcuuaaacuguaccgaucuggacguugcgcuagggcggcccaagugcacgggaaagaucccuagcgcucgcguguccauucuccacgagguccgaccagugacuucuggcuguuuucccaucaugcaugaucguaccaaaauaagacaacugccuaaucuucugagggguuacgaacacguacgguugucgacacauaacguuaucaaugccgaggacgcaccagggcgccccuaugaaauuggaacuucaggcagcugcccuaacaucaccaauggcaacggguucuuugccacaauggcuugggcagugccaaagaauaaaaccgccacgaacccgcucacuauugagguccccuacaucuguacagagggagaagaucagauaaccgugugggguuuccacagugacaaugagacucagauggcuaagcuguauggcgauuccaaaccucagaaguuuacaucuagcgccaacggggugaccacgcacuacgucucccaaauuggaggcuucccaaaucagaccgaagacggugggcugccccagucaggaagaaucguuguggauuauaugguacagaagaguggcaaaacaggcacuauuaccuaccaaagggggauccucuuaccucagaagguguggugcgcgagcggacggucuaaagucaucaaggguucccugccacuuauuggcgaggcagacuguuugcaugagaaauaugggggacugaacaagucaaaacccuacuacacaggcgaacacgccaaggcuauagguaacugcccgaucugggugaagacuccucuaaaacucgccaaugggaccaaguaucgacccccagcaaaacugcuuaaggagcgcggcuuuuucggagcuauugccggcuuucuggaagggggaugggaggguaugaucgcgggcuggcauggguacacaagccacggagcccacggcguugcaguggcugccgauuugaaaaguacccaggaagcuauaaacaagauuacuaagaaucucaacucucuguccgaguuagaggucaaaaaucugcagagacucagcggugccauggacgaacuucauaacgagauccuggaauuggaugagaagguggacgaccuaagggcagauacgaucucgucucaaauugaacuggccguacuccuguccaaugaggggaucauuaacucagaggacgaacaccuucuggcuuuggagcggaaacucaagaaaaugcugggcccuagugcgguugaaauaggaaauggcuguuucgagacaaagcauaagugcaaccagaccugcuuagaucguaucgcagccgggacuuuugacgcuggagaguucagccugcccaccuuugauucccuaaauauuacagccgcaucucucaacgacgauggucuggacaaucacaccauccuuuuguauuacagcacugccgcuucaagucuggccgugacacucaugaucgcaauuuucgucguguauauggucucccgcgauaacgugagcuguucuauaugccugugaggacuagucccuguucccagagcccacuuuuuuuucuuuuuuugaaauaaaauagccugucuuucagaucucaaaggcucuuuucagagccaccaaaaaaaaaaaaaaaaaaaaaaaaaaaaaaaaaaaaaaaaaaaaaaaaaaaaaaaaaaaaaaaaaaaaaaaaaaaaaaaaaaaaaaaaaaaaaaaaaaaaa

SEQ ID NO: 14417 - RNA, 2021 nt, Artificial Sequence
  FLUBV/H0N0/B/Washington/02/2019__EPI1422452 hemagglutinin mRNA human (HA)
aggagagucccgcagucggcguccagcggcucugcuuguucgugugugugucguugcaggccuuauucaagcuuaccaugaaggccaucauugugcugcucauggucguuaccagcaacgcugacagaauaugcacaggcaucacuuccucuaauucaccccacgugguaaaaacggcaacccagggggaagugaacgucacaggagugauuccucuuacuaccacaccaaccaagagucauuucgccaaucugaaagguacugaaacaaggggcaaguuguguccgaaaugcuuaaacuguaccgaucuggacguugcgcuagggcggcccaagugcacgggaaagaucccuagcgcucgcguguccauucuccacgagguccgaccagugacuucuggcuguuuucccaucaugcaugaucguaccaaaauaagacaacugccuaaucuucugagggguuacgaacacguacgguugucgacacauaacguuaucaaugccgaggacgcaccagggcgccccuaugaaauuggaacuucaggcagcugcccuaacaucaccaauggcaacggguucuuugccacaauggcuugggcagugccaaagaauaaaaccgccacgaacccgcucacuauugagguccccuacaucuguacagagggagaagaucagauaaccgugugggguuuccacagugacuccgagacucagauggcuaagcuguauggcgauucuaaaccucagaaguuuacaagcuccgccaauggggugaccacgcacuacgucucacaaauuggaggcuucccaaaccagaccgaagacggugggcugccccagaguggaagaaucguuguggauuauaugguacaaaagagcggcaaaacaggcacuauuaccuaccagagggggauccucuuaccucagaagguguggugcgcgucuggacgguccaaagucaucaaggguucacugccacuuauuggcgaggcagacuguuugcaugagaaauaugggggacugaauaagagcaaacccuacuacacaggcgaacacgccaaggcuauagguaacugcccgaucugggugaagacuccucuaaaacucgccaacgggaccaaguaucgacccccagcaaaacugcuuaaggagcgcggcuuuuucggagcuauugccggcuuucuggaagggggaugggaggguaugaucgcgggcuggcauggguacacaagucacggagcccacggcguugcaguggcugccgauuugaaaucuacccaggaagcuauaaauaagauuacuaagaaccucaauucccugagcgaguuagaggucaaaaaccugcagagacucucgggugccauggacgaacuucauaaugagauccuggaauuggaugagaagguggacgaccuaagggcagauacgaucucuucccaaauugaacuggccguacuccugucaaacgaggggaucauuaauagugaggacgaacaccuucuggcuuuggagcggaaacucaagaaaaugcugggcccuagcgcgguugaaauaggaaacggcuguuucgagacaaagcauaagugcaaucagaccugcuuagaucguaucgcagccgggacuuuugacgcuggagaguucucccugcccaccuuugauucucuaaacauuacagccgcaagccucaaugacgauggucuggacaaccacaccauccuuuuguauuacucaacugccgcuaguucccuggccgugacacucaugaucgcaauuuucgucguguauauggucagccgcgauaaugugucuuguucaauaugccugugaggacuagucccuguucccagagcccacuuuuuuuucuuuuuuugaaauaaaauagccugucuuucagaucucaaaggcucuuuucagagccaccaaaaaaaaaaaaaaaaaaaaaaaaaaaaaaaaaaaaaaaaaaaaaaaaaaaaaaaaaaaaaaaaaaaaaaaaaaaaaaaaaaaaaaaaaaaaaaaaaaaaa

SEQ ID NO: 14418 - RNA, 1682 nt, Artificial Sequence
  FLUAV/H1N1/A/California/7/2009__GQ906802 neuraminidase mRNA human (NA)
aggagagucccgcagucggcguccagcggcucugcuuguucgugugugugucguugcaggccuuauucaagcuuaccaugaaccccaaucagaagaucauuaccauaggcagcgugugcaugacaaucgggauggccaaccugauucuccaaaucggaaauauuaucuccauauggaucucucacucaauucagcuugguaaccagaaucagaucgagacuuguaaccaaagugucauuacguacgaaaauaacaccuggguuaaucagacauaugugaacaucagcaauacuaacuucgcugcaggccaguccguagugucugucaaacuggccggaaauucgucauugugcccugugagcggaugggcgauauacaguaaggacaacuccguuagaauuggcucuaaaggugauguguuugucaucagggagccauucauuagcuguuccccguuagaaugccggaccuuuuuccugacacagggggcucuacucaaugacaagcauucaaacggaaccaucaaagaucgcagucccuaucgaacucugaugagcuguccuaucggcgaggugccaucucccuacaacucccguuuugaaucaguagccuggagcgcaagugccugccacgacggcauuaauuggcuuacaauagggaucucuggaccugauaacggugcuguugcagugcugaaguauaauggcauuaucaccgacacgauaaaguccuggagaaacaauauuuugaggacucaagagagcgagugugccugcgucaacgggucguguuucaccgugaugacagauggaccaucuaauggccaggcuuccuacaaaaucuuucggaucgaaaaggguaaaauugugaagucagucgagaugaacgcccccaauuaucauuacgaagagugcaguuguuacccugacagcuccgagaucacuugcguuugccgcgauaacuggcacgggucuaauagaccaugggugagcuucaaccagaaucucgaauaucagauuggauacauauguucaggcaucuuuggcgacaacccgaggcccaaugauaaaaccgggaguugcggaccuguauccagcaacggugcgaacggcgugaagggguucucuuuuaaguauggaaauggcgucuggauuggucggacaaaaucaaucaguagccgcaacggguucgagaugaucugggacccaaauggcuggaccggaacggauaacaauuuuuccauuaagcaagacauagugggcaucaacgaauggucuggguacucggggagcuucguucagcaucccgagcugacuggucuggacuguauucgaccuugcuucuggguggaacucaucagaggcaggccaaaagagaauacaauuuggaccuccgggucaaguaucucuuuuuguggagucaacagcgauacugugggcugguccuggcccgacggugcagaguuaccguucacaauagauaagugaggacuagucccuguucccagagcccacuuuuuuuucuuuuuuugaaauaaaauagccugucuuucagaucucaaaggcucuuuucagagccaccaaaaaaaaaaaaaaaaaaaaaaaaaaaaaaaaaaaaaaaaaaaaaaaaaaaaaaaaaaaaaaaaaaaaaaaaaaaaaaaaaaaaaaaaaaaaaaaaaaaaa

SEQ ID NO: 14419 - RNA, 1682 nt, Artificial Sequence
  FLUAV/H1N1/A/Michigan/45/2015__EPI662593 neuraminidase mRNA human (NA)
aggagagucccgcagucggcguccagcggcucugcuuguucgugugugugucguugcaggccuuauucaagcuuaccaugaaccccaaucagaagaucauuaccauaggcagcaucugcaugacaauugggauggccaaccugauccuccaaauuggaaauaucauauccaucugggugucucacucaauucagaucgguaaccagagucagauugagacuuguaaucaaagcgucaucacguacgaaaacaauaccuggguuaaccagacauaugugaauauauccaacacuaauuucgcugcaggccagucuguagugucggucaaacuugccgggaacucaagccugugcccugugaguggaugggcgauuuacuccaaggacaauucuguuagaaucggcagcaaaggugauguguuugucauuagggagccauucaucuccuguucaccguuggaaugccggaccuuuuucuuaacacagggggcucugcuaaacgacaagcauaguaauggaaccaucaaagaucgcagccccuaucgaacucucaugucuuguccuauuggcgaggugccaucccccuacaacucacguuuugaaagcguagccuggagugcaucugccugccacgacggcauaaacuggcugacaaucgggauuuccggaccugauagcggugcuguugcagugcuuaaguauaauggcaucauaaccgacacgauuaagucguggagaaacaauauccugaggacucaagagucugagugugccugcgucaacggguccuguuucaccaucaugacagauggaccaucagacggccaggcuaguuacaaaauuuuucggaucgaaaaggguaaaauuauaaagagcguggagaugaaagcccccaauuaucauuacgaagagugcuccuguuacccugauucuagcgagaucacuugcgugugccgcgacaacuggcacgggucaaauagaccaugggucaguuucaaccagaauuuggaauaucagaugggauacauuuguuccggcguuuuuggcgauaacccgaggcccaaugacaagaccgggagcugcggaccugugucuucaaacggugcgaauggcguaaagggguucaguuuuaaauauggaaacggcguguggaucggucggacaaagagcaucuccucucgcaaaggguucgagaugauuugggauccaaauggcuggaccggaacggacaacaaguuuucgauaaaacaagacaucgucggcauuaacgaauggagcggguacuccggaucauucgugcagcaucccgagcucacuggucuggauuguauccgaccuugcuucuggguugaacugauuagaggcaggccagaggagaauacaaucuggaccagugggucuagcauauccuuuuguggagugaacucagacacugucggcuggagcuggcccgauggugcagaacucccguucacaaucgacaagugaggacuagucccuguucccagagcccacuuuuuuuucuuuuuuugaaauaaaauagccugucuuucagaucucaaaggcucuuuucagagccaccaaaaaaaaaaaaaaaaaaaaaaaaaaaaaaaaaaaaaaaaaaaaaaaaaaaaaaaaaaaaaaaaaaaaaaaaaaaaaaaaaaaaaaaaaaaaaaaaaaaaa

SEQ ID NO: 14420 - RNA, 1682 nt, Artificial Sequence
  FLUAV/H1N1/A/Netherlands/602/2009__AGU92703 neuraminidase mRNA human (NA)
aggagagucccgcagucggcguccagcggcucugcuuguucgugugugugucguugcaggccuuauucaagcuuaccaugaaccccaaucagaagaucauuaccauaggcagcgugugcaugacaaucgggauggccaaccugauucuccaaaucggaaauauuaucuccauauggaucucucacucaauucagcuugguaaccagaaucagaucgagacuuguaaccaaagugucauuacguacgaaaauaacaccuggguuaaucagacauaugugaacaucagcaauacuaacuucgcugcaggccaguccguagugucugucaaacuggccggaaauucgucauugugcccugugagcggaugggcgauauacaguaaggacaacuccguuagagugggcucuaaaggugaugucuuugugauuagggagccauucaucagcuguuccccguuagaaugccggaccuuuuuccugacacagggggcucuacucaaugacaagcauucaaacggaaccauuaaagaucgcagucccuaucgaacucugaugagcuguccuaucggcgagguaccaucucccuacaacucccguuuugaaucaguugccuggagcgcaagugccugccacgacggcaucaauuggcuuacaauugggauaucuggaccugauaacggugcuguggcaguccugaaguauaauggcaucauuaccgacacgaucaaguccuggagaaacaauauauugaggacucaagagagcgagugugccugcgugaacgggucguguuucaccgugaugacagauggaccaucuaauggccaggcuuccuacaaaauuuuucggaucgaaaaggguaaaaucgucaagucaguugagaugaacgcccccaauuaucauuacgaagagugcaguuguuacccugacagcuccgagauuacuugcgugugccgcgauaacuggcacgggucuaauagaccaugggugagcuucaaccagaaucucgaauaucagaucggauacauuuguucaggcauauuuggcgacaacccgaggcccaaugauaaaaccgggaguugcggaccuguauccagcaacggugcgaacggcgucaagggguucucuuuuaaguauggaaauggcguguggaucggucggacaaaaucaauuaguagccgcaacggguucgagaugaucugggacccaaauggcuggaccggaacggauaacaauuuuuccaucaagcaagacauuguuggcauaaacgaauggucuggguacucggggagcuucauccagcaucccgagcugacuggucuggacuguauucgaccuugcuucuggguggaacucaucagaggcaggccaaaagagaauacaauuuggaccuccgggucaaguaucucuuuuuguggagucaacagcgauacugugggcugguccuggcccgacggugcagaguuaccguucacaauagauaagugaggacuagucccuguucccagagcccacuuuuuuuucuuuuuuugaaauaaaauagccugucuuucagaucucaaaggcucuuuucagagccaccaaaaaaaaaaaaaaaaaaaaaaaaaaaaaaaaaaaaaaaaaaaaaaaaaaaaaaaaaaaaaaaaaaaaaaaaaaaaaaaaaaaaaaaaaaaaaaaaaaaaa

SEQ ID NO: 14421 - RNA, 1682 nt, Artificial Sequence
  FLUAV/H3N2/A/Hong Kong/4801/2014__EPI578429 neuraminidase mRNA human (NA)
aggagagucccgcagucggcguccagcggcucugcuuguucgugugugugucguugcaggccuuauucaagcuuaccaugaaccccaaucagaagaucauuaccauaggcagcgugucccugacaaucucuacuauuugcuucuuuaugcaaaucgccauucucaucacgaccgucacacuucacuucaaacaguacgaguuuaacucaccuccaaauaaccagguuaugcugugugaaccgacuauaaucgagagaaauauuaccgaaaucguguauuugacaaacaccacuauugagaaggaaaucugccccaaaccugcugaguacaggaauuggaguaagccacagugugggauaacaggauucgcacccuuuagcaaagacaacuccauucgguuaucugccgguggcgauaucuggguaacccgcgagccuuaugugucgugcgacccagauaaguguuaccaauucgcgcuggggcagggaacgacucuaaauaacguccauucaaauaacaccgugcgagaccguacacccuauagaacucuccugaugaaugaacuuggcguuccuuuucaccuggguaccaaacaggugugcauugcuuggagcaguuccucuugucaugaugggaaggccugguugcacgucugcaucacaggagacgauaagaacgcaaccgccagcuucaucuacaauggcaggcucguggacuccguaguuucauggaguaaagauauucugcggacgcaggagagcgaauguauaugcaucaacggcacuuguacaguggucaugaccgacgggucugcuuccggaaaggcagauacuaaaauucuguuuaucgaggaggguaagauagugcauacaucaacccucagcggcagugcccaacacguggaagagugcucuugcuauccacgcuacccgggggucagauguguuugcagggacaacuggaagggauccaaucggcccauuguggauaucaacaucaaagaccacagcauuguaucgucuuacguguguuccggcuuagucggugacacgccucgcaagaaugauucaaguagcuccucucauugccuggacccaaacaaugaagaagggggacacggcgugaaaggcugggcuuucgaugacgggaacgauguuuggaugggacgaaccaucaaugagacaagcagacuugguuaugagacuuuuaaggugauugagggcuggucaaaccccaaaaguaaguugcagaccaauaggcaggucauaguggaccguggggaucgguccggauacagcggcaucuucucuguagaagguaaaucauguauuaaccgcugcuuuuauguugagcugaucagagggaggaaggaagagacagaagugcuauggaccaguaauagcaucgucguguucuguggcacuuccggaacauacggcaccgggucuuggccugacggagccgaucucaaccugaugccaauuugaggacuagucccuguucccagagcccacuuuuuuuucuuuuuuugaaauaaaauagccugucuuucagaucucaaaggcucuuuucagagccaccaaaaaaaaaaaaaaaaaaaaaaaaaaaaaaaaaaaaaaaaaaaaaaaaaaaaaaaaaaaaaaaaaaaaaaaaaaaaaaaaaaaaaaaaaaaaaaaaaaaaa

SEQ ID NO: 14422 - RNA, 1673 nt, Artificial Sequence
  FLUBV/H0N0/B/Brisbane/60/2008__EPI173278 neuraminidase mRNA human (NA)
aggagagucccgcagucggcguccagcggcucugcuuguucgugugugugucguugcaggccuuauucaagcuuaccaugcugcccagcaccauccagacacucacucuuuuccugacguccggcgggguguuguuaucucuguacgucucagccagucuaagcuaucuccuguacuccgacauucuucugaaguuuucuccuaccgagauaacagcuccaacuaugccguuggauugcgcaaacgccucgaauguucaagcggugaacagaucagcuaccaaaggaguaacacuccugcugcccgaaccugaguggaccuauccaaggcucagcugucccgguaguacuuuccagaaggccuuacugaucuccccucaccgguuuggcgaaacaaaaggaaauucugcaccacuuauuauccgcgagcccuucauugccugcgggccuaacgaauguaagcauuuugcuuugacccacuacgcagcccagccaggcgguuauuacaaugggacgcgaggagaccguaacaaacugagacaucuaaucagcgugaagcucggcaagauaccgacugucgaaaauuccaucuuccacauggcugccuggucaggcagugcgugccaugaugggaaagaguggaccuauauuggaguggacggucccgauaacaaugcacugcuuaagguuaaauacggcgaggccuacacagacacuuaucacagcuacgcuaacaagauccugaggacccaggagucugccuguaauugcauugggggaaacuguuauuugaugaucacagauggcuccgcaucaggugugagcgaaugccgguuucucaaaauacgcgaggggagaauuaucaaggagauuuucccuaccggaagggucaagcacacggaagaguguacuugcggcuuugcuaguaauaaaacaaucgaaugugccugccgggacaacucuuacaccgcgaagcgcccauucgugaaacugaauguagagacugauacagccgaaauccgauuaaugugcaccgacacguaucuggauacccccagaccuaacgacggcuccauuacagggccaugugagagcaacggagauaaggguucgggcgggauaaaaggaggcuuuguucaucaaaggauggagucuaagaucggucggugguacucccguacuaugucaaaaaccgaacgcauggggaugggccucuaugugaaguacgacggagaccccugggcagauagugacgcucuugccuucagcggcgucaugguguccaugaaggagccggggugguacucuuuuggauucgaaauuaaagauaagaaaugcgacgugccuuguaucgguauagagaugguccacgauggcgggaaggaaacauggcauagcgcugccacugcaauuuauugccugaugggaucaggccaguugcuaugggacaccguuacagguguggauauggcccugugaggacuagucccuguucccagagcccacuuuuuuuucuuuuuuugaaauaaaauagccugucuuucagaucucaaaggcucuuuucagagccaccaaaaaaaaaaaaaaaaaaaaaaaaaaaaaaaaaaaaaaaaaaaaaaaaaaaaaaaaaaaaaaaaaaaaaaaaaaaaaaaaaaaaaaaaaaaaaaaaaaaaa

SEQ ID NO: 14423 - RNA, 1673 nt, Artificial Sequence
  FLUBV/H0N0/B/Phuket/3073/2013__EPI540672 neuraminidase mRNA human (NA)
aggagagucccgcagucggcguccagcggcucugcuuguucgugugugugucguugcaggccuuauucaagcuuaccaugcugcccagcaccauccagacacucacucuuuuccugacguccggcgggguguuguuaucucuguacgucucagccagucuaagcuaucuccuguacuccgacauucuucugaaguuuucuagaaccgagguuacagcuccuauaaugccauuggauugcgcaaacgccucgaaugugcaagcgguaaacaggucagcuacuaaaggagugaccccgcuccugcccgaaccugaguggacauauccacggcugagcugucccgguaguaccuuccagaaggcccucuuaaucuccccucaccgcuuuggcgaaacuaaaggaaauucugcaccacugauuauccgagagcccuucauugccugcgggccuaaggaauguaaacauuuugcucuuacacacuacgcagcccagccaggcgguuauuacaacgggacccgugaggacagaaauaaguugaggcaucugaucagcgucaagcuaggaaaaauaccgacgguggagaacuccaucuuccacauggcugccuggucaggcagugcgugccaugauggccgggaauggacuuauauugggguugacggacccgauagcaaugcacuccugaagaucaaauacggugaggccuacaccgacacauaucacucuuacgcuaagaacauucuucgcacucaggaauccgccuguaauugcaucggcggggauuguuaucugaugauaaccgacggaccugcaucaggcauuagcgagugcagauuuuugaaaaucagggagggucggauuaucaaggaaaucuucccaacagggcgcgugaagcacaccgaggaauguacgugcggauuugcuaguaacaaaacuauugagugugccugccgagauaauucuuacacagcgaagagacccuucgucaaacucaacguggaaaccgacacugccgagauaaggcugaugugcacaaagaccuauuuagauacgccucggccaaaugacggcuccaucaccggccccugugagagcgauggggacgaaggaucggguggcauuaaagggggauuuguacaucaacguauggcaucuaagaucggccgcugguacuccagaacaaugucaaaaacuaagaggauggguauggggcuguauguuaaguacgacggcgauccguggaccgacagugaggcucucgcccuuagcggagugauggucuccauggaggaaccuggcugguacucuuucggguuugaaauaaaagauaagaaaugcgacgugcccuguauuggaaucgagauggugcacgaugguggcaagacaacuuggcauagcgcugccaccgcaaucuauugccugauggggucaggacaguugcuaugggacacagucaccggcguuaacaugacucugugaggacuagucccuguucccagagcccacuuuuuuuucuuuuuuugaaauaaaauagccugucuuucagaucucaaaggcucuuuucagagccaccaaaaaaaaaaaaaaaaaaaaaaaaaaaaaaaaaaaaaaaaaaaaaaaaaaaaaaaaaaaaaaaaaaaaaaaaaaaaaaaaaaaaaaaaaaaaaaaaaaaaa

SEQ ID NO: 14424 - RNA, 1682 nt, Artificial Sequence
  FLUAV/H1N1/A/Brisbane/02/2018__EPI1212833 neuraminidase mRNA human (NA)
aggagagucccgcagucggcguccagcggcucugcuuguucgugugugugucguugcaggccuuauucaagcuuaccaugaaccccaaucagaagaucauuaccauaggcagcacaugcaugacuaucgggauggccaaccugauucuccaaaucggaaauauuaucuccauaugggugucucacucaauccagauugguaaccagagucagaucgagacguguaaucaaagcgucauuaccuacgaaaacaauacauggguuaaccagacuuaugugaauaucuccaacaccaauuucgcugcaagacagucuguagccucggugaaacuugcgggcaacucaagccugugcccugucagugggugggcuauauacuccaaggacaauucugugaggauuggaagcaaaggcgauguuuuugugauccgggagccauucauuuccuguucaccguuggaaugccgcacauuuuucuuaacccagggugcccugcuaaacgacaagcauaguaaugggacuaucaaagaucgaagccccuaucguacacucaugucuuguccuaucggagaggucccaucccccuacaacucaagauuugaaagcguggcauggagugccucugcuugccacgacggcaccaacuggcugacgauuggcauauccgggccugauagcggagcaguagccguucuuaaguauaaugguaucauuacugacaccaucaagucguggaggaacaauauacugcggacacaagagucugagugugcuugcgugaacggcuccuguuucacuauuaugaccgaugggccaucagacggacaggccaguuacaaaaucuuucgcaucgaaaagggcaaaauuaucaagagcgucgagaugaaagcgcccaauuaucauuacgaagagugcuccuguuacccugauucuagcgagauuacaugcgugugcagagacaacuggcacgguucaaauaggccaugggugaguuucaaccagaauuuggaauaucagaugggguacauauguuccggagucuuuggcgauaacccgcggcccaaugacaagaccggcagcugcgggccuguuucuucaaacggagcaaauggugugaagggcuucaguuuuaaauaugggaacggaguauggaucggccgcacuaagagcauuuccucucgaaaagguuucgagaugaucugggauccaaauggguggacgggcacagacaacaaguuuucgaucaaacaagacauugugggaauaaacgaauggagcggcuacuccgggucauucguccagcaucccgagcucaccggacuggauuguaucagaccuugcuucuggguggaacugauuaggggucggccagaggagaauacuaucuggacaaguggcucuagcauuuccuuuugugggguugacucagauaccgugggauggagcuggcccgacggcgccgaacucccguucacgaucgauaagugaggacuagucccuguucccagagcccacuuuuuuuucuuuuuuugaaauaaaauagccugucuuucagaucucaaaggcucuuuucagagccaccaaaaaaaaaaaaaaaaaaaaaaaaaaaaaaaaaaaaaaaaaaaaaaaaaaaaaaaaaaaaaaaaaaaaaaaaaaaaaaaaaaaaaaaaaaaaaaaaaaaaa

SEQ ID NO: 14425 - RNA, 1682 nt, Artificial Sequence
  FLUAV/H1N1/A/Guangdong-Maonan/SWL1536/2019__EPI1542569 neuraminidase mRNA human (NA)
aggagagucccgcagucggcguccagcggcucugcuuguucgugugugugucguugcaggccuuauucaagcuuaccaugaaccccaaucagaagaucauuaccauaggcagcaucugcaugacaauugggauggccaaccugauccuccaaauuggaaauaucauauccaucugggugucucacucaauucagaucgguaaccagagucagauugagacuuguaauaaaaacgucaucacguacgaaaauaacaccuggguuaaucaaacauaugugaacauaagcaauacuaacuccgcugcaagacagucuguagccucggugaaacuugcgggcaauucaagccugugcccugucagugggugggcuauuuacuccaaggacaacucugugaggaucggaagcaagggcgauguuuucgugauucgggagccauuuaucuccuguucaccguuggaaugccgcaccuucuuuuuaacacagggugcccugcuaaaugacaaacauaguaacgggaccaucaaggaucgaagccccuaucguacucucaugucuuguccuauuggagaggucccaucccccuacaacucaagauucgaaagcguggcauggagugccucugcuugccacgacggcacaaauuggcugaccauaggcaucuccgggccugauagcggagcaguagccguucuuaaguauaacgguauuaucacggacacuauaaaaucguggaggaauaacauucugcggacccaggagucugagugugcuugcgugaauggcuccuguuuuacaaucaugacugaugggccaucagacggacaagccaguuacaagaucuuccgcauugaaaaaggcaagaucauuaaaagcgucgagaugaaggcgcccaacuaucauuacgaagagugcuccuguuacccugauucuagcgagauaaccugcgugugcagagacaauuggcacgguucaaacaggccaugggugaguuuuaaucagaacuuggaauaucagaugggguacaucuguuccggagucuucggcgauaauccgcggcccaacgacaagacaggcagcugcgggccuguuucuucaaauggagcaaacggugugaaaggcuuuaguuucaaguaugggaauggaguauggauuggccgcaccaaaagcaucuccucucgaaaggguuuugagaugaucugggauccaaacggguggacgggcacugacaacaaauucucgaagaaacaggacauugugggaauaaaugaauggagcggcuacuccgggucauuuguccaacaucccgagcucacaggacugaacuguaucagaccuugcuucuggguggaacugauuaggggucggccagaggagaauaccaucuggacaaguggcucuagcauuuccuucugugggguugauucagacaucgugggauggagcuggcccgauggcgccgaacucccguuuacuauagacaagugaggacuagucccuguucccagagcccacuuuuuuuucuuuuuuugaaauaaaauagccugucuuucagaucucaaaggcucuuuucagagccaccaaaaaaaaaaaaaaaaaaaaaaaaaaaaaaaaaaaaaaaaaaaaaaaaaaaaaaaaaaaaaaaaaaaaaaaaaaaaaaaaaaaaaaaaaaaaaaaaaaaaa

SEQ ID NO: 14426 - RNA, 1682 nt, Artificial Sequence
  FLUAV/H3N2/A/Singapore/INFIMH-16-0019/2016__EPI1047603 neuraminidase mRNA human (NA)
aggagagucccgcagucggcguccagcggcucugcuuguucgugugugugucguugcaggccuuauucaagcuuaccaugaaccccaaucagaagaucauuaccauaggcagcgugucccugacaaucucuacuauuugcuucuuuaugcagaucgccauucucaucacgaccgucacacuucacuucaaacaguacgaguuuaacucaccuccaaauaaccagguuaugcugugugaaccgacuauaaucgagagaaauauuaccgaaaucguguauuugacaaacaccacuauugagaaggaaaucugccccaaaccugcugaguacaggaauuggaguaagccacagugugggauaacaggauucgcacccuuuagcaaagacaacuccauucgguuaucugccgguggcgauaucuggguaacccgcgagccuuaugugucgugcgacccagauaaguguuaccaauucgcgcuggggcagggaacgacucuaaauaacguccauucaaauaacaccgugcgagaccguacacccuauagaacucuccugaugaaugaacuuggcguuccuuuucaccuggguaccaaacaggugugcauugcuuggagcaguuccucuugucaugaugggaaggccugguugcacgucugcaucacaggagacgauaagaacgcaaccgccagcuucaucuacaauggcaggcucauugacuccgugguaucauggaguaaagauauacugcggacgcaggagagcgaauguguuugcaucaacggcacuuguacaguggucaugaccgacgggaacgcuacuggaaaggcagauacaaaaauucuguuuaucgaggaggguaagauagugcauaccucuaagcucuccggcucagcccaacacguggaagagugcagcugcuauccacgcuacccgggggucagauguguuugcagggacaauuggaaaggaaguaaccggcccauuguggauaucaauaucaaggaccacucuauuguauccagcuacguguguucgggcuuagucggugacacgccucgcaaaaacgauucuuccucaaguagccauugccugaauccaaacaaugaagaagggggacacggcgugaagggcugggcuuucgacgaugggaacgacguuuggaugggacgaaccaucaaugagacauccagacuugguuaugagacuuuuaaaguggucgagggcuggucuaaccccaagagcaaauugcagauuaauaggcaagugauaguagaucguggggaccggucaggauacaguggcaucuucuccguugaagguaagagcuguauuaaccgcugcuuuuauguggagcugaucagagggaggaaggaagagaccgaaguccuauggacaucuaauucaaucguggucuucuguggcaccaguggaacuuacggcacagggagcuggccugauggagccgaccucaaccugaugcauauuugaggacuagucccuguucccagagcccacuuuuuuuucuuuuuuugaaauaaaauagccugucuuucagaucucaaaggcucuuuucagagccaccaaaaaaaaaaaaaaaaaaaaaaaaaaaaaaaaaaaaaaaaaaaaaaaaaaaaaaaaaaaaaaaaaaaaaaaaaaaaaaaaaaaaaaaaaaaaaaaaaaaaa

SEQ ID NO: 14427 - RNA, 1682 nt, Artificial Sequence
  FLUAV/H3N2/A/Kansas/14/2017__EPI1146344 neuraminidase mRNA human (NA)
aggagagucccgcagucggcguccagcggcucugcuuguucgugugugugucguugcaggccuuauucaagcuuaccaugaaccccaaucagaagaucauuaccauaggcagcgugucccugacaaucucuacuauuugcuucuuuaugcagaucgccauucucaucacgaccgucacacuucacuucaaacaguacgaguuuaacucaccuccaaauaaccagguuaugcugugugaaccgacuauaaucgagagaaauauuaccgaaaucguguauuugacaaacaccacuauugagagggaaaucugccccaagccugcugaguaccggaauuggaguaaaccacagugugggauaacaggauucgcacccuuuagcaaggacaacuccauucgcuuaucugccgguggcgauaucuggguaacccgagagccuuaugugucgugcgacccagauaaauguuaccaauucgcgcuggggcagggaacgacuauuaauaacguccauucaaauaacaccgcucgugacagaacaccccacaggacucuacucaugaaugaacugggcgugccuuuucaucuugguaccaagcagguuugcaucgccuggagcaguuccucuugucacgaugggaaggcauggcugcaugugugcaucacaggagacgauaaaaacgccaccgcuagcuucauuuauaauggccgguuggucgacuccgugguaucauggaguaaggauauacuccgcacgcaggagagcgaauguguuugcaucaacggcacuuguacaguggucaugaccgacgggaacgcaacuggaaaagccgauacaaagauucuguuuaucgaggaggguaaaauagugcacaccucuaagcuguccggcucagcucaacacguggaagagugcagcugcuacccaagauauccgggggucagguguguuugccgggacaauuggaagggaaguaaccgccccauuguggauaucaauaucaaagaccauucuauuguauccagcuacguguguucgggccucgucggugacacgccucgaaagaccgauucuuccucaaguagccacugcuuaaacccaaauaacgaaaaagggggacauggcgugaagggcugggccuucgacgaugggaaugacguuuggaugggaagaacaaucaacgagacuuccaggcuggguuacgaaaccuuuaaaguggucgagggcuggucuaaucccaagagcaaacuucagauuaaccggcaagugauaguagaucguggggaccgcucaggauauaguggcaucuucuccguugaggguaagagcuguauuaauagaugcuuuuacguggaauugaucagggggcggaaggaggaaacagagguccuguggacuucuaacucaaucguggucuucuguggcaccaguggaacauauggcaccgggagcuggccugauggagcggaccuaaaucucaugcacauuugaggacuagucccuguucccagagcccacuuuuuuuucuuuuuuugaaauaaaauagccugucuuucagaucucaaaggcucuuuucagagccaccaaaaaaaaaaaaaaaaaaaaaaaaaaaaaaaaaaaaaaaaaaaaaaaaaaaaaaaaaaaaaaaaaaaaaaaaaaaaaaaaaaaaaaaaaaaaaaaaaaaaa

SEQ ID NO: 14428 - RNA, 1682 nt, Artificial Sequence
  FLUAV/H3N2/A/Kansas/14/2017-CDC-LV24A__EPI1444881 neuraminidase mRNA human (NA)
aggagagucccgcagucggcguccagcggcucugcuuguucgugugugugucguugcaggccuuauucaagcuuaccaugaaccccaaucagaagaucauuaccauaggcagcgugucccugacaaucucuacuauuugcuucuuuaugcagaucgccauucucaucacgaccgucacacuucacuucaaacaguacgaguuuaacucaccuccaaauaaccagguuaugcugugugaaccgacuauaaucgagagaaauauuaccgaaaucguguauuugacaaacaccacuauugagagggaaaucugccccaagccugcugaguaccggaauuggaguaaaccacagugugggauaacaggauucgcacccuuuagcaaggacaacuccauucgcuuaucugccgguggcgauaucuggguaacccgagagccuuaugugucgugcgacccagauaaauguuaccaauucgcgcuggggcagggaacgacuauuaauaacguccauucaaauaacaccgcucgugacagaacaccccacaggacucuacucaugaaugaacugggcgugccuuuucaucuugguaccaagcagguuugcaucgccuggagcaguuccucuugucacgaugggaaggcauggcugcaugugugcaucacaggagacgauaaaaacgccaccgcuagcuucauuuauaauggccgguuggucgacuccgugguaucauggaguaaggauauacuccgcacgcaggagagcgaauguguuugcaucaacggcacuuguacaguggucaugaccgacgggaacgcaacuggaaaagccgauacaaagauucuguuuaucgaggaggguaaaauagugcacaccucuaagcuguccggcucagcucaacacguggaagagugcagcugcuacccaagauauccgggggucagguguguuugccgggacaauuggaagggaaguaaccgccccauuguggauaucaauaucaaagaccauucuauuguauccagcuacguguguucgggccucgucggugacacgccucgaaagaccgauaacucuuccucaagucacugcuuaaauccaaacaaugaaaaagggggacauggcgugaagggcugggccuucgacgaugggaacgacguuuggaugggaagaacaaucaaugagacuagcaggcuggguuacgaaaccuuuaaaguggucgagggcugguccaaccccaagucuaaacuucagauuaaucggcaagugauaguagaucguggggaccgcagcggauauucaggcaucuucaguguugaggguaaguccuguauuaacagaugcuuuuacguggaauugaucagggggcggaaggaggaaacagagguccuguggacuagcaauucuaucguggucuucuguggcaccucaggaacauauggcaccgggaguuggccugauggagcggaccuaaaccucaugcacauuugaggacuagucccuguucccagagcccacuuuuuuuucuuuuuuugaaauaaaauagccugucuuucagaucucaaaggcucuuuucagagccaccaaaaaaaaaaaaaaaaaaaaaaaaaaaaaaaaaaaaaaaaaaaaaaaaaaaaaaaaaaaaaaaaaaaaaaaaaaaaaaaaaaaaaaaaaaaaaaaaaaaaa

SEQ ID NO: 14429 - RNA, 1682 nt, Artificial Sequence
  FLUAV/H3N2/A/Switzerland/8060/2017__EPI1154879 neuraminidase mRNA human (NA)
aggagagucccgcagucggcguccagcggcucugcuuguucgugugugugucguugcaggccuuauucaagcuuaccaugaaccccaaucagaagaucauuaccauaggcagcgugucccugacaaucucuacuauuugcuucuuuaugcaaaucgccauucucaucacgaccgucacacuucacuucaaacaguacgaguuuaacucaccuccaaauaaccagguuaugcugugugaaccgacuauaaucgagagaaauauuaccgaaaucguguauuugacaaacaccacuauugagaaggaaaucugccccaaaccugcugaguacaggaauuggaguaagccacagugugggauaacaggauucgcacccuuuagcaaagacaacuccauucgguuaucugccgguggcgauaucuggguaacccgcgagccuuaugugucgugcgacccagauaaguguuaccaauucgcgcuggggcagggaacgacucuaaauaacguccauucaaauaacaccgugcgagaccguacacccuauagaacucuccugaugaaugaacuuggcguuccuuuucaccuggguaccaaacaggugugcauggcuuggagcaguuccucuugucaugaugggaaggccugguugcacgucugcgugacaggagacgauaagaacgcaaccgccagcuucauuuacaauggcaggcucguagacuccguugugucauggaguaaagauauccugcggacgcaggagagcgaaugugucugcaucaacggcacuuguacaguggugaugaccgacgggaacgcuacuggaaaggcagauacaaaaauucuguuuauagaggaggguaagaucguccauaccucuaagcucuccggcucagcccaacacguugaagagugcagcugcuauccacgcuacccgggggugagauguguaugcagggacaauuggaaaggaaguaaccggcccauuguggauaucaauauaaaggaccacucuauugucuccagcuacguguguucgggcuuaguuggugacacgccucgcaaaucugauuccucaaguagcucccauugccugaacccaaauaacgaagaagggggacacggcgugaagggcugggcuuucgacgaugggaaugacgucuggaugggacgaaccaucaacgagacaucuagacuugguuaugagacuuuuaaagugguagagggcuggagcaauucaaagaguaaauugcagaucaacaggcagguuauuguggaucguggggaccgguccggauacagcggcaucuucucugucgaagguaagucauguauuaaucgcugcuuuuauguggagcugauaagagggaggaaggaagagaccgaaguccuauggacaaguaacagcaucgugguuuucuguggcacuuccggaaccuacggcacagggucuuggcccgauggagccgaccucaaucugaugcauauuugaggacuagucccuguucccagagcccacuuuuuuuucuuuuuuugaaauaaaauagccugucuuucagaucucaaaggcucuuuucagagccaccaaaaaaaaaaaaaaaaaaaaaaaaaaaaaaaaaaaaaaaaaaaaaaaaaaaaaaaaaaaaaaaaaaaaaaaaaaaaaaaaaaaaaaaaaaaaaaaaaaaaa

SEQ ID NO: 14430 - RNA, 1682 nt, Artificial Sequence
  FLUAV/H3N2/A/Switzerland/8060/2017(H3N2)-CDC-LV21A__EPI1364258 neuraminidase mRNA human (NA)
aggagagucccgcagucggcguccagcggcucugcuuguucgugugugugucguugcaggccuuauucaagcuuaccaugaaccccaaucagaagaucauuaccauaggcagcgugucccugacaaucucuacuauuugcuucuuuaugcaaaucgccauucucaucacgaccgucacacuucacuucaaacaguacgaguuuaacucaccuccaaauaaccagguuaugcugugugaaccgacuauaaucgagagaaauauuaccgaaaucguguauuugacaaacaccacuauugagaaggaaaucugccccaaaccugcugaguacaggaauuggaguaagccacagugugggauaacaggauucgcacccuuuagcaaagacaacuccauucgguuaucugccgguggcgauaucuggguaacccgcgagccuuaugugucgugcgacccagauaaguguuaccaauucgcgcuggggcagggaacgacucuaaauaacguccauucaaauaacaccgugcgagaccguacacccuauagaacucuccugaugaaugaacuuggcguuccuuuucaccuggguaccaaacaggugugcauggcuuggagcaguuccucuugucaugaugggaaggccugguugcacgucugcgugacaggagacgauaagaacgcaaccgccagcuucauuuacaauggcaggcucguagacuccguugugucauggaguaaagauauccugcggacgcaggagagcgaaugugucugcaucaacggcacuuguacaguggugaugaccgacgggaacgcuacuggaaaggcagauacaaaaauucuguuuauagaggaggguaagaucguccauaccucuaagcucuccggcucagcccaacacguugaagagugcagcugcuauccacgcuacccgggggugagauguguaugcagggacaauuggaaaggaaguaaccggcccauuguggauaucaauauaaaggaccacucuauugucuccagcuacguguguucgcgcuuaguuggcgacacgccucgaaaaucugauuccucaaguagcucccauugccugaacccaaauaacgaagagggugggcacggagugaagggcugggcuuucgacgauggcaaugacgucuggauggggagaaccaucaacgaaacaucuaggcuuggauaugagacuuuuaaagugguagaggguuggagcaauucaaagaguaaauugcagaucaaccggcagguuauuguggaucguggcgaccgcuccggguacagcggaaucuucucugucgaaggcaagucauguauuaauagaugcuuuuauguggagcugauaaggggucggaaggaagagaccgaaguccuauggacaaguaacagcaucgugguuuucugugggacuuccggcaccuacggaacaggcucuuggcccgauggggccgaccucaaucugaugcauauuugaggacuagucccuguucccagagcccacuuuuuuuucuuuuuuugaaauaaaauagccugucuuucagaucucaaaggcucuuuucagagccaccaaaaaaaaaaaaaaaaaaaaaaaaaaaaaaaaaaaaaaaaaaaaaaaaaaaaaaaaaaaaaaaaaaaaaaaaaaaaaaaaaaaaaaaaaaaaaaaaaaaaa

SEQ ID NO: 14431 - RNA, 1682 nt, Artificial Sequence
  FLUAV/H3N2/A/Hong Kong/2671/2019__EPI1543099 neuraminidase mRNA human (NA)
aggagagucccgcagucggcguccagcggcucugcuuguucgugugugugucguugcaggccuuauucaagcuuaccaugaaccccaaucagaagaucauuaccauaggcagcgugucccugacaaucucuacuauuugcuucuuuaugcagaucgccauucucaucacgaccgucacacuucacuucaaacaguacgaguuuaacucaccuccaaauaaccagguuaugcugugugaaccgacuauaaucgagagaaauauuaccgaaaucguguauuugacaaacaccacuauugagaaggaaaucugccccaaaccugcugaguacaggaauuggaguaagccacagugugggauaacaggauucgcacccuuuagcaaagacaacuccauucgguuaucugccgguggcgauaucuggguaacccgcgagccuuaugugucgugcgaccuggauaaguguuaccaauucgcgcuagggcagggaacgacucucaauaacguccauucaaauaacaccgugcgagaccguacaccauauagaacucugcuuaugaaugaacugggcguucccuuucacuuggguaccaaacaggugugcauugcuuggagcaguuccucuugucaugaugggaaggccuggcuccacgucugcaucacaggagacgauaagaacgcaaccgccagcuucaucuacaauggcaggcugguggacuccguaguuucauggaguaacgauauucugcggacgcaggagagcgaaugugugugcauaaacggcacuuguacagucgugaugaccgacgggaaugcuacuggaaaagcagauacaaagauccucuuuauugaggaggguaaaaucgugcauaccucuaaguuauccggcucagcccaacacgucgaagagugcagcugcuauccucgcuacccagggguuagaugugugugcagggacaacuggaagggaaguaaucggccgauaauugauaucaacaucaaagaccacucuauuguauccagcuacguguguucgggccuggucggugacacgccccgcaagucugauuccucaaguagcucccauugccuuaauccuaacaaugaagaagggggacacggcgugaaaggcugggcuuucgacgaugggaacgacguuuggaugggacgaaccaucaaugagacaucuagauuggguuaugagacuuuuaagguggucgagggcuggagcaacccaaaaucaaagcugcagauuaauaggcaagugauaguagaucguggggaccggaguggauacuccggcaucuucagcguugaagguaaaucuuguauuaaccgcugcuuuuauguggagcuaaucagagggaggaaggaagagaccgaaguccucuggacaucaaauaguaucguggucuucuguggcacuagcggaaccuacggcacaggguccuggcccgauggagccgaccugaaccuuaugcauaccugaggacuagucccuguucccagagcccacuuuuuuuucuuuuuuugaaauaaaauagccugucuuucagaucucaaaggcucuuuucagagccaccaaaaaaaaaaaaaaaaaaaaaaaaaaaaaaaaaaaaaaaaaaaaaaaaaaaaaaaaaaaaaaaaaaaaaaaaaaaaaaaaaaaaaaaaaaaaaaaaaaaaa

SEQ ID NO: 14432 - RNA, 1682 nt, Artificial Sequence
  FLUAV/H3N2/A/Hong Kong/45/2019__EPI1691929 neuraminidase mRNA human (NA)
aggagagucccgcagucggcguccagcggcucugcuuguucgugugugugucguugcaggccuuauucaagcuuaccaugaaccccaaucagaagaucauuaccauaggcagcgugucccugacaaucucuacuauuugcuucuuuaugcagaucgccauucucaucacgaccgucacacuucacuucaaacaguacgaguuuaacucacugccuaauaaccagguuauguugugugaaccaacuauaaucgagagaaauauuaccgaaaucguguauuuaacaaacaccacuauugagaaggaaaucugcccgaaacccgcugaguacaggaauuggaguaagccucagugugggauaacaggauucgcaccauuuagcaaagacaacuccauucggcugucugccgguggcgauaucuggguaacccgcgagcccuaugugucgugcgaccuagauaaguguuaccaauucgcgcucgggcagggaacgacucugaauaacguccauucaaauaacaccgugcgagaccguacaccuuauagaacucuucugaugaaugaauugggcguuccauuucaccucgguaccaaacaggugugcauugcuuggagcaguuccucuugucaugaugggaaggccuggcugcacgucugcaucacaggagacgauaagaacgcaaccgccagcuucaucuacaauggcaggcugguggacuccguaguuucauggaguaacgauauucuccggacgcaggagagcgaaugugugugcauaaacggcacuuguacagucgugaugaccgacgggaaugcuacuggaaaagcagauacaaagaucuuauuuauugaggaggguaaaaucgugcauaccucuaagcuguccggcucagcccaacacgucgaagagugcagcugcuauccccgcuacccugggguuagaugugugugcagggacaacuggaagggaaguaaucggccaauaauugauaucaacaucaaagaccacucuauuguauccagcuacguguguucgggccuugucggugacacgccgcgcaagucugauuccucaaguagcucccauugcuugaaucccaacaaugaagaagggggacacggcgugaaaggcugggcuuucgacgaugggaacgacguuuggaugggacgaaccaucaaugagacaucuagacuggguuaugagacuuuuaagguggucgagggcuggagcaacccuaaaucaaagcuacagauuaauaggcaagugauaguagaucguggggaccggaguggauacuccggcaucuucagcguugaagguaaaucuuguauuaaccgcugcuuuuauguggagcucaucagagggaggaaggaagagaccgaaguccuguggacaucaaauaguaucguggucuucuguggcacuagcggaaccuacggcacaggguccuggccagauggagccgaccuuaaccugaugcauauuugaggacuagucccuguucccagagcccacuuuuuuuucuuuuuuugaaauaaaauagccugucuuucagaucucaaaggcucuuuucagagccaccaaaaaaaaaaaaaaaaaaaaaaaaaaaaaaaaaaaaaaaaaaaaaaaaaaaaaaaaaaaaaaaaaaaaaaaaaaaaaaaaaaaaaaaaaaaaaaaaaaaaa

SEQ ID NO: 14433 - RNA, 1682 nt, Artificial Sequence
  FLUAV/H3N2/A/South Australia/34/2019__EPI1387330 neuraminidase mRNA human (NA)
aggagagucccgcagucggcguccagcggcucugcuuguucgugugugugucguugcaggccuuauucaagcuuaccaugaaccccaaucagaagaucauuaccauaggcagcgugucccugacaaucucuacuauuugcuucuuuaugcagaucgccauucucaucacgaccgucacacuucacuucaaacaguacgaguuuaacucaccuccaaauaaccagguuaugcugugugaaccgacuauaaucgagagaaauauuaccgaaaucguguauuugacaaacaccacuauugagaaggaaaucugccccaaaccugcugaguacaggaauuggaguaagccacagugugggauaacaggauucgcacccuuuagcaaagacaacuccauucgguuaucugccgguggcgauaucuggguaacccgcgagccuuaugugucgugcgaccuggauaaguguuaccaauucgcgcuagggcagggaacgacucucaauaacguccauucaaauaacaccgugcgagaccguacaccauauagaacucugcuuaugaaugaacugggcguucccuuucacuuggguaccaaacaggugugcauugcuuggagcaguuccucuugucaugaugggaaggccuggcuccacgucugcaucacaggagacgauaagaacgcaaccgccagcuucaucuacaauggcaggcugguggacuccguaguuucauggaguaacgauauucugcggacgcaggagagcgaaugugugugcauaaacggcacuuguacagucgugaugaccgacgggaaugcuacuggaaaagcagauacaaagauccucuuuauugaggaggguaaaaucgugcauaccucuaaguuauccggcucagcccaacacgucgaagagugcagcugcuauccucgcuacccagggguuagaugugugugcagggacaacuggaagggaaguaaucggccgauaauugauaucaacaucaaagaccacucuauuguaucccgcuacguguguagcggccuggucggugacacgccccgaaagucggauucuuccucaaguagccauugccuuaauccuaacaaugaaaaagggggacacggcgugaagggcugggcuuucgacgaugggaacgacguuuggaugggaagaaccaucaaugagacauccagguuggguuaugaaacuuuuaaaguggucgagggcuggucuaacccaaagagcaaacugcagauuaaucggcaagugauaguagaucguggggaccgcucaggauacaguggcaucuucuccguugaggguaagagcuguauuaacagaugcuuuuauguggaacuaaucagggggcggaaggaggaaaccgagguccucuggacaucuaauucaaucguggucuucuguggcaccaguggaacuuacggcacagggagcuggcccgauggagccgaccugaaccuuaugcauauuugaggacuagucccuguucccagagcccacuuuuuuuucuuuuuuugaaauaaaauagccugucuuucagaucucaaaggcucuuuucagagccaccaaaaaaaaaaaaaaaaaaaaaaaaaaaaaaaaaaaaaaaaaaaaaaaaaaaaaaaaaaaaaaaaaaaaaaaaaaaaaaaaaaaaaaaaaaaaaaaaaaaaa

SEQ ID NO: 14434 - RNA, 1670 nt, Artificial Sequence
  FLUAV/H7N9/A/chicken/Zhejiang/C483/2013(H7N9)__AGN69396.1 neuraminidase mRNA human (NA)
aggagagucccgcagucggcguccagcggcucugcuuguucgugugugugucguugcaggccuuauucaagcuuaccaugaaccccaaucagaagauccugugcaccagcgccacagcuauuauaaucggcgcaauugccgugcucaucgggauugcgaaccuuggacugaauaucgguuugcacuuaaaaccuggcuguaacugcucccauucucaaccagagacuacgaauaccucacagacaauaaucaacaauuacuauaacgaaacuaauauuaccaacauccagauggaggaaagaacaaguaggaauuucaacaaucugaccaaggggcuauguacuauuaacagcuggcacaucuacggaaaagacaaugcuguccggauaggcgaguccucugauguucucgugacacgcgaaccguauguaucgugcgaccccgaugagugucgauuuuacgcccugucacaggguaccacgauucgugggaagcauagcaacggaacuauccacgacagaagucaauauagggcacuuauuuccuggccucugucuagcccacccaccguguacaacucccgggucgagugcaucggcuggucaaguacaagcugucaugauggcaaaucucgcauguccaucugcauuucagggccuaauaacaaugccagcgcugugguuugguauaacagaaggccaguggcagaaauaaauacuugggcccggaacaucuugcgcacccaggagagugaaugugucugccacaauggagugugucccguaguuuucacagacgguucugcuaccggcccugccgauacgcgaauuuacuacuuuaaggaggggaagauccucaaaugggagucccugacuggaacagcgaagcacauagaagagugcagcugcuauggcgaaagaaccgguauuacuuguacaugcagggacaacuggcaggggucgaaucggccagugauccagaucgauccggucgcaaugacccauacgucucaauacauuuguucccccgugcugaccgacaacccucguccaaaugaucccaacaucggaaaaugcaaugacccuuauccaggcaacaauaacaacggcgugaagggguucucauaccucgauggagccaauacaugguuaggucgcacuauuaguaccgcuagcagauccggcuaugagaugcugaaaguccccaacgcccuuacagacgacaggucuaagccgauacaggggcagacuaucguuuugaaugcagauuggagcggauacucaggcaguuuuauggacuauugggcugaaggugauuguuaccgggccugcuucuacguggagcugauucgagggcgcccuaaggaggacaaaguaugguggaccuccaacagcaucgugucuauguguucaaguacagaauuucuaggccaguggaauuggcccgauggagcgaagaucgaguauuuccucugaggacuagucccuguucccagagcccacuuuuuuuucuuuuuuugaaauaaaauagccugucuuucagaucucaaaggcucuuuucagagccaccaaaaaaaaaaaaaaaaaaaaaaaaaaaaaaaaaaaaaaaaaaaaaaaaaaaaaaaaaaaaaaaaaaaaaaaaaaaaaaaaaaaaaaaaaaaaaaaaaaaaa

SEQ ID NO: 14435 - RNA, 1685 nt, Artificial Sequence
  FLUAV/H10N8/A/Jiangxi/IPB13/2013(H10N8)__AHK10769.1 neuraminidase mRNA human (NA)
aggagagucccgcagucggcguccagcggcucugcuuguucgugugugugucguugcaggccuuauucaagcuuaccaugaaccccaaucagaagaucauuaccauaggcagcgugucccuggggcucgucauccuuaacauucuguugcacaucguuucuauuacagugacuguauuagugcugccuggaaaugguaacaaugagucaugcaacgaaacggucaucagagaguacaaugaaaccgugaggguugagaaagugacacaauggcauaacacuaaugucauagaauauaucgagcggccagagaacgaccacuucaugaauaacaccgaagcccuaugugaugcuaagggcuuugcaccguucaguaaagacaaugggauucgcaucggaagccgaggccauguguuuguaauucgugagcccuucguuuccugcucuccuacagaauguagaaccuuuuuccucacucaggguucgcugcuuaacgauaagcacucaaaugggacagugaaagacaggagcccauaccggacccugaugagugucgagaucggacagucccccaacguguaucaggcccgcuuugaggcgguggcuuggucugccacggcaugccaugauggcaagaaguggaugacuauaggcgucaccgggccugacgccaaagcuguugcagugguacacuacggagguauuccaacagaugugaucaacagcugggccggcgacauuuugagaacucaagaauccucauguaccugcauccagggggaguguuucugggucaugacagauggacccgcuaauaggcaggcccaguaucgggcguuuaaggcaaaacaaggcaagaucgugggucaggccgaaauuaguuucaacgggggacacauagaggaaugcagcuguuacccuaaugagggcaaaguugagugcgugugucgcgacaacuggaccggcacgaaucgaccaguccucgugaucucuccggaucuguccuauagaguaggguaccugugcgcuggacuccccucagacacuccuaggggugaagauagccaguuuacaggcaguugcaccucuccaauggggaaccagggauacggcguuaaggguuucggguuucggcaaggcaaugacguguggaugggacguacuauuucccgcacaagcagaucgggcuucgagaucuuaaaggucaggaacgggugggugcaaaauucuaaagaacagauaaagcggcaggucgugguugacaaccugaauugguccggauauucagguaguuucacccuucccgccgaguugacgaaacgaaacugucuggugccuugcuuuuggguagaaaugauucgcggcaauccagaggagaagaccaucuggacaagcuccucuagcaucgucaugugugggguggaucaugaaauugcagacuggucauggcacgauggagcuauccuacccuucgacauugauaaaaugugaggacuagucccuguucccagagcccacuuuuuuuucuuuuuuugaaauaaaauagccugucuuucagaucucaaaggcucuuuucagagccaccaaaaaaaaaaaaaaaaaaaaaaaaaaaaaaaaaaaaaaaaaaaaaaaaaaaaaaaaaaaaaaaaaaaaaaaaaaaaaaaaaaaaaaaaaaaaaaaaaaaaa

SEQ ID NO: 14436 - RNA, 1673 nt, Artificial Sequence
  FLUBV/H0N0/B/Colorado/06/2017__EPI1001930 neuraminidase mRNA human (NA)
aggagagucccgcagucggcguccagcggcucugcuuguucgugugugugucguugcaggccuuauucaagcuuaccaugcugcccagcaccauccagacacucacucuuuuccugacguccggcgggguguuguuaucucuguacgucucagccagucuaagcuaucuccuguacuccgacauucuucugaaguuuucuccuaccgagauaacagcuccaacuaugccguuggauugcgcaaacgccucgaauguucaagcggugaacagaucagcuaccaaaggaguaacacuccugcugcccgaaccugaguggaccuauccaaggcucagcugucccgguaguacuuuccagaaggccuuacugaucuccccucaccgguuuggcgaaacaaaaggaaauucugcaccacuuauuauccgcgagcccuucguggccugcgggccuaacgaauguaagcauuuugcuuugacccacuacgcagcccagccaggcgguuauuacaaugggacgcgaggagaccguaacaaacugagacaucuaauuagcgucaagcucggcaagaucccgacuguggaaaauuccauauuccacauggcugccuggucaggcagugcgugccaugaugggaaagaguggaccuauaucggaguugacggucccgauaacaaugcacugcuuaaggugaaauacggcgaggccuacacagacacuuaucacagcuacgcuaacaauauucugaggacccaggagucugccuguaacugcaucgggggaaauuguuauuugaugauuacagauggcuccgcaucaggugucagcgaaugccgguuucucaagauccgcgaggggagaauaauuaaagagaucuucccuaccggaagggugaagcacacggaagaguguacuugcggcuuugcuaguaacaagacaauugaaugugccugccgggacaaucgcuacaccgcgaaacgaccauucguaaagcugaacguugagacugauacagccgaaaucagauuaaugugcaccgacacguaucuggauacccccaggccuaacgacggcucuaucacagggccaugugaguccgauggagacaaagguagcggcgggauuaagggaggcuuugugcaucaacggaugaaaucgaagauaggucguugguacucucgcacuaugucccagaccgagagaauggggaugggccucuaugucaaauacggaggcgaccccugggcagauucagacgcucuugccuucaguggggugauggugagcaugaaggaaccgggaugguacuccuuugguuucgagaucaaggauaaaaagugcgacgucccuuguauuggcaucgaaaugguucacgaugggggaaaagagacauggcauucugcugccacugcaauauauugccugaugggcagcggucaguugcuaugggacaccgugacagggguagauauggcccugugaggacuagucccuguucccagagcccacuuuuuuuucuuuuuuugaaauaaaauagccugucuuucagaucucaaaggcucuuuucagagccaccaaaaaaaaaaaaaaaaaaaaaaaaaaaaaaaaaaaaaaaaaaaaaaaaaaaaaaaaaaaaaaaaaaaaaaaaaaaaaaaaaaaaaaaaaaaaaaaaaaaaa

SEQ ID NO: 14437 - RNA, 1673 nt, Artificial Sequence
  FLUBV/H0N0/B/Washington/02/2019__EPI1368872 neuraminidase mRNA human (NA)
aggagagucccgcagucggcguccagcggcucugcuuguucgugugugugucguugcaggccuuauucaagcuuaccaugcugcccagcaccauccagacacucacucuuuuccugacguccggcgggguguuguuaucucuguacgucucagccagucuaagcuaucuccuguacuccgacauucuucugaaguuuucuccuaccgagauaacagcuccaacuaugccguuggauugcgcaaacgccucgaauguucaagcggugaacagaucagcuaccaaaggaguaacacuccugcugcccgaaccugaguggaccuauccaaggcucagcugucccgguaguacuuuccagaaggccuuacugaucuccccucaccgguuuggcgaaacaaaaggaaauucugcaccacuuauuauccgcgagcccuucguggccugcgggccuaacgaauguaagcauuuugcuuugacccacuacgcagcccagccaggcgguuauuacaaugggacgcgaggagaccguaacaaacugagacaucuaauuagcgucaagcucggcaagaucccgacuguggaaaauuccauauuccacauggcugccuggucaggcagugcgugccaugaugggaaagaguggaccuauaucggaguugacggucccgauaacaaugcacugcuuaaggugaaauacggcgaggccuacacagacacuuaucacagcuacgcuaacaauauucugaggacccaggagucugccuguaacugcaucgggggaaauuguuauuugaugauuacagauggcuccgcaucaggugucagcgaaugccgguuucucaagauccgcgaggggagaauaauuaaagagaucuucccuaccggaagggugaagcacacggaagaguguacuugcggcuuugcuaguaacaagacaauugaaugugccugccgggacaaucgcuacaccgcgaaacgaccauucguaaagcugaacguugagacugauacagccgaaaucagauuaaugugcaccgacacguaucuggauacccccaggccuaacgacggcucuaucacagggccaugugaguccgauggagacaaagguagcggcgggauuaagggaggcuuugugcaucaacggaugaaaucgaagauaggucguugguacucucgcacuauguccaaaaccgagagaauggggaugggccucuaugucaaguacggaggcgaccccugggcagauucagacgcucuuacauucaguggggugauggugagcaugaaggaaccgggaugguacuccuuugguuucgagaucaaagauaagaaaugcgacgucccuuguauuggcaucgaaaugguucacgaugggggaaaggagacuuggcauucugccgcuaccgccauauauugccugaugggcagcggucaguugcuaugggacacagugaccgggguagauauggcacugugaggacuagucccuguucccagagcccacuuuuuuuucuuuuuuugaaauaaaauagccugucuuucagaucucaaaggcucuuuucagagccaccaaaaaaaaaaaaaaaaaaaaaaaaaaaaaaaaaaaaaaaaaaaaaaaaaaaaaaaaaaaaaaaaaaaaaaaaaaaaaaaaaaaaaaaaaaaaaaaaaaaaa

SEQ ID NO: 14438 - RNA, 1918 nt, Artificial Sequence
  FLUAV/H1N1/A/California/7/2009__ACP41953 hemagglutinin mRNA gc (HA)
aggagaaagcuuaccaugaaggccauccuggugguccuccuguacaccuucgccaccgcgaacgccgacacgcugugcaucggcuaccacgccaacaacagcaccgacaccguggacaccgugcucgagaagaacgucacggugacccacuccgugaaccugcuggaggacaagcacaacgggaagcucugcaagcugcggggcgucgccccgcugcaccucgggaagugcaacaucgccggcuggauccuggggaacccggagugcgagagccuguccaccgcgagcuccuggagcuacaucguggagacccccuccagcgacaacggcacgugcuaccccggcgacuucaucgacuacgaggagcuccgcgagcagcuguccagcguguccagcuucgagcgguucgagaucuuccccaagaccuccagcuggccgaaccacgacuccaacaagggggucaccgccgccugcccccacgccggcgccaagagcuucuacaagaaccugaucuggcucgugaagaaggggaacuccuaccccaagcugagcaaguccuacaucaacgacaagggcaaggaggugcugguccucugggggauccaccaccccagcaccagcgcggaccagcagucccuguaccagaacgccgacgccuacguguucgugggcagcucccgcuacagcaagaaguucaagccggagaucgccauccggcccaagguccgcgaccaggagggccgcaugaacuacuacuggacccugguggagcccggggacaagaucaccuucgaggcgaccggcaaccucguggucccccgguacgccuucgccauggagcgcaacgccggguccggcaucaucaucagcgacacgccggugcacgacugcaacacgaccugccagacccccaagggcgccaucaacaccucccugcccuuccagaacauccaccccaucaccaucgggaagugcccgaaguacgucaagagcaccaagcugcggcucgcgaccggccugcgcaacauccccuccauccagagccgggggcuguucggcgccaucgccggguucaucgagggcggcuggacggggaugguggacggcugguacggguaccaccaccagaacgagcagggcagcggguacgccgccgaccucaaguccacgcagaacgcgaucgacgagaucaccaacaaggugaacagcgucaucgagaagaugaacacccaguucaccgccgugggcaaggaguucaaccaccuggagaagcggaucgagaaccugaacaagaaggucgacgacggcuuccucgacaucuggacguacaacgccgagcugcuggugcuccuggagaacgagcgcacccuggacuaccacgacuccaacgugaagaaccucuacgagaagguccggagccagcugaagaacaacgccaaggagaucgggaacggcugcuucgaguucuaccacaagugcgacaacacgugcauggaguccgugaagaacgggaccuacgacuaccccaaguacagcgaggaggccaagcugaaccgcgaggagaucgacggcgugaagcucgaguccacccggaucuaccagauccuggcgaucuacagcaccgucgccagcucccuggugcucguggucagccugggggccaucuccuucuggaugugcagcaacggcucccugcagugccgcaucugcaucugaggacuaguuauaagacugacuagcccgaugggccucccaacgggcccuccuccccuccuugcaccgagauuaauaaaaaaaaaaaaaaaaaaaaaaaaaaaaaaaaaaaaaaaaaaaaaaaaaaaaaaaaaaaaaaaaugcaucccccccccccccccccccccccccccccccaaaggcucuuuucagagccaccagaauu

SEQ ID NO: 14439 - RNA, 1918 nt, Artificial Sequence
  FLUAV/H1N1/A/Michigan/45/2015__EPI662594 hemagglutinin mRNA gc (HA)
aggagaaagcuuaccaugaaggccauccuggugguccuccuguacaccuucaccacggccaacgcggacacccugugcaucggcuaccacgccaacaacagcaccgacaccguggacacggugcucgagaagaacgucaccgugacccacuccgugaaccugcuggaggacaagcacaacgggaagcucugcaagcugcgcggcgucgcgccccugcaccucgggaagugcaacaucgccggcuggauccuggggaacccggagugcgagagccuguccaccgccagcuccuggagcuacaucguggagacguccaacagcgacaacgggaccugcuaccccggcgacuucaucaacuacgaggagcuccgggagcagcuguccagcguguccagcuucgagcgcuucgagaucuuccccaagaccuccagcuggcccaaccacgacuccaacaagggcgucaccgccgccugcccgcacgccggcgccaagagcuucuacaagaaccugaucuggcucgugaagaaggggaacuccuaccccaagcugaaccagagcuacaucaacgacaagggcaaggaggugcugguccucugggggauccaccaccccuccacgaccgcggaccagcagagccuguaccagaacgccgacgccuacguguucgugggcaccagccgguacuccaagaaguucaagcccgagaucgccacccgcccgaagguccgggaccaggagggccgcaugaacuacuacuggacgcugguggagcccggggacaagaucaccuucgaggccaccggcaaccucguggucccccgguacgcguucaccauggagcgcaacgccgggagcggcaucaucaucuccgacacgcccgugcacgacugcaacacgaccugccagaccccggagggcgccaucaacaccagccugcccuuccagaacauccaccccaucaccaucgggaagugccccaaguacgugaaguccaccaagcugcggcucgccaccggccugcgcaacgucccgagcauccagucccgggggcuguucggcgccaucgcgggguucaucgagggcggcuggacggggaugguggacggcugguacggguaccaccaccagaacgagcagggcagcggguacgccgccgaccucaaguccacccagaacgccaucgacaagaucaccaacaaggugaacagcgucaucgagaagaugaacacccaguucacggccgugggcaaggaguucaaccaccuggagaagcgcaucgagaaccugaacaagaaggucgacgacggcuuccucgacaucuggaccuacaacgcggagcugcuggugcuccuggagaacgagcggacccuggacuaccacgacuccaacgugaagaaccucuacgagaagguccgcaaccagcugaagaacaacgccaaggagaucgggaacggcugcuucgaguucuaccacaagugcgacaacacgugcauggagagcgugaagaacgggaccuacgacuaccccaaguacuccgaggaggccaagcugaaccgggagaagaucgacggcgugaagcucgagagcacccgcaucuaccagauccuggccaucuacuccaccgucgccagcucccuggugcucguggucagccugggggcgaucuccuucuggaugugcagcaacggcagccugcagugccggaucugcaucugaggacuaguuauaagacugacuagcccgaugggccucccaacgggcccuccuccccuccuugcaccgagauuaauaaaaaaaaaaaaaaaaaaaaaaaaaaaaaaaaaaaaaaaaaaaaaaaaaaaaaaaaaaaaaaaaugcaucccccccccccccccccccccccccccccccaaaggcucuuuucagagccaccagaauu

SEQ ID NO: 14440 - RNA, 1918 nt, Artificial Sequence
  FLUAV/H1N1/A/Netherlands/602/2009__ACQ45338 hemagglutinin mRNA gc (HA)
aggagaaagcuuaccaugaaggccauccuggugguccuccuguacaccuucgccaccgcgaacgccgacacgcugugcaucggcuaccacgccaacaacagcaccgacaccguggacaccgugcucgagaagaacgucacggugacccacuccgugaaccugcuggaggacaagcacaacgggaagcucugcaagcugcggggcgucgccccgcugcaccucgggaagugcaacaucgccggcuggauccuggggaacccggagugcgagagccuguccaccgcgagcuccuggagcuacaucguggagaccuccagcuccgacaacggcacgugcuaccccggcgacuucaucgacuacgaggagcuccgcgagcagcugagcuccgugagcuccuucgagcgguucgagaucuuccccaagaccagcuccuggcccaaccacgacagcaacaagggggucaccgccgccugcccgcacgccggcgcgaaguccuucuacaagaaccugaucuggcucgugaagaaggggaacagcuaccccaagcuguccaagagcuacaucaacgacaagggcaaggaggugcugguccucugggggauccaccaccccagcaccuccgccgaccagcagagccuguaccagaacgccgacgccuacguguucgugggcuccagccgcuacuccaagaaguucaagcccgagaucgccauccggccgaagguccgcgaccaggagggccggaugaacuacuacuggacgcugguggagcccggggacaagaucaccuucgaggcgaccggcaaccucguggucccccgcuacgccuucgccauggagcggaacgccgggagcggcaucaucaucuccgacacccccgugcacgacugcaacacgaccugccagaccccgaagggcgccaucaacaccagccugcccuuccagaacauccaccccaucacgaucgggaagugccccaaguacgugaaguccaccaagcugcgccucgcgaccggccugcggaacgucccgagcauccagucccgcgggcuguucggcgccaucgccggguucaucgagggcggcuggaccgggaugguggacggcugguacggguaccaccaccagaacgagcagggcagcggguacgccgccgaccucaaguccacgcagaacgcgaucgacgagaucaccaacaaggugaacagcgucaucgagaagaugaacacccaguucaccgccgugggcaaggaguucaaccaccuggagaagcggaucgagaaccugaacaagaaggucgacgacggcuuccucgacaucuggacguacaacgccgagcugcuggugcuccuggagaacgagcgcacccuggacuaccacgacuccaacgugaagaaccucuacgagaagguccggagccagcugaagaacaacgccaaggagaucgggaacggcugcuucgaguucuaccacaagugcgacaacaccugcauggaguccgugaagaacgggaccuacgacuaccccaaguacagcgaggaggccaagcugaaccgcgaggagaucgacggcgugaagcucgaguccacgcggaucuaccagauccuggcgaucuacagcaccgucgccagcucccuggugcucguggucagccugggggccaucuccuucuggaugugcagcaacggcucccugcagugccgcaucugcaucugaggacuaguuauaagacugacuagcccgaugggccucccaacgggcccuccuccccuccuugcaccgagauuaauaaaaaaaaaaaaaaaaaaaaaaaaaaaaaaaaaaaaaaaaaaaaaaaaaaaaaaaaaaaaaaaaugcaucccccccccccccccccccccccccccccccaaaggcucuuuucagagccaccagaauu

SEQ ID NO: 14441 - RNA, 1918 nt, Artificial Sequence
  FLUAV/H3N2/A/Hong Kong/4801/2014__EPI643118 hemagglutinin mRNA gc (HA)
aggagaaagcuuaccaugaagaccaucaucgcccugagcuacauccucugccugguguucgcccagaagauccccggcaacgacaacuccaccgcgacgcugugccucgggcaccacgccgucccgaacggcaccaucgugaagaccaucaccaacgaccgcaucgaggugacgaacgccaccgagcugguccagaacagcuccaucggggagaucugcgacagcccccaccagauccuggacggcgagaacugcacccucaucgacgcccugcugggggacccccagugcgacggcuuccagaacaagaagugggaccucuucguggagcgguccaaggccuacagcaacugcuaccccuacgacgugccggacuacgcgucccugcgcagccuggucgccuccagcggcacccucgaguucaacaacgaguccuucaacuggacgggggugacccagaacggcaccagcuccgccugcauccggcgcagcuccagcuccuucuucagccggcugaacuggcugacccaccucaacuacaaguaccccgcccugaacgugacgaugcccaacaacgagcaguucgacaagcuguacaucuggggcguccaccaccccgggaccgacaaggaccagaucuucccguacgcgcaguccagcgggcgcaucaucgugagcaccaagcggucccagcaggccgugauccccaacaucggcagccgcccccggauccgcgacaucccgucccggaucagcaucuacuggaccaucgucaagccgggcgacauccuccugaucaacuccacggggaaccugaucgccccgcgcggcuacuucaagcuccggagcgggaaguccagcaucaugcgcuccgacgcccccaucggcaagugcaagagcgagugcaucacccccaacggcuccaucccgaacgacaagcccuuccagaacgugaaccggaucaccuacggggccugcccccgcuacgugaagcacagcacccugaagcuggcgacgggcaugcggaacguccccgagaagcagacccgcgggaucuucggcgccaucgccggguucaucgagaacggcugggagggcaugguggacgggugguacggcuuccggcaccagaacuccgaggggcgcggccaggccgccgaccucaagagcacccaggcggccaucgaccagaucaacgggaagcugaaccggcugaucggcaagaccaacgagaaguuccaccagaucgagaaggaguucuccgagguggagggccgcauccaggaccucgagaaguacgucgaggacacgaagaucgaccuguggagcuacaacgccgagcugcucguggcccuggagaaccagcacaccaucgaccugaccgacuccgagaugaacaagcucuucgagaagaccaagaagcagcugcgcgagaacgccgaggacauggggaacggcugcuucaagaucuaccacaagugcgacaacgcgugcaucgggagcauccggaacggcacguacgaccacaacguguaccgcgacgaggcccugaacaaccgguuccagaucaagggggucgagcucaaguccggcuacaaggacuggauccuguggaucagcuucgccaucagcugcuuccugcucugcguggcccugcugggcuucaucaugugggccugccagaaggggaacauccgcugcaacaucugcaucugaggacuaguuauaagacugacuagcccgaugggccucccaacgggcccuccuccccuccuugcaccgagauuaauaaaaaaaaaaaaaaaaaaaaaaaaaaaaaaaaaaaaaaaaaaaaaaaaaaaaaaaaaaaaaaaaugcaucccccccccccccccccccccccccccccccaaaggcucuuuucagagccaccagaauu

SEQ ID NO: 14442 - RNA, 1975 nt, Artificial Sequence
  FLUBV/H0N0/B/Brisbane/60/2008__FJ766840 hemagglutinin mRNA gc (HA)
aggagaaagcuuaccaugaaggccaucaucgugcugcucauggucgugaccagcaacgccgaccggaucugcaccggcaucacguccagcaacuccccgcacguggucaagaccgcgacccagggggaggugaacgugaccggcgucaucccgcugacgaccacccccaccaagagccacuucgccaaccugaaagggacggagacccgcggcaagcucugccccaagugccugaacugcaccgaccuggacguggcccucgggcggcccaagugcaccggcaaaaucccguccgcccgcgugagcauccugcacgagguccggcccgugacguccggcugcuuccccaucaugcacgaccgcaccaagauccggcagcugcccaaccuccugcgcggguacgagcacauccggcugagcacccacaacgugaucaacgccgagaacgcgccgggcgggcccuacaagaucggcaccuccgggagcugccccaacaucacgaacggcaacggcuucuucgccaccauggccugggccguccccaagaacgacaagaacaaaaccgcgaccaacccgcucacgaucgaggugcccuacaucugcaccgagggggaggaccagaucaccguguggggcuuccacuccgacaacgagacccagauggccaagcuguacggggacagcaagccccagaaguucacguccagcgccaacggcgucaccacccacuacgugucccagaucggcggguuccccaaccagaccgaggacggcgggcugccgcagagcggccgcaucguggucgacuacauggugcagaaauccgggaagacgggcaccaucaccuaccagcggggcauccuccugccccagaagguguggugcgccagcgggcgcuccaaggucaucaaaggcagccugccccucaucggggaggccgacugccugcacgagaaguacggcgggcugaacaagagcaagcccuacuacaccggcgagcacgcgaaagccaucggcaacugcccgaucugggugaagacgccccucaagcuggccaacgggaccaaguaccggccgcccgccaaacugcucaaggagcgcggcuucuucggggccaucgcgggcuuccuggagggcgggugggagggcaugaucgccggguggcacggcuacaccucccacggggcccacggcguggccgucgccgcggaccucaagagcacccaggaggccaucaacaaaaucacgaagaaccugaacucccugagcgagcuggaggugaagaaccuccagcggcuguccggcgccauggacgagcugcacaacgagauccucgagcuggacgagaaggucgacgaccugcgcgccgacaccaucagcucccagaucgagcucgccgugcugcugagcaacgaggggaucaucaacuccgaggacgagcaccuccuggcgcuggagcggaaacucaagaagaugcugggccccagcgccguggagaucgggaacggcugcuucgagaccaagcacaagugcaaccagaccugccuggaccgcaucgccgccgggaccuucgacgcgggcgaguucucccuccccacguucgacagccugaacaucaccgccgccucccugaacgacgacggccuggacaaccacaccauccuccuguacuacagcaccgccgccuccagccuggcggucacgcucaugaucgccaucuucgugguguacauggucucccgggacaacgugagcugcuccaucugccugugaggacuaguuauaagacugacuagcccgaugggccucccaacgggcccuccuccccuccuugcaccgagauuaauaaaaaaaaaaaaaaaaaaaaaaaaaaaaaaaaaaaaaaaaaaaaaaaaaaaaaaaaaaaaaaaaugcaucccccccccccccccccccccccccccccccaaaggcucuuuucagagccaccagaauu

SEQ ID NO: 14443 - RNA, 1972 nt, Artificial Sequence
  FLUBV/H0N0/B/Phuket/3073/2013__EPI540671 hemagglutinin mRNA gc (HA)
aggagaaagcuuaccaugaaggccaucaucgugcugcucauggucgugaccagcaacgccgaccgcaucugcaccggcaucacguccagcaacuccccgcacguggucaagaccgcgacccagggggaggugaacgugaccggcgucaucccccugacgaccacccccaccaagagcuacuucgccaaccugaaggggacgcggacccgcggcaaacucugccccgacugccugaacugcaccgaccuggacguggcccucgggcggcccaugugcgugggcaccacgccguccgccaaggccagcauccugcacgagguccgccccgugaccuccggcugcuuccccaucaugcacgaccggaccaagauccgccagcugcccaaccuccugcggggguacgagaagauccgccugagcacccagaacgugaucgacgcggagaaagccccgggcgggcccuaccggcucggcacguccgggagcugccccaacgccaccuccaagaucggcuucuucgccaccauggcgugggccguccccaaggacaacuacaagaacgccaccaacccgcugacgguggaggugcccuacaucugcaccgagggcgaggaccagaucaccgucuggggguuccacagcgacaacaagacccagaugaaaucccuguacggcgacagcaacccccagaaguucacguccagcgccaacggggugaccacccacuacgugucccagaucggcgacuuccccgaccagaccgaggacggcgggcucccgcagagcggccgcaucgucguggacuacaugaugcagaagcccgggaagacgggcaccaucguguaccagcggggcguccugcugccccagaaaguguggugcgccuccgggcgcagcaaggugaucaagggcagccucccccugaucggggaggcggacugccugcacgaggaguacggcgggcucaacaaguccaaaccguacuacaccggcaagcacgccaaggccaucgggaacugccccaucugggucaagaccccgcugaaacuggccaacggcacgaaauaccggcccccggccaagcuccugaaggagcgcggcuucuucggggcgaucgccggcuuccuggagggcgggugggaggggaugaucgccggcuggcacggcuacaccagccacggggcccacggcguggccgucgcggccgaccucaaguccacccaggaggccaucaacaaaaucaccaagaaccugaacagccuguccgagcucgaggugaagaaccugcagcggcugagcggggccauggacgagcuccacaacgagauccuggagcuggacgagaagguggacgaccuccgcgccgacacgaucuccagccagaucgagcuggcgguccugcucuccaacgagggcaucaucaacagcgaggacgagcaccuccuggcccucgagcggaaacugaagaagaugcugggccccuccgccguggacaucgggaacggcugcuucgagaccaagcacaagugcaaccagaccugccucgaccgcaucgccgcggggaccuucaacgccggcgaguucagccugcccaccuucgacucccugaacaucacggccgccagccugaacgacgacgggcucgacaaccacaccauccugcuguacuacuccaccgccgcgagcucccucgccgugacccugaugcuggccaucuucaucgucuacauggugagccgggacaacguguccugcagcaucugccucugaggacuaguuauaagacugacuagcccgaugggccucccaacgggcccuccuccccuccuugcaccgagauuaauaaaaaaaaaaaaaaaaaaaaaaaaaaaaaaaaaaaaaaaaaaaaaaaaaaaaaaaaaaaaaaaaugcaucccccccccccccccccccccccccccccccaaaggcucuuuucagagccaccagaauu

SEQ ID NO: 14444 - RNA, 1912 nt, Artificial Sequence
  FLUAV/H1N1/A/Brisbane/02/2018__EPI1212834 hemagglutinin mRNA gc (HA)
aggagaaagcuuaccaugaaggccauccuggugguccuccuguacaccuucaccacggccaacgcggacacccugugcaucggcuaccacgccaacaacagcaccgacaccguggacacggugcucgagaagaacgucaccgugacccacuccgugaaccugcuggaggacaagcacaacgggaagcucugcaagcugggcggggucgcgccccugcaccucggcaagugcaacaucgccggguggauccugggcaacccggagugcgagagccuguccaccgcccgcagcugguccuacaucguggagacgagcaacuccgacaacgggaccugcuaccccggcgacuucaucaacuacgaggagcuccgggagcagcugagcuccgugagcuccuucgagcgcuucgagaucuuccccaagaccagcuccuggcccaaccacgacagcaacaagggcgucaccgccgccugcccgcacgccggggccaaguccuucuacaagaaccugaucuggcucgugaagaagggcaacagcuaccccaagcugaaccagacguacaucaacgacaaggggaaggaggugcugguccucuggggcauccaccacccgcccaccaccgcggaccagcagucccuguaccagaacgccgacgccuacguguucgugggcaccagccgguacuccaagaaguucaagcccgagaucgccacgcgccccaagguccgggaccgcgaggggcggaugaacuacuacuggacccugguggagcccggcgacaagaucaccuucgaggccaccgggaaccucguggucccccgcuacgcguucacgauggagcggaacgccggcagcggcaucaucaucagcgacaccccggugcacgacugcaacacgaccugccagaccgccgagggggccaucaacaccucccugcccuuccagaacgugcaccccgucaccaucggcaagugccccaaguacgucaagagcaccaagcugcgccucgccacggggcugcggaacgugccguccauccagagccgcggccuguucggggcgaucgccggcuucaucgagggcggguggaccggcaugguggacgggugguacggcuaccaccaccagaacgagcagggguccggcuacgccgccgaccucaagagcaacgccaucgacaagaucaccaacaaggugaacuccgucaucgagaagaugaacacccaguucacggcggugggcaaggaguucaaccaccuggagaagcggaucgagaaccugaacaagaagguggacgacggguuccucgacaucuggaccuacaacgccgagcugcugguccuccuggagaacgagcgcacccuggacuaccacgacagcaacgugaagaaccucuacgagaaggugcggaaccagcugaagaacaacgccaaggagaucggcaacgggugcuucgaguucuaccacaagugcgacaacacgugcauggaguccgucaagaacggcaccuacgacuaccccaaguacagcgaggaggccaagcugaaccgcgagaagaucgacggggugaagcucgaguccacccggaucuaccagauccuggccaucuacagcaccguggcguccagccugguccucguggugucccugggcgccaucagcuucuggaugugcuccaacggcagccugcagugccgcaucugcaucugaggacuaguuauaagacugacuagcccgaugggccucccaacgggcccuccuccccuccuugcaccgagauuaauaaaaaaaaaaaaaaaaaaaaaaaaaaaaaaaaaaaaaaaaaaaaaaaaaaaaaaaaaaaaaaaaugcaucccccccccccccccccccccccccccccccaaaggcucuuuucagagccaccagaauu

SEQ ID NO: 14445 - RNA, 1912 nt, Artificial Sequence
  FLUAV/H1N1/A/Brisbane/02/2018__EPI1671767 hemagglutinin mRNA gc (HA)
aggagaaagcuuaccaugaaggccauccuggugguccuccuguacaccuucaccacggccaacgcggacacccugugcaucggcuaccacgccaacaacagcaccgacaccguggacacggugcucgagaagaacgucaccgugacccacuccgugaaccugcuggaggacaagcacaacgggaagcucugcaagcugggcggggucgcgccccugcaccucggcaagugcaacaucgccggguggauccugggcaacccggagugcgagagccuguccaccgcccgcagcugguccuacaucguggagacgagcaacuccgacaacgggaccugcuaccccggcgacuucaucaacuacgaggagcuccgggagcagcugagcuccgugagcuccuucgagcgcuucgagaucuuccccaagaccagcuccuggcccaaccacgacagcaacaagggcgucaccgccgccugcccgcacgccggggccaaguccuucuacaagaaccugaucuggcucgugaagaagggcaacagcuaccccaagcugaaccagacguacaucaacgacaaggggaaggaggugcugguccucuggggcauccaccacccgcccaccaccgcggaccagcagucccuguaccagaacgccgacgccuacguguucgugggcaccagccgguacuccaagaaguucaagcccgagaucgccacgcgccccaagguccgggaccaggaggggcgcaugaacuacuacuggacccugguggagcccggcgacaagaucaccuucgaggccaccgggaaccucguggucccccgguacgcguucacgauggagcgcaacgccggcagcggcaucaucaucagcgacaccccggugcacgacugcaacacgaccugccagaccgccgagggggccaucaacaccucccugcccuuccagaacgugcaccccgucaccaucggcaagugccccaaguacgucaagagcaccaagcugcggcucgccacggggcugcgcaacgugccguccauccagagccggggccuguucggggcgaucgccggcuucaucgagggcggguggaccggcaugguggacgggugguacggcuaccaccaccagaacgagcagggguccggcuacgccgccgaccucaagagcaacgccaucgacaagaucaccaacaaggugaacuccgucaucgagaagaugaacacccaguucacggcggugggcaaggaguucaaccaccuggagaagcgcaucgagaaccugaacaagaagguggacgacggguuccucgacaucuggaccuacaacgccgagcugcugguccuccuggagaacgagcggacccuggacuaccacgacagcaacgugaagaaccucuacgagaaggugcgcaaccagcugaagaacaacgccaaggagaucggcaacgggugcuucgaguucuaccacaagugcgacaacacgugcauggaguccgucaagaacggcaccuacgacuaccccaaguacagcgaggaggccaagcugaaccgggagaagaucgacggggugaagcucgaguccacccgcaucuaccagauccuggccaucuacagcaccguggcguccagccugguccucguggugucccugggcgccaucagcuucuggaugugcuccaacggcagccugcagugccggaucugcaucugaggacuaguuauaagacugacuagcccgaugggccucccaacgggcccuccuccccuccuugcaccgagauuaauaaaaaaaaaaaaaaaaaaaaaaaaaaaaaaaaaaaaaaaaaaaaaaaaaaaaaaaaaaaaaaaaugcaucccccccccccccccccccccccccccccccaaaggcucuuuucagagccaccagaauu

SEQ ID NO: 14446 - RNA, 1912 nt, Artificial Sequence
  FLUAV/H1N1/A/Guangdong-Maonan/SWL1536/2019__EPI1542570 hemagglutinin mRNA gc (HA)
aggagaaagcuuaccaugaaggccauccuggugguccuccuguacaccuucaccacggccaacgcggacacccugugcaucggcuaccacgccaacaacagcaccgacaccguggacacggugcucgagaagaacgucaccgugacccacuccgugaaccugcuggaggacaagcacaacgggaagcucugcaagcugcgcggcgucgcgccccugcaccucgggaagugcaacaucgccggcuggauccuggggaacccggagugcgagagccuguccaccgcccggagcugguccuacaucguggagacgagcaacuccgacaacgggaccugcuaccccggcgacuucaucaacuacgaggagcuccgcgagcagcugagcuccgugagcuccuucgagcgguucgagaucuuccccaagaccagcuccuggcccaaccacgacagcgacaagggcgucaccgccgccugcccgcacgccggcgccaaguccuucuacaagaaccugaucuggcucgugaagaaggggaacagcuaccccaagcugaaccagacguacaucaacgacaagggcaaggaggugcugguccucugggggauccaccacccgcccaccaucgcggcccaggagucccuguaccagaacgccgacgccuacguguucgugggcaccagccgcuacuccaagaaguucaagcccgagaucgccacccggcccaagguccgcgaccaggagggccggaugaacuacuacuggacgcugguggagcccggggacaagaucaccuucgaggcgaccggcaaccucguggucccccgcuacgccuucaccauggagcgggacgccgggagcggcaucaucaucagcgacacgccggugcacgacugcaacacgaccugccagacccccgagggcgccaucaacaccucccugcccuuccagaacgugcaccccaucaccaucgggaagugcccgaaguacgucaagagcaccaagcugcgccucgccaccggccugcggaacgugcccuccauccagagccgcgggcuguucggcgcgaucgccggguucaucgagggcggcuggacggggaugguggacggcugguacggguaccaccaccagaacgagcagggcuccggguacgccgccgaccucaagagcaacgccaucgacaagaucaccaacaaggucaacuccgugaucgagaagaugaacacccaguucaccgcggucggcaaggaguucaaccaccuggagaagcggaucgagaaccugaacaagaagguggacgacggcuuccucgacaucuggacguacaacgccgagcugcuggugcuccuggagaacgagcgcacccuggacuaccacgacagcaacgucaagaaccucuacgagaaggugcggaaccagcugaagaacaacgccaaggagaucgggaacggcugcuucgaguucuaccacaagugcgacaacacgugcauggaguccgugaagaacgggaccuacgacuaccccaaguacagcgaggaggccaagcugaaccgcgagaagaucgacggcgucaagcucgaguccacccggaucuaccagauccuggccaucuacagcaccguggcguccagccuggugcucgucgugucccugggggccaucagcuucuggaugugcuccaacggcagccugcagugccgcaucugcaucugaggacuaguuauaagacugacuagcccgaugggccucccaacgggcccuccuccccuccuugcaccgagauuaauaaaaaaaaaaaaaaaaaaaaaaaaaaaaaaaaaaaaaaaaaaaaaaaaaaaaaaaaaaaaaaaaugcaucccccccccccccccccccccccccccccccaaaggcucuuuucagagccaccagaauu

SEQ ID NO: 14447 - RNA, 1912 nt, Artificial Sequence
  FLUAV/H1N1/A/Guangdong-Maonan/SWL1536/2019__EPI1590725 hemagglutinin mRNA gc (HA)
aggagaaagcuuaccaugaaggccauccuggugguccuccuguacaccuucaccacggccaacgcggacacccugugcaucggcuaccacgccaacaacagcaccgacaccguggacacggugcucgagaagaacgucaccgugacccacuccgugaaccugcuggaggacaagcacaacgggaagcucugcaagcugcgcggcgucgcgccccugcaccucgggaagugcaacaucgccggcuggauccuggggaacccggagugcgagagccuguccaccgcccggagcugguccuacaucguggagacgagcaacuccgacaacgggaccugcuaccccggcgacuucaucaacuacgaggagcuccgcgagcagcugagcuccgugagcuccuucgagcgguucgagaucuuccccaagaccagcuccuggcccaaccacgacagcgacaagggcgucaccgccgccugcccgcacgccggcgccaaguccuucuacaagaaccugaucuggcucgugaagaaggggaacagcuaccccaagcugaaccagacguacaucaacgacaagggcaaggaggugcugguccucugggggauccaccacccgcccaccaucgcggugcaggagucccuguaccagaacgccgacgccuacguguucgucggcaccagccgcuacuccaagaaguucaagcccgagaucgccacccggcccaaggugcgcgaccaggagggccggaugaacuacuacuggacgcugguggagcccggggacaagaucaccuucgaggccaccggcaaccucgucgugccccgcuacgcguucaccauggagcgggacgccgggagcggcaucaucaucagcgacacgccggugcacgacugcaacacgaccugccagacccccgagggcgccaucaacaccucccugcccuuccagaacguccaccccaucaccaucgggaagugcccgaaguacgucaagagcaccaagcugcgccucgccaccggccugcggaacgugcccuccauccagagccgcgggcuguucggcgccaucgcgggguucaucgagggcggcuggacggggaugguggacggcugguacggguaccaccaccagaacgagcagggcuccggguacgccgccgaccucaagagcaacgccaucgacaagaucaccaacaaggugaacuccgucaucgagaagaugaacacccaguucaccgccgugggcaaggaguucaaccaccuggagaagcggaucgagaaccugaacaagaagguggacgacggcuuccucgacaucuggacguacaacgcggagcugcugguccuccuggagaacgagcgcacccuggacuaccacgacagcaacgugaagaaccucuacgagaaggugcggaaccagcugaagaacaacgccaaggagaucgggaacggcugcuucgaguucuaccacaagugcgacaacacgugcauggaguccgucaagaacgggaccuacgacuaccccaaguacagcgaggaggccaagcugaaccgcgagaagaucgacggcgugaagcucgaguccacccggaucuaccagauccuggccaucuacagcaccguggccuccagccugguccucguggugucccugggggcgaucagcuucuggaugugcuccaacggcagccugcagugccgcaucugcaucugaggacuaguuauaagacugacuagcccgaugggccucccaacgggcccuccuccccuccuugcaccgagauuaauaaaaaaaaaaaaaaaaaaaaaaaaaaaaaaaaaaaaaaaaaaaaaaaaaaaaaaaaaaaaaaaaugcaucccccccccccccccccccccccccccccccaaaggcucuuuucagagccaccagaauu

SEQ ID NO: 14448 - RNA, 1918 nt, Artificial Sequence
  FLUAV/H3N2/A/Singapore/INFIMH-16-0019/2016__EPI1106227 hemagglutinin mRNA gc (HA)
aggagaaagcuuaccaugaagaccaucaucgcccugagcuacauccucugccugguguucgcccagaagauccccggcaacgacaacuccaccgcgacgcugugccucgggcaccacgccgucccgaacggcaccaucgugaagaccaucaccaacgaccgcaucgaggugacgaacgccaccgagcugguccagaacagcuccaucggggagaucugcgacagcccccaccagauccuggacggcgagaacugcacccucaucgacgcccugcugggggacccccagugcgacggcuuccagaacaagaagugggaccucuucguggagcgguccaaggccuacagcaacugcuaccccuacgacgugccggacuacgcgucccugcgcagccuggucgccuccagcggcacccucgaguucaagaacgaguccuucaacuggacgggggugacccagaacggcaccagcuccgccugcauccgggggagcuccagcuccuucuucagccgccugaacuggcugacccaccucaacuacacguaccccgcccugaacgugaccaugcccaacaaggagcaguucgacaagcuguacaucuggggcguccaccaccccgggaccgacaaggaccagaucuuccucuacgcgcaguccagcggccggaucaccgugagcacgaagcgcucccagcaggccgugaucccgaacaucggcagccggccccgcauccgggacauccccucccgcaucagcaucuacuggaccaucgucaagcccggggacauccugcugaucaacuccaccggcaaccucaucgccccgcggggguacuucaagauccgcagcggcaaguccagcaucaugcgguccgacgcccccaucggcaagugcaagagcgagugcaucacccccaacggguccauccccaacgacaagccguuccagaacgugaaccgcaucacguacggcgccugcccccgguacgugaagcacagcacccugaagcuggcgaccgggaugcgcaacguccccgagaagcagacccggggcaucuucggggccaucgccggcuucaucgagaacggcugggaggggaugguggacggcugguacggguuccgccaccagaacuccgagggccgggggcaggccgccgaccucaagagcacgcaggcggccaucgaccagaucaacggcaagcugaaccgccugaucggcaagaccaacgagaaguuccaccagaucgagaaggaguucuccgagguggaggggcggguccaggaccucgagaaguacguggaggacaccaagaucgaccuguggagcuacaacgccgagcugcucguggcccuggagaaccagcacaccaucgaccugacggacuccgagaugaacaagcuguucgagaagaccaagaagcagcuccgcgagaacgccgaggacaugggcaacgggugcuucaagaucuaccacaagugcgacaacgcgugcaucgagagcauccgcaacgagaccuacgaccacaacgucuaccgggacgaggcccugaacaaccgcuuccagaucaagggcguggagcucaaguccggguacaaggacuggauccuguggaucagcuucgccaucagcugcuuccugcucugcguggcccugcugggcuucaucaugugggccugccagaagggcaacauccggugcaacaucugcaucugaggacuaguuauaagacugacuagcccgaugggccucccaacgggcccuccuccccuccuugcaccgagauuaauaaaaaaaaaaaaaaaaaaaaaaaaaaaaaaaaaaaaaaaaaaaaaaaaaaaaaaaaaaaaaaaaugcaucccccccccccccccccccccccccccccccaaaggcucuuuucagagccaccagaauu

SEQ ID NO: 14449 - RNA, 1918 nt, Artificial Sequence
  FLUAV/H3N2/A/Singapore/INFIMH-16-0019/2016__EPI1341068 hemagglutinin mRNA gc (HA)
aggagaaagcuuaccaugaagaccaucaucgcccugagcuacauccucugccugguguucgcccagaagauccccggcaacgacaacuccaccgcgacgcugugccucgggcaccacgccgucccgaacggcaccaucgugaagaccaucaccaacgaccgcaucgaggugacgaacgccaccgagcugguccagaacagcuccaucggggagaucugcgacagcccccaccagauccuggacggcgagaacugcacccucaucgacgcccugcugggggacccccagugcgacggcuuccagaacaagaagugggaccucuucguggagcgguccaaggccuacagcaacugcuaccccuacgacgugccggacuacgcgucccugcgcagccuggucgccuccagcggcacccucgaguucaagaacgaguccuucaacuggacgggggugacccagaacggcaccagcuccgccugcauccgggggagcuccagcuccuucuucagccgccugaacuggcugacccaccucaacuacaaguaccccgcccugaacgugacgaugcccaacaaggagcaguucgacaagcuguacaucuggggcguccaccaccccgggaccgacaaggaccagaucuucccguacgcgcaguccagcggccggaucaccgugagcaccaagcgcucccagcaggccgugauccccaacaucggcagccggccccgcauccgggggauccccucccgcaucagcaucuacuggacgaucgucaagccgggcgacauccuccugaucaacuccaccgggaaccugaucgcgccccggggcuacuucaagauccgcagcggcaaguccagcaucaugcgguccgacgcccccaucgggaagugcaagagcgagugcaucacccccaacggcuccaucccgaacgacaagcccuuccagaacgugaaccgcaucaccuacggggccugcccccgguacgugaagcacagcacgcucaagcuggccaccggcaugcgcaacguccccgagaagcagacccgggggaucuucggcgccaucgccggcuucaucgagaacgggugggagggcaugguggacgggugguacggcuuccgccaccagaacuccgaggggcggggccaggccgccgaccucaagagcacccaggcggccaucgaccagaucaacggcaagcugaaccgccugaucgggaagacgaacgagaaguuccaccagaucgagaaggaguucuccgagguggagggccggguccaggaccuggagaaguacguggaggacaccaagaucgaccucuggagcuacaacgccgagcugcugguggcccucgagaaccagcacaccaucgaccugaccgacuccgagaugaacaagcuguucgagaagacgaagaagcagcuccgcgagaacgccgaggacauggggaacggcugcuucaagaucuaccacaagugcgacaacgcgugcaucgagagcauccgcaacgagaccuacgaccacaacgucuaccgggacgaggcccugaacaaccgcuuccagaucaaggggguggagcugaaguccggcuacaaggacuggauccucuggaucagcuucgccaucagcugcuuccugcugugcguggcccuccugggcuucaucaugugggccugccagaaggggaacauccggugcaacaucugcaucugaggacuaguuauaagacugacuagcccgaugggccucccaacgggcccuccuccccuccuugcaccgagauuaauaaaaaaaaaaaaaaaaaaaaaaaaaaaaaaaaaaaaaaaaaaaaaaaaaaaaaaaaaaaaaaaaugcaucccccccccccccccccccccccccccccccaaaggcucuuuucagagccaccagaauu

SEQ ID NO: 14450 - RNA, 1918 nt, Artificial Sequence
  FLUAV/H3N2/A/Singapore/INFIMH-16-0019/2016 NYMC-X-307__EPI1259099 hemagglutinin mRNA gc (HA)
aggagaaagcuuaccaugaagaccaucaucgcccugagcuacauccucugccugguguucgcccagaagauccccggcaacgacaacuccaccgcgacgcugugccucgggcaccacgccgucccgaacggcaccaucgugaagaccaucaccaacgaccgcaucgaggugacgaacgccaccgagcugguccagaacagcuccaucggggagaucugcgacagcccccaccagauccuggacggcgagaacugcacccucaucgacgcccugcugggggacccccagugcgacggcuuccagaacaagaagugggaccucuucguggagcgguccaaggccuacagcaacugcuaccccuacgacgugccggacuacgcgucccugcgcagccuggucgccuccagcggcacccucgaguucaagaacgaguccuucaacuggacgggggugacccagaacggcaccagcuccgccugcauccgggggagcuccagcuccuucuucagccgccugaacuggcugacccaccucaacuacaaguaccccgcccugaacgugacgaugcccaacaaggagcaguucgacaagcuguacaucuggggcguccaccaccccgggaccgacaaggaccagaucuucccguacgcgcaguccagcggccggaucaccgugagcaccaagcgcucccagcaggccgugauccccaacaucggcagccggccccgcauccgggggauccccucccgcaucagcaucuacuggacgaucgucaagccgggcgacauccuccugaucaacuccaccgggaaccugaucgcgccccggggcuacuucaagauccgcagcggcaaguccagcaucaugcgguccgacgcccccaucgggaagugcaagagcgagugcaucacccccaacggcuccaucccgaacgacaagcccuuccagaacgugaacaagaucaccuacggggccugcccccgcuacgugaagcacagcacgcucaagcuggccaccggcaugcggaacguccccgagaagcagacccgcgggaucuucggcgccaucgccggcuucaucgagaacgggugggagggcaugguggacgggugguacggcuuccggcaccagaacuccgaggggcgcggccaggccgccgaccucaagagcacccaggcggccaucgaccagaucaacggcaagcugaaccggcugaucgggaagacgaacgagaaguuccaccagaucgagaaggaguucuccgagguggagggccgcguccaggaccuggagaaguacguggaggacaccaagaucgaccucuggagcuacaacgccgagcugcugguggcccucgagaaccagcacaccaucgaccugaccgacuccgagaugaacaagcuguucgagaagacgaagaagcagcuccgggagaacgccgaggacauggggaacggcugcuucaagaucuaccacaagugcgacaacgcgugcaucgagagcauccgcaacgagaccuacgaccacaacgucuaccgcgacgaggcccugaacaaccgguuccagaucaaggggguggagcugaaguccggcuacaaggacuggauccucuggaucagcuucgccaucagcugcuuccugcugugcguggcccuccugggcuucaucaugugggccugccagaaggggaacauccgcugcaacaucugcaucugaggacuaguuauaagacugacuagcccgaugggccucccaacgggcccuccuccccuccuugcaccgagauuaauaaaaaaaaaaaaaaaaaaaaaaaaaaaaaaaaaaaaaaaaaaaaaaaaaaaaaaaaaaaaaaaaugcaucccccccccccccccccccccccccccccccaaaggcucuuuucagagccaccagaauu

SEQ ID NO: 14451 - RNA, 1918 nt, Artificial Sequence
  FLUAV/H3N2/A/Singapore/INFIMH-16-0019/2016-CDC-LV18A__EPI1583318 hemagglutinin mRNA gc (HA)
aggagaaagcuuaccaugaagaccaucaucgcccugagcuacauccucugccugguguucgcccagaagauccccggcaacgacaacuccaccgcgacgcugugccucgggcaccacgccgucccgaacggcaccaucgugaagaccaucaccaacgaccgcaucgaggugacgaacgccaccgagcugguccagaacagcuccaucggggagaucugcgacagcccccaccagauccuggacggcgagaacugcacccucaucgacgcccugcugggggacccccagugcgacggcuuccagaacaagaagugggaccucuucguggagcgguccaaggccuacagcaacugcuaccccuacgacgugccggacuacgcgucccugcgcagccuggucgccuccagcggcacccucgaguucaagaacgaguccuucaacuggacgggggugacccagaacggcaccagcuccgccugcauccgggggagcuccagcuccuucuucagccgccugaacuggcugacccaccucaacuacaaguaccccgcccugaacgugacgaugcccaacaaggagcaguucgacaagcuguacaucuggggcguccaccaccccgggaccgacaaggaccagaucuucccguacgcgcaguccagcggccggaucaucgugagcaccaagcgcucccagcaggccgugauccccaacaucggcagccggccccgcauccgggacauccccucccgcaucagcaucuacuggaccaucgucaagccgggggacauccuccugaucaacuccacgggcaaccugaucgcgccccggggguacuucaagauccgcagcggcaaguccagcaucaugcgguccgacgcccccaucggcaagugcaagagcgagugcaucacccccaacggguccaucccgaacgacaagcccuuccagaacgugaaccgcaucaccuacggcgccugcccccgguacgugaagcacagcacccucaagcuggccacggggaugcgcaacguccccgagaagcagacccggggcaucuucggggccaucgccggcuucaucgagaacggcugggaggggaugguggacggcugguacggguuccgccaccagaacuccgagggccgggggcaggccgccgaccucaagagcacccaggcggccaucgaccagaucaacggcaagcugaaccgccugaucggcaagaccaacgagaaguuccaccagaucgagaaggaguucuccgagguggaggggcggguccaggaccuggagaaguacguggaggacacgaagaucgaccucuggagcuacaacgccgagcugcugguggcccucgagaaccagcacaccaucgaccugaccgacuccgagaugaacaagcuguucgagaagaccaagaagcagcuccgcgagaacgccgaggacaugggcaacgggugcuucaagaucuaccacaagugcgacaacgcgugcaucgagagcauccgcaacgagacguacgaccacaacgucuaccgggacgaggcccugaacaaccgcuuccagaucaagggcguggagcugaaguccggguacaaggacuggauccucuggaucagcuucgccaucagcugcuuccugcugugcguggcccuccugggcuucaucaugugggccugccagaagggcaacauccggugcaacaucugcaucugaggacuaguuauaagacugacuagcccgaugggccucccaacgggcccuccuccccuccuugcaccgagauuaauaaaaaaaaaaaaaaaaaaaaaaaaaaaaaaaaaaaaaaaaaaaaaaaaaaaaaaaaaaaaaaaaugcaucccccccccccccccccccccccccccccccaaaggcucuuuucagagccaccagaauu

SEQ ID NO: 14452 - RNA, 1918 nt, Artificial Sequence
  FLUAV/H3N2/A/Kansas/14/2017__EPI1146345 hemagglutinin mRNA gc (HA)
aggagaaagcuuaccaugaagaccaucaucgcccugagcugcauccucugccugguguucgcccagaagauccccggcaacgacaacuccaccgcgacgcugugccucgggcaccacgccgucccgaacggcaccaucgugaagaccaucaccaacgaccgcaucgaggugacgaacgccaccgagcugguccagaacagcuccaucggggagaucugcgacagcccccaccagauccuggacggcgagaacugcacccucaucgacgcccugcugggggacccccagugcgacggcuuccagaacaagaagugggaccucuucguggagcggaacaaggccuacuccaacugcuaccccuacgacgugccggacuacgcgagccugcgcucccuggucgccagcuccggcacccucgaguucaacaacgagagcuucaacugggccggggugacgcagaacggcaccuccagcuccugcauccgggggagcaaguccagcuucuucucccgccugaacuggcugacccaccucaacagcaaguaccccgcccugaacgugaccaugcccaacaacgagcaguucgacaagcuguacaucuggggcguccaccaccccgggacggacaaggaccagaucucccucuacgcgcagagcagcggccggaucaccguguccaccaagcgcagccagcaggccgugaucccgaacaucggcucccggccccgcauccgggacauccccagccgcaucuccaucuacuggaccaucgucaagcccggggacauccugcugaucaacagcacgggcaaccucaucgccccgcggggguacuucaagauccgcuccggcaagagcuccaucaugcggagcgacgcccccaucggcaagugcaaguccgagugcaucacccccaacgggagcauccccaacgacaagccguuccagaacgugaaccgcaucaccuacggcgccugcccccgguacgugaagcaguccacccugaagcuggcgacggggaugcgcaacguccccgagcggcagacccgcggcaucuucggggccaucgccggcuucaucgagaacggcugggaggggaugguggacggcugguacggguuccggcaccagaacagcgagggccgcgggcaggccgccgaccucaaguccacccaggcggccaucgaccagaucaacggcaagcugaaccggcugaucggcaagaccaacgagaaguuccaccagaucgagaaggaguucagcgagguggaggggcgcauccaggaccucgagaaguacgucgaggacacgaagaucgaccugugguccuacaacgccgagcugcucguggcccuggagaaccagcacaccaucgaccugaccgacagcgagaugaacaagcuguucgagaagaccaagaagcagcuccgcgagaacgccgaggacaugggcaacgggugcuucaagaucuaccacaagugcgacaacgcgugcaugggcuccauccggaacgggacguacgaccacaacguguaccgcgacgaggcccugaacaaccgguuccagaucaagggcgucgagcucaagagcggcuacaaggacuggauccuguggaucagcuucgccaucuccugcuuccugcucugcguggcccugcugggguucaucaugugggccugccagaagggcaacauccgcugcaacaucugcaucugaggacuaguuauaagacugacuagcccgaugggccucccaacgggcccuccuccccuccuugcaccgagauuaauaaaaaaaaaaaaaaaaaaaaaaaaaaaaaaaaaaaaaaaaaaaaaaaaaaaaaaaaaaaaaaaaugcaucccccccccccccccccccccccccccccccaaaggcucuuuucagagccaccagaauu

SEQ ID NO: 14453 - RNA, 1918 nt, Artificial Sequence
  FLUAV/H3N2/A/Kansas/14/2017__EPI1261067 hemagglutinin mRNA gc (HA)
aggagaaagcuuaccaugaagaccaucaucgcccugagcugcauccucugccugguguucgcccagaagauccccggcaacgacaacuccaccgcgacgcugugccucgggcaccacgccgucccgaacggcaccaucgugaagaccaucaccaacgaccgcaucgaggugacgaacgccaccgagcugguccagaacagcuccaucggggagaucugcgacagcccccaccagauccuggacggcgagaacugcacccucaucgacgcccugcugggggacccccagugcgacggcuuccagaacaagaagugggaccucuucguggagcggaacaaggccuacuccaacugcuaccccuacgacgugccggacuacgcgagccugcgcucccuggucgccagcuccggcacccucgaguucaacaacgagagcuucaacugggccggggugacgcagaacggcaccuccagcuccugcauccgggggagcaaguccagcuucuucucccgccugaacuggcugacccaccucaacagcaaguaccccgcccugaacgugaccaugcccaacaacgagcaguucgacaagcuguacaucuggggcguccaccaccccgggacggacaagaaccagaucucccucuacgcgcagagcagcggccggaucaccguguccaccaagcgcagccagcaggccgugaucccgaacaucggcucccggccccgcauccgggacauccccagccgcaucuccaucuacuggaccaucgucaagcccggggacauccugcugaucacgagcaccggcaaccucaucgccccgcggggguacuucaagauccgcuccggcaagagcuccaucaugcggagcgacgcccccaucggcaagugcaaguccgagugcaucacccccaacgggagcauccccaacgacaagccguuccagaacgugaaccgcaucaccuacggcgccugcccccgguacgugaagcaguccacgcugaagcuggcgaccgggaugcgcaacguccccgagcggcagacccgcggcaucuucggggccaucgccggcuucaucgagaacggcugggaggggaugguggacggcugguacggguuccggcaccagaacagcgagggccgcgggcaggccgccgaccucaaguccacccaggcggccaucgaccagaucaacggcaagcugaaccggcugaucggcaagacgaacgagaaguuccaccagaucgagaaggaguucagcgagguggaggggcgcauccaggaccucgagaaguacgucgaggacaccaagaucgaccugugguccuacaacgccgagcugcucguggcccuggagaaccagcacaccaucgaccugaccgacagcgagaugaacaagcuguucgagaagacgaagaagcagcuccgcgagaacgccgaggacaugggcaacgggugcuucaagaucuaccacaagugcgacaacgcgugcaugggcuccauccggaacgggaccuacgaccacaacguguaccgcgacgaggcccugaacaaccgguuccagaucaagggcgucgagcucaagagcggcuacaaggacuggauccuguggaucagcuucgccaucuccugcuuccugcucugcguggcccugcugggguucaucaugugggccugccagaagggcaacauccgcugcaacaucugcaucugaggacuaguuauaagacugacuagcccgaugggccucccaacgggcccuccuccccuccuugcaccgagauuaauaaaaaaaaaaaaaaaaaaaaaaaaaaaaaaaaaaaaaaaaaaaaaaaaaaaaaaaaaaaaaaaaugcaucccccccccccccccccccccccccccccccaaaggcucuuuucagagccaccagaauu

SEQ ID NO: 14454 - RNA, 1918 nt, Artificial Sequence
  FLUAV/H3N2/A/Kansas/14/2017__EPI1691978 hemagglutinin mRNA gc (HA)
aggagaaagcuuaccaugaagaccaucaucgcccugagcugcauccucugccugguguucgcccagaagauccccggcaacgacaacuccaccgcgacgcugugccucgggcaccacgccgucccgaacggcaccaucgugaagaccaucaccaacgaccgcaucgaggugacgaacgccaccgagcugguccagaacagcuccaucggggagaucugcgacagcccccaccagauccuggacggcgagaacugcacccucaucgacgcccugcugggggacccccagugcgacggcuuccagaacaagaagugggaccucuucguggagcggaacaaggccuacuccaacugcuaccccuacgacgugccggacuacgcgagccugcgcucccuggucgccagcuccggcacccucgaguucaacaacgagagcuucaacugggccggggugacgcagaacggcaccuccagcuccugcauccgggggagcaaguccagcuucuucucccgccugaacuggcugacccaccucaacagcaaguaccccgcccugaacgugaccaugcccaacaacgagcaguucgacaagcuguacaucuggggcguccaccaccccgugacggacaagaaccagaucucccucuacgcgcagagcagcgggcggaucaccguguccaccaagcgcagccagcaggccgucaucccgaacaucggcuaccggccccgcauccgggacauccccucccgcaucagcaucuacuggaccaucgugaagcccggcgacauccugcugaucaacuccacggggaaccucaucgccccgcggggcuacuucaagauccgcagcgggaaguccagcaucaugcgguccgacgcccccaucggcaagugcaagagcgagugcaucacccccaacggcuccauccccaacgacaagccguuccagaacgugaaccgcaucaccuacggggccugcccccgguacgucaagcagagcacccugaagcuggcgacgggcaugcgcaacgugcccgagcggcagacccgcgggaucuucggcgccaucgccggguucaucgagaacggcugggagggcaugguggacgggugguacggcuuccggcaccagaacuccgaggggcgcggccaggccgccgaccucaagagcacccaggcggccaucgaccagaucaacgggaagcugaaccggcugaucggcaagaccaacgagaaguuccaccagaucgagaaggaguucuccgaggucgagggccgcauccaggaccucgagaaguacguggaggacacgaagaucgaccuguggagcuacaacgccgagcugcucguggcccuggagaaccagcacaccaucgaccugaccgacuccgagaugaacaagcuguucgagaagaccaagaagcagcuccgcgagaacgccgaggacauggggaacggcugcuucaagaucuaccacaagugcgacaacgcgugcauggggagcauccggaacggcacguacgaccacaacgucuaccgcgacgaggcccugaacaaccgguuccagaucaaggggguggagcucaaguccggcuacaaggacuggauccuguggaucagcuucgccaucagcugcuuccugcucugcguggcccugcugggcuucaucaugugggccugccagaaggggaacauccgcugcaacaucugcaucugaggacuaguuauaagacugacuagcccgaugggccucccaacgggcccuccuccccuccuugcaccgagauuaauaaaaaaaaaaaaaaaaaaaaaaaaaaaaaaaaaaaaaaaaaaaaaaaaaaaaaaaaaaaaaaaaugcaucccccccccccccccccccccccccccccccaaaggcucuuuucagagccaccagaauu

SEQ ID NO: 14455 - RNA, 1918 nt, Artificial Sequence
  FLUAV/H3N2/A/Kansas/14/2017 CBER-22B CDC19A__EPI1388416 hemagglutinin mRNA gc (HA)
aggagaaagcuuaccaugaagaccaucaucgcccugagcugcauccucugccugguguucgcccagaagauccccggcaacgacaacuccaccgcgacgcugugccucgggcaccacgccgucccgaacggcaccaucgugaagaccaucaccaacgaccgcaucgaggugacgaacgccaccgagcugguccagaacagcuccaucggggagaucugcgacagcccccaccagauccuggacggcgagaacugcacccucaucgacgcccugcugggggacccccagugcgacggcuuccagaacaagaagugggaccucuucguggagcggaacaaggccuacuccaacugcuaccccuacgacgugccggacuacgcgagccugcgcucccuggucgccagcuccggcacccucgaguucaacaacgagagcuucaacugggccggggugacgcagaacggcaccuccagcuccugcauccgggggagcaaguccagcuucuucucccgccugaacuggcugacccaccucaacagcaaguaccccgcccugaacgugaccaugcccaacaacgagcaguucgacaagcuguacaucuggggcguccaccaccccgugacggacaagaaccagaucucccucuacgcgcagagcagcgggcggaucaccguguccaccaagcgcagccagcaggccgucaucccgaacaucggcuaccggccccgcauccgggacauccccucccgcaucagcaucuacuggaccaucgugaagcccggcgacauccugcugaucaacuccacggggaaccucaucgccccgcggggcuacuucaagauccgcagcgggaaguccagcaucaugcgguccgacgcccccaucggcaagugcaagagcgagugcaucacccccaacggcuccauccccaacgacaagccguuccagaacgugaaccgcaucaccuacggggccugcccccgguacgucaagcagagcacccugaagcuggcgacgggcaugcgcaacgugcccgagcggcagacccgcgggaucuucggcgccaucgccggguucaucgagaacggcugggagggcaugguggacgggugguacggcuuccggcaccagaacuccgaggggcgcggccaggccgccgaccucaagagcacccaggcggccaucgaccagaucaacgggaagcugaaccggcugaucggcaagaccaacgagaaguuccaccagaucgagaaggaguucuccgaggucgagggccgcauccaggaccucgagaaguacguggaggacacgaagaucgaccuguggagcuacaacgccgagcugcucguggcccuggagaaccagcacaccaucgaccugaccgacuccgagaugaacaagcuguucgagaagaccaagaagcagcuccgcgagaacgccgaggacauggggaacggcugcuucaagaucuaccacaagugcgacaacgcgugcaucgggagcauccggaacggcacguacgaccacaacgucuaccgcgacgaggcccugaacaaccgguuccagaucaaggggguggagcucaaguccggcuacaaggacuggauccuguggaucagcuucgccaucagcugcuuccugcucugcguggcccugcugggcuucaucaugugggccugccagaaggggaacauccgcugcaacaucugcaucugaggacuaguuauaagacugacuagcccgaugggccucccaacgggcccuccuccccuccuugcaccgagauuaauaaaaaaaaaaaaaaaaaaaaaaaaaaaaaaaaaaaaaaaaaaaaaaaaaaaaaaaaaaaaaaaaugcaucccccccccccccccccccccccccccccccaaaggcucuuuucagagccaccagaauu

SEQ ID NO: 14456 - RNA, 1918 nt, Artificial Sequence
  FLUAV/H3N2/A/Switzerland/8060/2017__EPI1154878 hemagglutinin mRNA gc (HA)
aggagaaagcuuaccaugaagaccaucaucgcccugagcuacauccucugccugguguucgcccagaagauccccggcaacgacaacuccaccgcgacgcugugccucgggcaccacgccgucccgaacggcaccaucgugaagaccaucaccaacgaccgcaucgaggugacgaacgccaccgagcugguccagaacagcuccaucggggagaucugcgacagcccccaccagauccuggacggcgagaacugcacccucaucgacgcccugcugggggacccccagugcgacggcuuccagaacaagaagugggaccucuucguggagcgguccaaggccuacagcuccugcuaccccuacgacgugccggacuacgcgagccugcgcucccuggucgccagcuccggcacccucgaguucaacaacgagagcuucaacuggacgggggugaagcagaacggcaccuccagcgccugcauccggaaguccagcuccagcuucuucucccgccugaacuggcugacccaccucaacuacaccuaccccgcccugaacgugacgaugcccaacaacgagcaguucgacaagcuguacaucuggggcguccaccaccccgggaccgacaaggaccagaucuuccucuacgcgcagagcagcgggcggaucaccguguccaccaagcgcagccagcaggccgugaucccgaacaucggcucccggccccgcauccgggacauccccagccgcaucuccaucuacuggacgaucgucaagcccggcgacauccugcugaucaacagcaccgggaaccucaucgccccgcggggcuacuucaagauccaguccggcaagagcuccaucaugcgcagcgacgcccccaucgggaagugcaaguccgagugcaucacccccaacggcagcauccccaacgacaagccguuccagaacgugaaccggaucaccuacggggccugcccccgcuacgugaagcacuccacgcugaagcuggcgaccggcaugcggaacguccccgagaagcagacccgcgggaucuucggcgccaucgccggguucaucgagaacggcugggagggcaugguggacgggugguacggcuuccggcaccagaacagcgaggggcgcggccaggccgccgaccucaaguccacccaggcggccaucgaccagaucaacgggaagcugaaccggcugaucggcaagacgaacgagaaguuccaccagaucgagaaggaguucagcgagguggagggccgcauccaggaccucgagaaguacgucgaggacaccaagaucgaccugugguccuacaacgccgagcugcucguggcccuggagaaccagcacaccaucgaccugaccgacagcgagaugaacaagcuguucgagaagacgaagaagcagcuccgggagaacgccgaggacauggggaacggcugcuucaagaucuaccacaagugcgacaacgcgugcaucggguccauccgcaacggcaccuacgaccacaacguguaccgcgacgaggcccugaacaaccgguuccagaucaagggggucgagcucaagagcggcuacaaggacuggauccuguggaucagcuucgccaucuccugcuuccugcucugcguggcccugcugggcuucaucaugugggccugccagaaggggaacauccgcugcaacaucugcaucugaggacuaguuauaagacugacuagcccgaugggccucccaacgggcccuccuccccuccuugcaccgagauuaauaaaaaaaaaaaaaaaaaaaaaaaaaaaaaaaaaaaaaaaaaaaaaaaaaaaaaaaaaaaaaaaaugcaucccccccccccccccccccccccccccccccaaaggcucuuuucagagccaccagaauu

SEQ ID NO: 14457 - RNA, 1918 nt, Artificial Sequence
  FLUAV/H3N2/A/Switzerland/8060/2017__EPI1266285 hemagglutinin mRNA gc (HA)
aggagaaagcuuaccaugaagaccaucaucgcccugagcuacauccucugccugguguucgcccagaagauccccggcaacgacaacuccaccgcgacgcugugccucgggcaccacgccgucccgaacggcaccaucgugaagaccaucaccaacgaccgcaucgaggugacgaacgccaccgagcugguccagaacagcuccaucggggagaucugcgacagcccccaccagauccuggacggcgagaacugcacccucaucgacgcccugcugggggacccccagugcgacggcuuccagaacaagaagugggaccucuucguggagcgguccaaggccuacagcuccugcuaccccuacgacgugccggacuacgcgagccugcgcucccuggucgccagcuccggcacccucgaguucaacaacgagagcuucaacuggacgggggugaagcagaacggcaccuccagcgccugcauccggaaguccagcuccagcuucuucucccgccugaacuggcugacccaccucaacuacaaguaccccgcccugaacgugaccaugcccaacaacgagcaguucgacaagcuguacaucuggggcguccaccaccccgggacggacaaggaccagaucuucccguacgcgcagagcagcgggcggaucaccguguccaccaagcgcagccagcaggccgugauccccaacaucggcucccggccccgcauccgggacauccccagccgcaucuccaucuacuggaccaucgucaagccgggcgacauccuccugaucaacagcacggggaaccugaucgcgccccggggcuacuucaagauccaguccggcaagagcuccaucaugcgcagcgacgcccccaucgggaagugcaaguccgagugcaucacccccaacggcagcaucccgaacgacaagcccuuccagaacgugaaccggaucaccuacggggccugcccccgcuacgugaagcacuccacccucaagcuggccacgggcaugcggaacguccccgagaagcagacccgcgggaucuucggcgccaucgccggguucaucgagaacggcugggagggcaugguggacgggugguacggcuuccggcaccagaacagcgaggggcgcggccaggccgccgaccugaaguccacccaggcggccaucgaccagaucaacgggaagcucaaccggcugaucggcaagaccaacgagaaguuccaccagaucgagaaggaguucagcgagguggagggccgcauccaggaccuggagaaguacgucgaggacacgaagaucgaccucugguccuacaacgccgagcugcugguggcccucgagaaccagcacaccaucgaccugaccgacagcgagaugaacaagcuguucgagaagaccaagaagcagcuccgggagaacgccgaggacauggggaacggcugcuucaagaucuaccacaagugcgacaacgcgugcaucggguccauccgcaacggcacguacgaccacaacguguaccgcgacgaggcccugaacaaccgguuccagaucaagggggucgagcucaagagcggcuacaaggacuggauccuguggaucagcuucgccaucuccugcuuccugcugugcguggcccuccugggcuucaucaugugggccugccagaaggggaacauccgcugcaacaucugcaucugaggacuaguuauaagacugacuagcccgaugggccucccaacgggcccuccuccccuccuugcaccgagauuaauaaaaaaaaaaaaaaaaaaaaaaaaaaaaaaaaaaaaaaaaaaaaaaaaaaaaaaaaaaaaaaaaugcaucccccccccccccccccccccccccccccccaaaggcucuuuucagagccaccagaauu

SEQ ID NO: 14458 - RNA, 1918 nt, Artificial Sequence
  FLUAV/H3N2/A/Hong Kong/2671/2019__EPI1543098 hemagglutinin mRNA gc (HA)
aggagaaagcuuaccaugaagaccaucaucgcccugagcuacauccucugccugguguucacccagaagauccccggcaacgacaacuccacggccacccugugccucgggcaccacgcggucccgaacggcaccaucgugaagaccaucacgaacgaccgcaucgaggugaccaacgccaccgagcugguccagaacagcuccaucggggagaucugcgacagcccccaccagauccuggacggcgggaacugcacccucaucgacgcccugcugggcgacccccagugcgacggcuuccagaacaagaagugggaccucuucguggagcggucccgcgccuacagcaacugcuaccccuacgacgugccggacuacgccucccugcggagccuggucgcguccagcgggacgcucgaguucaagaacgaguccuucaacugggccggcgugacccagaacggcaagagcuucuccugcauccgcgggagcuccagcuccuucuucagccggcugaacuggcugacccaccucaacuacaccuaccccgcccugaacgugacgaugcccaacaaggagcaguucgacaagcuguacaucuggggcguccaccaccccgggaccgacaaggaccagaucucccucuacgcccagagcagcggccgcaucaccguguccaccaagcggagccagcaggcggugaucccgaacaucgggucccgcccccggauccgcgacauccccagccggaucuccaucuacuggacgaucgucaagcccggcgacauccugcugaucaacagcaccgggaaccucaucgccccgcgcggcuacuucaagauccgguccggcaagagcuccaucaugcgcagcgacgcccccaucgggaagugcaaguccgagugcaucacccccaacggcagcauccccaacgacaagccguuccagaacgugaaccggaucaccuacggggccugcccccgcuacgugaagcaguccacgcugaagcuggccaccggcaugcggaacguccccgagaagcagacccgcgggaucuucggcgcgaucgccggcuucaucgagaacgggugggagggcaugguggacgggugguacggcuuccggcaccagaacagcgaggggcgcggccaggccgccgaccucaaguccacccaggccgcgaucgaccagaucaacggcaagcugaaccggcugaucgggaagacgaacgagaaguuccaccagaucgagaaggaguucagcgagguggagggccgcguccaggaccucgagaaguacguggaggacaccaagaucgaccugugguccuacaacgccgagcugcucguggcccuggagaaccagcacaccaucgaccugaccgacagcgagaugaacaagcuguucgagaagacgaagaagcagcuccgcgagaacgccgaggacauggggaacggcugcuucaagaucuaccacaagugcgacaacgccugcaucggguccauccggaacgagaccuacgaccacaacgucuaccgcgacgaggcgcugaacaaccgguuccagaucaagggcguggagcucaagagcggcuacaaggacuggauccuguggaucagcuucgccaucuccugcuuccugcucugcguggcccugcugggguucaucaugugggccugccagaagggcaacauccgcugcaacaucugcaucugaggacuaguuauaagacugacuagcccgaugggccucccaacgggcccuccuccccuccuugcaccgagauuaauaaaaaaaaaaaaaaaaaaaaaaaaaaaaaaaaaaaaaaaaaaaaaaaaaaaaaaaaaaaaaaaaugcaucccccccccccccccccccccccccccccccaaaggcucuuuucagagccaccagaauu

SEQ ID NO: 14459 - RNA, 1918 nt, Artificial Sequence
  FLUAV/H3N2/A/Hong Kong/2671/2019__EPI1642843 hemagglutinin mRNA gc (HA)
aggagaaagcuuaccaugaagaccaucaucgcccugagcuacauccucugccugguguucacccagaagauccccggcaacgacaacuccacggccacccugugccucgggcaccacgcggucccgaacggcaccaucgugaagaccaucacgaacgaccgcaucgaggugaccaacgccaccgagcugguccagaacagcuccaucggggagaucugcgacagcccccaccagauccuggacggcgggaacugcacccucaucgacgcccugcugggcgacccccagugcgacggcuuccagaacaagaagugggaccucuucguggagcggucccgcgccuacagcaacugcuaccccuacgacgugccggacuacgccucccugcggagccuggucgcguccagcgggacgcucgaguucaagaacgaguccuucaacugggccggcgugacccagaacggcaagagcuucuccugcauccgcgggagcuccagcuccuucuucagccggcugaacuggcugacccaccucaacuacaucuaccccgcccugaacgugaccaugcccaacaaggagcaguucgacaagcuguacaucuggggcguccaccaccccgugacggacaaggaccagaucucccucuacgcccagagcagcgggcgcaucaccguguccaccaagcggagccagcaggcggucaucccgaacaucggcucccgcccccggauccgcaacauccccagccggaucuccaucuacuggaccaucgugaagcccggggacauccugcugaucaacagcacgggcaaccucaucgccccgcgcggguacuucaagauccgguccggcaagagcuccaucaugcgcagcgacgcccccaucggcaagugcaaguccgagugcaucacccccaacgggagcauccccaacgacaagccguuccagaacgugaaccggaucaccuacggcgccugcccccgcuacgucaagcaguccacccugaagcuggccacggggaugcggaacgugcccgagaagcagacccgcggcaucuucggggcgaucgccggcuucaucgagaacggcugggaggggaugguggacggcugguacggguuccggcaccagaacagcgagggccgcgggcaggccgccgaccucaaguccacccaggccgcgaucgaccagaucaacggcaagcugaaccggcugaucggcaagaccaacgagaaguuccaccagaucgagaaggaguucagcgaggucgaggggcgcgugcaggaccucgagaaguacguggaggacacgaagaucgaccugugguccuacaacgccgagcugcucgucgcccuggagaaccagcacaccaucgaccugaccgacagcgagaugaacaagcuguucgagaagaccaagaagcagcuccgcgagaacgccgaggacaugggcaacgggugcuucaagaucuaccacaagugcgacaacgccugcaucggcuccauccggaacgagacguacgaccacaacguguaccgcgacgaggcgcugaacaaccgguuccagaucaaggggguggagcucaagagcggcuacaaggacuggauccuguggaucagcuucgccaucuccugcuuccugcucugcgucgcccugcugggcuucaucaugugggccugccagaaggggaacauccgcugcaacaucugcaucugaggacuaguuauaagacugacuagcccgaugggccucccaacgggcccuccuccccuccuugcaccgagauuaauaaaaaaaaaaaaaaaaaaaaaaaaaaaaaaaaaaaaaaaaaaaaaaaaaaaaaaaaaaaaaaaaugcaucccccccccccccccccccccccccccccccaaaggcucuuuucagagccaccagaauu

SEQ ID NO: 14460 - RNA, 1918 nt, Artificial Sequence
  FLUAV/H3N2/A/Hong Kong/45/2019__EPI1691930 hemagglutinin mRNA gc (HA)
aggagaaagcuuaccaugaagaccaucaucgcccugagcuacauccucugccugggcuucacccagaagauccccgggaacgacaacuccacggccacccugugccucggccaccacgcggugccgaacgggaccaucgucaagaccaucacgaacgaccgcaucgaggugaccaacgccaccgagcuggugcagaacagcuccaucggcgagaucugcgacagcccccaccagauccuggacgggggcaacugcacccucaucgacgcccugcugggcgacccccagugcgacggguuccagaacaagaagugggaccucuucgucgagcggucccgcgccuacagcaacugcuaccccuacgacgugccggacuacgccucccugcggagccugguggcguccagcggcacgcucgaguucaagaacgaguccuucaacugggccggggucacccagaacggcaagagcuucuccugcauccgcgggagcuccagcuccuucuucagccggcugaacuggcugacccaccucaacuacaccuaccccgcccugaacgugacgaugcccaacaaggagcaguucgacaagcuguacaucuggggcgugcaccaccccggcaccgacaaggaccagaucucccucuacgcccagagcagcgggcgcaucaccgucuccaccaagcggagccagcaggcggugaucccgaacaucggcucccgcccccggauccgcgacauccccagccggaucuccaucuacuggacgaucgugaagcccggggacauccugcugaucaacagcaccggcaaccucaucgccccgcgcggcuacuucaagauccgguccggcaagagcuccaucaugcgcagcgacgcccccaucgggaagugcaaguccgagugcaucacccccaacgggagcauccccaacgacaagccguuccagaacgucaaccggaucaccuacggcgccugcccccgcuacgugaagcagaacacgcugaagcuggccaccgggaugcggaacgugcccgagaagcagacccgcggcaucuucggcgcgaucgccggguucaucgagaacggcugggaggggauggucgacggcugguacggguuccggcaccagaacuccgagggccgcggccaggccgccgaccucaagagcacccaggccgcgaucgaccagaucaacgggaagcugaaccggcugaucggcaagacgaacgagaaguuccaccagaucgagaaggaguucuccgagguggaggggcgcgugcaggaccucgagaaguacgucgaggacaccaagaucgaccuguggagcuacaacgccgagcugcucguggcccuggagaaccagcacaccaucgaccugaccgacuccgagaugaacaagcuguucgagaagacgaagaagcagcuccgcgagaacgccgaggacaugggcaacgggugcuucaagaucuaccacaagugcgacaacgccugcaucggcagcauccggaacgagaccuacgaccacaacguguaccgcgacgaggcgcugaacaaccgguuccagaucaagggcgucgagcucaaguccggguacaaggacuggauccuguggaucagcuucgccaucagcugcuuccugcucugcguggcccugcugggcuucaucaugugggccugccagaaggggaacauccgcugcaacaucugcaucugaggacuaguuauaagacugacuagcccgaugggccucccaacgggcccuccuccccuccuugcaccgagauuaauaaaaaaaaaaaaaaaaaaaaaaaaaaaaaaaaaaaaaaaaaaaaaaaaaaaaaaaaaaaaaaaaugcaucccccccccccccccccccccccccccccccaaaggcucuuuucagagccaccagaauu

SEQ ID NO: 14461 - RNA, 1918 nt, Artificial Sequence
  FLUAV/H3N2/A/South Australia/34/2019__EPI1387331 hemagglutinin mRNA gc (HA)
aggagaaagcuuaccaugaagaccaucaucgcccugagcuacauccucugccugguguucgcccagaagauccccggcaacgacaacuccaccgcgacgcugugccucgggcaccacgccgucccgaacggcaccaucgugaagaccaucaccaacgaccgcaucgaggugacgaacgccaccgagcugguccagaacagcuccaucggggagaucugcgacagcccccaccagauccuggacggcgggaacugcacccucaucgacgcccugcugggcgacccccagugcgacggcuuccagaacaagaagugggaccucuucguggagcggucccgcgccuacagcaacugcuaccccuacgacgugccggacuacgcgucccugcggagccuggucgccuccagcgggacccucgaguucaagaacgaguccuucaacuggacgggcgugaagcagaacgggaccagcuccgccugcauccgcggcagcuccagcuccuucuucagccggcugaacuggcugacccaccucaacuacaccuaccccgcccugaacgugacgaugcccaacaaggagcaguucgacaagcuguacaucuggggcguccaccaccccgggaccgacaaggaccagaucuuccucuacgcgcaguccagcggccgcaucaccgugagcaccaagcggucccagcaggccgugaucccgaacaucggguuccgcccccggauccgcgacauccccagccggaucuccaucuacuggacgaucgucaagcccggcgacauccugcugaucaacagcaccgggaaccucaucgccccgcgcggcuacuucaagauccgguccggcaagagcuccaucaugcgcagcgacgcccccaucgggaagugcaaguccgagugcaucacccccaacggcagcauccccaacgacaagccguuccagaacgugaaccggaucaccuacggggccugcccccgcuacgugaagcaguccacgcugaagcuggcgaccggcaugcggaacguccccgagaagcagacccgcgggaucuucggcgccaucgccggcuucaucgagaacgggugggagggcaugauggacgggugguacggcuuccggcaccagaacagcgaggggcgcggccaggccgccgaccucaaguccacccaggcggccaucgaccagaucaacggcaagcugaaccggcugaucgggaagacgaacgagaaguuccaccagaucgagaaggaguucagcgagguggagggccgcgugcaggaccucgagaaguacgucgaggacaccaagaucgaccugugguccuacaacgccgagcugcucguggcccuggagaaccagcacaccaucgaccugaccgacagcgagaugaacaagcuguucgagaagacgaagaagcagcuccgcgagaacgccgaggacauggggaacggcugcuucaagaucuaccacaagugcgacaacgcgugcaucggguccauccggaacgagaccuacgaccacaacguguaccgcgacgaggcccugaacaaccgguuccagaucaagggcgucgagcucaagagcggcuacaaggacuggauccuguggaucuccuucgccaucagcugcuuccugcucugcaucgcccugcugggguucaucaugugggccugccagaagggcaacauccgcugcaacaucugcaucugaggacuaguuauaagacugacuagcccgaugggccucccaacgggcccuccuccccuccuugcaccgagauuaauaaaaaaaaaaaaaaaaaaaaaaaaaaaaaaaaaaaaaaaaaaaaaaaaaaaaaaaaaaaaaaaaugcaucccccccccccccccccccccccccccccccaaaggcucuuuucagagccaccagaauu

SEQ ID NO: 14462 - RNA, 1918 nt, Artificial Sequence
  FLUAV/H3N2/A/South Australia/34/2019__EPI1440494 hemagglutinin mRNA gc (HA)
aggagaaagcuuaccaugaagaccaucaucgcccugagcuacauccucugccugguguucgcccagaagauccccggcaacgacaacuccaccgcgacgcugugccucgggcaccacgccgucccgaacggcaccaucgugaagaccaucaccaacgaccgcaucgaggugacgaacgccaccgagcugguccagaacagcuccaucggggagaucugcgacagcccccaccagauccuggacggcgggaacugcacccucaucgacgcccugcugggcgacccccagugcgacggcuuccagaacaagaagugggaccucuucguggagcggucccgcgccuacagcaacugcuaccccuacgacgugccggacuacgcgucccugcggagccuggucgccuccagcgggacccucgaguucaagaacgaguccuucaacuggacgggcgugaagcagaacgggaccagcuccgccugcauccgcggcagcuccagcuccuucuucagccggcugaacuggcugacccaccucaacuacaaguaccccgcccugaacgugaccaugcccaacaaggagcaguucgacaagcuguacaucuggggcguccaccaccccaucacggacaaggaccagaucuuccucuacgcgcaguccagcgggcgcaucaccgugagcaccaagcggucccagcaggccgugaucccgaacaucggcuuccgcccccggauccgcgacauccccagccggaucuccaucuacuggaccaucgucaagcccggggacauccugcugaucaacagcacgggcaaccucaucgccccgcgcggguacuucaagauccgguccggcaagagcuccaucaugcgcagcgacgcccccaucggcaagugcaaguccgagugcaucacccccaacgggagcauccccaacgacaagccguuccagaacgugaaccggaucaccuacggcgccugcccccgcuacgugaagcaguccacccugaagcuggcgacggggaugcggaacguccccgagaagcagacccgcggcaucuucggggccaucgccggcuucaucgagaacggcugggaggggaugauggacggcugguacggguuccggcaccagaacagcgagggccgcgggcaggccgccgaccucaaguccacccaggcggccaucgaccagaucaacggcaagcugaaccggcugaucggcaagaccaacgagaaguuccaccagaucgagaaggaguucagcgagguggaggggcgcgugcaggaccucgagaaguacgucgaggacacgaagaucgaccugugguccuacaacgccgagcugcucguggcccuggagaaccagcacaccaucgaccugaccgacagcgagaugaacaagcuguucgagaagaccaagaagcagcuccgcgagaacgccgaggacaugggcaacgggugcuucaagaucuaccacaagugcgacaacgcgugcaucggcuccauccggaacgagacguacgaccacaacguguaccgcgacgaggcccugaacaaccgguuccagaucaagggggucgagcucaagagcggcuacaaggacuggauccuguggaucuccuucgccaucagcugcuuccugcucugcaucgcccugcugggcuucaucaugugggccugccagaaggggaacauccgcugcaacaucugcaucugaggacuaguuauaagacugacuagcccgaugggccucccaacgggcccuccuccccuccuugcaccgagauuaauaaaaaaaaaaaaaaaaaaaaaaaaaaaaaaaaaaaaaaaaaaaaaaaaaaaaaaaaaaaaaaaaugcaucccccccccccccccccccccccccccccccaaaggcucuuuucagagccaccagaauu

SEQ ID NO: 14463 - RNA, 1900 nt, Artificial Sequence
  FLUAV/H7N9/A/chicken/Zhejiang/C483/2013(H7N9)__AGN69400.1 hemagglutinin mRNA gc (HA)
aggagaaagcuuaccaugaacacccagauccugguguucgcccucaucgccaucauccccaccaacgcggacaagaucugccugggccaccacgccgucagcaacgggacgaaggugaacacccugaccgagcgcggcguggaggucgugaacgccaccgagacgguggagcggaccaacaucccgcgcaucugcuccaaggggaagaagaccgucgaccucggccagugcgggcugcugggcaccaucacgggcccgccccagugcgaccaguuccucgaguucagcgccgaccugaucaucgagcggcgcgagggguccgacgugugcuaccccggcaaguucgugaacgaggaggcccugcggcagauccuccgcgagagcgggggcaucgacaaggaggcgaugggguucaccuacuccggcauccggaccaacggcgccaccagcgccugccgccgguccgggagcuccuucuacgccgagaugaaguggcugcugagcaacacggacaacgcggccuucccgcagaugaccaaguccuacaagaacacccgcaagagccccgcccucaucgucuggggcauccaccacuccgugagcaccgccgagcagacgaagcuguacggguccggcaacaagcuggugaccgucggcagcuccaacuaccagcagagcuucgugcccucccccggggcccggccccaggugaacggccagagcgggcgcaucgacuuccacuggcucaugcugaaccccaacgacaccgucaccuucagcuucaacggcgcguucaucgcccccgaccgggccuccuuccugcgcggcaagagcauggggauccaguccggcguccagguggacgccaacugcgagggggacugcuaccacagcggcgggacgaucaucuccaaccuccccuuccagaacaucgacagccgggccgugggcaagugcccgcgcuacgugaagcagcggucccugcugcucgcgaccgggaugaagaacgugcccgagauccccaagggccgcggccuguucggggccaucgccggcuucaucgagaacgggugggagggccugaucgacgggugguacggcuuccggcaccagaacgcccagggcgaggggaccgccgcggacuacaagagcacccaguccgccaucgaccagaucacgggcaagcucaaccgccugaucgagaagaccaaccagcaguucgagcugaucgacaacgaguucaacgaggucgagaagcagaucgggaacgugaucaacuggacccgggacagcaucaccgaggugugguccuacaacgccgagcuccuggucgccauggagaaccagcacacgaucgaccuggccgacagcgagauggacaagcucuacgagcgcgugaagcgccagcugcgggagaacgcggaggaggacggcaccggcugcuucgagaucuuccacaagugcgacgacgacugcauggccuccauccgcaacaacaccuacgaccacagcaaguaccgggaggaggccaugcagaaccgcauccagaucgaccccgucaagcuguccagcggguacaaggacgugauccucugguucuccuucggcgccagcugcuucauccugcuggcgaucgugauggggcucgucuucaucugcgugaagaacggcaacaugcggugcaccaucugcaucugaggacuaguuauaagacugacuagcccgaugggccucccaacgggcccuccuccccuccuugcaccgagauuaauaaaaaaaaaaaaaaaaaaaaaaaaaaaaaaaaaaaaaaaaaaaaaaaaaaaaaaaaaaaaaaaaugcaucccccccccccccccccccccccccccccccaaaggcucuuuucagagccaccagaauu

SEQ ID NO: 14464 - RNA, 1903 nt, Artificial Sequence
  FLUAV/H10N8/A/Jiangxi/IPB13/2013(H10N8)__AHK10761.1 hemagglutinin mRNA gc (HA)
aggagaaagcuuaccauguacaagaucguggucaucaucgcccugcucggcgccgugaaggggcuggacaagaucugccugggccaccacgcgguggccaacgggaccaucgucaagacccucacgaacgagcaggaggaggugaccaacgccaccgagaccguggagagcacgggcaucaaccgccugugcaugaaggggcggaagcacaaggaccugggcaacugccaccccaucggcaugcucaucgggaccccggccugcgaccugcaccugaccggcaugugggacacccucaucgagcgcgagaacgccaucgcguacugcuaccccggggccacggucaacguggaggcccugcggcagaagaucauggaguccggcgggaucaacaagaucagcaccggcuucaccuacggcuccagcaucaacuccgccgggaccacgcgcgcgugcaugcggaacggcgggaacagcuucuacgccgagcugaaguggcucguguccaagagcaagggccagaacuucccccagaccaccaacaccuaccgcaacacggacaccgccgagcaccugaucauguggggcauccaccaccccuccagcacccaggagaagaacgaccuguacgggacccagucccucagcaucuccgucggcagcuccacguaccggaacaacuucgugccgguggucggggcccgcccccaggugaacggccagagcgggcggaucgacuuccacuggacccuggugcagcccggcgacaacaucaccuucucccacaacggcgggcugaucgcccccagccgcgucuccaagcucaucggccgggggcugggcauccagagcgacgcgccgaucgacaacaacugcgagagcaagugcuucuggcgcgggggcuccaucaacacccggcugcccuuccagaaccucagcccccgcacggugggccagugccccaaguacgugaaccggcgcucccugaugcuggccaccgggaugcggaacgucccggagcucauccagggccgcgggcuguucggcgccaucgccggguuccuggagaacggcugggagggcaugguggacgggugguacggcuuccggcaccagaacgcccaggggaccggccaggcggccgacuacaagagcacccaggccgccaucgaccagaucacgggcaagcucaaccgccugguggagaagaccaacaccgaguucgaguccaucgagagcgaguucuccgagaucgagcaccagaucgggaacgucaucaacuggaccaaggacagcaucacggacaucuggaccuaccaggccgagcugcucguggcgauggagaaccagcacaccaucgacauggccgacuccgagaugcugaaccuguacgagcgggugcgcaagcagcuccgccagaacgccgaggaggacggcaaggggugcuucgagaucuaccacgccugcgacgacagcugcauggaguccauccggaacaacaccuacgaccacagccaguaccgcgaggaggcccugcugaaccggcucaacaucaaccccgucacgcuguccagcggcuacaaggacaucauccugugguucuccuucggggcgagcugcuucgugcuccuggccgucgugaugggccuguucuucuucugccucaagaacggcaacaugcgcugcaccaucugcaucugaggacuaguuauaagacugacuagcccgaugggccucccaacgggcccuccuccccuccuugcaccgagauuaauaaaaaaaaaaaaaaaaaaaaaaaaaaaaaaaaaaaaaaaaaaaaaaaaaaaaaaaaaaaaaaaaugcaucccccccccccccccccccccccccccccccaaaggcucuuuucagagccaccagaauu

SEQ ID NO: 14465 - RNA, 1969 nt, Artificial Sequence
  FLUBV/H0N0/B/Colorado/06/2017__EPI1011552 hemagglutinin mRNA gc (HA)
aggagaaagcuuaccaugaaggccaucaucgugcugcucauggucgugaccagcuccgccgaccgcaucugcaccggcaucacgagcuccaacagcccccacguggucaagaccgcgacccagggggaggugaacgugaccggcgucaucccgcugacgaccacccccaccaagucccacuucgccaaccugaaggggacggagacccggggcaagcucugccccaagugccugaacugcaccgaccuggacguggcccucgggcgccccaagugcaccggcaagaucccgagcgcccggguguccauccugcacgagguccgccccgugacgagcggcugcuuccccaucaugcacgaccggaccaagauccgccagcugcccaaccuccugcggggguacgagcacgugcgccuguccacccacaacgucaucaacgccgagggcgcgcccgggggccccuacaagaucgggaccagcggcuccugccccaacaucacgaacggcaacggguucuucgccaccauggccugggccgugcccgacaagaacaagaccgcgaccaacccgcucacgaucgaggugcccuacgucugcaccgagggcgaggaccagaucaccguguggggguuccacagcgacaacgagacccagauggccaagcuguacggcgacuccaagccccagaaguucacgagcuccgccaacggcgugaccacccacuacgucagccagaucgggggcuuccccaaccagaccgaggacgggggccugccgcaguccgggcggaucgugguggacuacaugguccagaaguccggcaagacgggcaccaucaccuaccagcgcgggauccuccugccccagaagguguggugcgccagcggccggagcaaggugaucaaggggagccugccccucaucggcgaggccgacugccugcacgagaaguacgggggccugaacaaguccaagcccuacuacaccggcgagcacgcgaaggccaucgggaacugcccgaucugggucaagacgccccucaagcuggccaacggcaccaaguaccgcccgcccgccaagcugcucaaggagcggggguucuucggcgccaucgcgggguuccuggagggcggcugggaggggaugaucgccggcuggcacggguacaccagccacggcgcccacggcguggccgucgccgcggaccugaaguccacccaggaggccaucaacaagaucacgaagaaccucaacagccuguccgagcuggaggugaagaaccuccagcgccugagcggggccauggacgagcugcacaacgagauccucgagcuggacgagaagguggacgaccugcgggccgacaccaucuccagccagaucgagcucgccguccugcuguccaacgagggcaucaucaacagcgaggacgagcaccuccuggcgcuggagcgcaagcucaagaagaugcuggggccguccgccguggagaucggcaacgggugcuucgagaccaagcacaagugcaaccagaccugccuggacaagaucgccgccggcaccuucgacgcgggcgaguucagccuccccacguucgacucccugaacaucaccgccgccagccugaacgacgacgggcuggacaaccacaccauccuccuguacuacuccaccgccgccagcucccuggcggugacgcucaugaucgccaucuucgucguguacauggugagccgggacaacgucuccugcagcaucugccugugaggacuaguuauaagacugacuagcccgaugggccucccaacgggcccuccuccccuccuugcaccgagauuaauaaaaaaaaaaaaaaaaaaaaaaaaaaaaaaaaaaaaaaaaaaaaaaaaaaaaaaaaaaaaaaaaugcaucccccccccccccccccccccccccccccccaaaggcucuuuucagagccaccagaauu

SEQ ID NO: 14466 - RNA, 1969 nt, Artificial Sequence
  FLUBV/H0N0/B/Colorado/06/2017__EPI1051642 hemagglutinin mRNA gc (HA)
aggagaaagcuuaccaugaaggccaucaucgugcugcucauggucgugaccagcuccgccgaccgcaucugcaccggcaucacgagcuccaacagcccccacguggucaagaccgcgacccagggggaggugaacgugaccggcgucaucccgcugacgaccacccccaccaagucccacuucgccaaccugaaggggacggagacccggggcaagcucugccccaagugccugaacugcaccgaccuggacguggcccucgggcgccccaagugcaccggcaagaucccgagcgcccggguguccauccugcacgagguccgccccgugacgagcggcugcuuccccaucaugcacgaccggaccaagauccgccagcugcccaaccuccugcggggguacgagcacgugcgccuguccacccacaacgucaucaacgccgagggcgcgcccgggggccccuacaagaucgggaccagcggcuccugccccaacaucacgaacggcaacggguucuucgccaccauggccugggccgugcccgacaagaacaagaccgcgaccaacccgcucacgaucgaggugcccuacgucugcaccgagggcgaggaccagaucaccguguggggguuccacagcgacaccgagacgcagauggccaagcuguacggcgacuccaagccccagaaguucaccagcuccgccaacggcgugaccacccacuacgucagccagaucgggggcuuccccaaccagacggaggacgggggccugccgcaguccgggcggaucgugguggacuacaugguccagaaguccggcaagaccggcaccaucaccuaccagcgcgggauccuccugccccagaagguguggugcgccagcggccggagcaaggugaucaaggggagccugccccucaucggcgaggccgacugccugcacgagaaguacgggggccugaacaaguccaagcccuacuacacgggcgagcacgcgaaggccaucgggaacugcccgaucugggucaagacgccccucaagcuggccaacggcaccaaguaccgcccgcccgccaagcugcucaaggagcggggguucuucggcgccaucgcgggguuccuggagggcggcugggaggggaugaucgccggcuggcacggguacaccagccacggcgcccacggcguggccgucgccgcggaccugaaguccacccaggaggccaucaacaagaucaccaagaaccucaacagccuguccgagcuggaggugaagaaccuccagcgccugagcggggccauggacgagcugcacaacgagauccucgagcuggacgagaagguggacgaccugcgggccgacaccaucuccagccagaucgagcucgccguccugcuguccaacgagggcaucaucaacagcgaggacgagcaccuccuggcgcuggagcgcaagcucaagaagaugcuggggccguccgccguggagaucggcaacgggugcuucgagaccaagcacaagugcaaccagaccugccuggacaagaucgccgccggcacguucgacgcgggcgaguucagccuccccaccuucgacucccugaacaucaccgccgccagccugaacgacgacgggcuggacaaccacaccauccuccuguacuacuccacggccgccagcucccuggcggugacccucaugaucgccaucuucgucguguacauggugagccgggacaacgucuccugcagcaucugccugugaggacuaguuauaagacugacuagcccgaugggccucccaacgggcccuccuccccuccuugcaccgagauuaauaaaaaaaaaaaaaaaaaaaaaaaaaaaaaaaaaaaaaaaaaaaaaaaaaaaaaaaaaaaaaaaaugcaucccccccccccccccccccccccccccccccaaaggcucuuuucagagccaccagaauu

SEQ ID NO: 14467 - RNA, 1969 nt, Artificial Sequence
  FLUBV/H0N0/B/Colorado/06/2017 BX-71__EPI1151760 hemagglutinin mRNA gc (HA)
aggagaaagcuuaccaugaaggccaucaucgugcugcucauggucgugaccagcuccgccgaccgcaucugcaccggcaucacgagcuccaacagcccccacguggucaagaccgcgacccagggggaggugaacgugaccggcgucaucccgcugacgaccacccccaccaagucccacuucgccaaccugaaggggacggagacccggggcaagcucugccccaagugccugaacugcaccgaccuggacguggcccucgggcgccccaagugcaccggcaagaucccgagcgcccggguguccauccugcacgagguccgccccgugacgagcggcugcuuccccaucaugcacgaccggaccaagauccgccagcugcccaaccuccugcggggguacgagcacgugcgccuguccacccacaacgucaucaacgccgagggcgcgcccgggggccccuacaagaucgggaccagcggcuccugccccaacaucacgaacggcaacggguucuucgccaccauggccugggccgugcccgacaagaacaagaccgcgaccaacccgcucacgaucgaggugcccuacgucugcaccgagggcgaggaccagaucaccguguggggguuccacagcgacaccgagacgcagauggccaagcuguacggcgacuccaagccccagaaguucaccagcuccgccaacggcgugaccacccacuacgucagccagaucgggggcuuccccaaccagacggaggacgggggccggccgcaguccgggcgcaucgugguggacuacaugguccagaaguccggcaagaccggcaccaucaccuaccagcgggggauccugcucccccagaagguguggugcgccagcggccgcagcaaggugaucaaggggagccugccccugaucggcgaggccgacugccuccacgagaaguacgggggccugaacaaguccaagcccuacuacacgggcgagcacgcgaaggccaucgggaacugcccgaucugggucaagacgccccugaagcucgccaacggcaccaaguaccggccgcccgccaagcugcugaaggagcgcggguucuucggcgccaucgcgggguuccucgagggcggcugggaggggaugaucgccggcuggcacggguacaccagccacggcgcccacggcguggccgucgccgcggaccugaaguccacccaggaggccaucaacaagaucaccaagaaccugaacagccucuccgagcuggaggugaagaaccugcagcggcucagcggggccauggacgagcugcacaacgagauccuggagcucgacgagaagguggacgaccugcgcgccgacaccaucuccagccagaucgagcuggccguccuccuguccaacgagggcaucaucaacagcgaggacgagcaccuccuggcgcuggagcggaagcugaagaagaugcucgggccguccgccguggagaucggcaacgggugcuucgagaccaagcacaagugcaaccagaccugccuggacaagaucgccgccggcacguucgacgcgggcgaguucagccugcccaccuucgacucccucaacaucaccgccgccagccugaacgacgacgggcuggacaaccacaccauccugcucuacuacuccacggccgccagcucccuggcggugacccugaugaucgccaucuucgucguguacauggugagccgcgacaacgucuccugcagcaucugccucugaggacuaguuauaagacugacuagcccgaugggccucccaacgggcccuccuccccuccuugcaccgagauuaauaaaaaaaaaaaaaaaaaaaaaaaaaaaaaaaaaaaaaaaaaaaaaaaaaaaaaaaaaaaaaaaaugcaucccccccccccccccccccccccccccccccaaaggcucuuuucagagccaccagaauu

SEQ ID NO: 14468 - RNA, 1966 nt, Artificial Sequence
  FLUBV/H0N0/B/Washington/02/2019__EPI1368874 hemagglutinin mRNA gc (HA)
aggagaaagcuuaccaugaaggccaucaucgugcugcucauggucgugaccagcaacgccgaccgcaucugcaccggcaucacguccagcaacagcccccacguggucaagaccgcgacccagggggaggugaacgugaccggcgucaucccgcugacgaccacccccaccaagagccacuucgccaaccugaaggggacggagacccggggcaagcucugccccaagugccugaacugcaccgaccuggacguggcccucgggcgccccaagugcaccggcaagaucccguccgcccgggugagcauccugcacgagguccgccccgugacguccggcugcuuccccaucaugcacgaccggaccaagauccgccagcugcccaaccuccugcggggguacgagcacgugcgccugagcacccacaacgucaucaacgccgaggacgcgccgggccggcccuacgagaucgggaccuccggcagcugccccaacaucacgaacgggaacggcuucuucgccaccauggccugggccgugcccaagaacaagaccgcgaccaacccgcucacgaucgaggugcccuacaucugcaccgagggcgaggaccagaucaccgucuggggguuccacuccgacaacgagacccagauggccaagcuguacggcgacagcaagccccagaaguucacguccagcgccaacggggugaccacccacuacgugucccagaucggcggcuuccccaaccagaccgaggacgggggccugccgcagagcgggcgcaucgucguggacuacauggugcagaaguccggcaagacggggaccaucaccuaccagcggggcauccuccugccccagaaggucuggugcgccagcggccgcuccaaggugaucaaggggagccugccccucaucggcgaggccgacugccugcacgagaaguacgggggccugaacaagagcaagcccuacuacaccggggagcacgcgaaggccaucggcaacugcccgaucugggugaagacgccccucaagcuggccaacggcaccaaguaccggccgcccgccaagcugcucaaggagcgcggguucuucggcgccaucgcgggguuccuggagggcgggugggagggcaugaucgccggcuggcacggguacaccucccacggcgcccacggggucgccguggccgcggaccugaaguccacccaggaggccaucaacaagaucacgaagaaccucaacucccugagcgagcuggaggucaagaaccuccagcggcuguccggcgccauggacgagcugcacaacgagauccucgagcuggacgagaagguggacgaccugcgcgccgacaccaucagcucccagaucgagcucgccgugcugcugagcaacgagggcaucaucaacuccgaggacgagcaccuccuggcgcuggagcggaagcucaagaagaugcuggggcccagcgccgucgagaucggcaacgggugcuucgagaccaagcacaagugcaaccagaccugccuggaccgcaucgccgccggcaccuucgacgcgggggaguucucccuccccacguucgacagccugaacaucaccgccgccucccugaacgacgacggccuggacaaccacaccauccuccuguacuacagcaccgccgccuccagccuggcggugacgcucaugaucgccaucuucguggucuacauggugucccgggacaacgugagcugcuccaucugccugugaggacuaguuauaagacugacuagcccgaugggccucccaacgggcccuccuccccuccuugcaccgagauuaauaaaaaaaaaaaaaaaaaaaaaaaaaaaaaaaaaaaaaaaaaaaaaaaaaaaaaaaaaaaaaaaaugcaucccccccccccccccccccccccccccccccaaaggcucuuuucagagccaccagaauu

SEQ ID NO: 14469 - RNA, 1966 nt, Artificial Sequence
  FLUBV/H0N0/B/Washington/02/2019__EPI1422452 hemagglutinin mRNA gc (HA)
aggagaaagcuuaccaugaaggccaucaucgugcugcucauggucgugaccagcaacgccgaccgcaucugcaccggcaucacguccagcaacagcccccacguggucaagaccgcgacccagggggaggugaacgugaccggcgucaucccgcugacgaccacccccaccaagagccacuucgccaaccugaaggggacggagacccggggcaagcucugccccaagugccugaacugcaccgaccuggacguggcccucgggcgccccaagugcaccggcaagaucccguccgcccgggugagcauccugcacgagguccgccccgugacguccggcugcuuccccaucaugcacgaccggaccaagauccgccagcugcccaaccuccugcggggguacgagcacgugcgccugagcacccacaacgucaucaacgccgaggacgcgccgggccggcccuacgagaucgggaccuccggcagcugccccaacaucacgaacgggaacggcuucuucgccaccauggccugggccgugcccaagaacaagaccgcgaccaacccgcucacgaucgaggugcccuacaucugcaccgagggcgaggaccagaucaccgucuggggguuccacuccgacagcgagacccagauggccaagcuguacggcgacuccaagccccagaaguucacgagcuccgccaacggggugaccacccacuacgugagccagaucggcggcuuccccaaccagaccgaggacgggggccugccgcaguccgggcgcaucgucguggacuacauggugcagaaguccggcaagacggggaccaucaccuaccagcggggcauccuccugccccagaaggucuggugcgccuccggccgcagcaaggugaucaaggggagccugccccucaucggcgaggccgacugccugcacgagaaguacgggggccugaacaaguccaagcccuacuacaccggggagcacgcgaaggccaucggcaacugcccgaucugggugaagacgccccucaagcuggccaacggcaccaaguaccggccgcccgccaagcugcucaaggagcgcggguucuucggcgccaucgcgggguuccuggagggcgggugggagggcaugaucgccggcuggcacggguacaccagccacggcgcccacggggucgccguggccgcggaccugaaguccacccaggaggccaucaacaagaucacgaagaaccucaacagccuguccgagcuggaggucaagaaccuccagcggcugagcggcgccauggacgagcugcacaacgagauccucgagcuggacgagaagguggacgaccugcgcgccgacaccaucuccagccagaucgagcucgccgugcugcuguccaacgagggcaucaucaacagcgaggacgagcaccuccuggcgcuggagcggaagcucaagaagaugcuggggcccuccgccgucgagaucggcaacgggugcuucgagaccaagcacaagugcaaccagaccugccuggaccgcaucgccgccggcaccuucgacgcgggggaguucagccuccccacguucgacucccugaacaucaccgccgccagccugaacgacgacggccuggacaaccacaccauccuccuguacuacuccaccgccgccagcucccuggcggugacgcucaugaucgccaucuucguggucuacauggugagccgggacaacguguccugcagcaucugccugugaggacuaguuauaagacugacuagcccgaugggccucccaacgggcccuccuccccuccuugcaccgagauuaauaaaaaaaaaaaaaaaaaaaaaaaaaaaaaaaaaaaaaaaaaaaaaaaaaaaaaaaaaaaaaaaaugcaucccccccccccccccccccccccccccccccaaaggcucuuuucagagccaccagaauu

SEQ ID NO: 14470 - RNA, 1627 nt, Artificial Sequence
  FLUAV/H1N1/A/California/7/2009__GQ906802 neuraminidase mRNA gc (NA)
aggagaaagcuuaccaugaaccccaaccagaagaucaucaccaucggcuccgugugcaugaccaucgggauggccaaccugauccuccagaucggcaacaucaucuccaucuggaucucccacuccauccagcuggggaaccagaaccagaucgagacgugcaaccaguccgucaucaccuacgagaacaacaccugggugaaccagaccuacgugaacaucuccaacacgaacuucgccgcgggccaguccgucguguccgugaagcuggccgggaacagcucccucugcccggucuccggcugggccaucuacuccaaggacaacuccgugcggaucggcuccaagggggacgucuucgugauccgcgagccguucaucuccugcuccccccuggagugccggaccuucuuccugacccagggcgcccuccugaacgacaagcacuccaacgggaccaucaaggaccgcucccccuaccggacgcugauguccugcccgaucggcgaggugcccucccccuacaacucccgcuucgaguccgucgccugguccgcguccgccugccacgacgggaucaacuggcucaccaucggcaucuccggccccgacaacggggccguggccgugcugaaguacaacggcaucaucaccgacaccaucaaguccuggcggaacaacauccugcgcacgcaggaguccgagugcgcgugcgucaacggguccugcuucaccgugaugaccgacggcccguccaacggccaggccuccuacaagaucuuccggaucgagaaggggaagaucgugaaguccgucgagaugaacgcccccaacuaccacuacgaggagugcuccugcuaccccgacuccuccgagaucaccugcgugugccgcgacaacuggcacggcuccaaccggcccuggguguccuucaaccagaaccucgaguaccagaucggguacaucugcuccggcaucuucggggacaacccgcgccccaacgacaagacgggcuccugcggccccgucuccagcaacggggccaacggcgugaagggguucuccuucaaguacggcaacgggguguggaucggccggaccaaguccaucuccucccgcaacggcuucgagaugaucugggaccccaacggguggaccggcaccgacaacaacuucuccaucaagcaggacaucgucgggaucaacgagugguccggcuacuccggguccuucgugcagcacccggagcugacgggccuggacugcauccggcccugcuucuggguggagcucauccgcggccggcccaaggagaacaccaucuggaccuccggguccuccaucuccuucugcggcgucaacuccgacaccguggggugguccuggcccgacggcgccgagcugccguucacgaucgacaagugaggacuaguuauaagacugacuagcccgaugggccucccaacgggcccuccuccccuccuugcaccgagauuaauaaaaaaaaaaaaaaaaaaaaaaaaaaaaaaaaaaaaaaaaaaaaaaaaaaaaaaaaaaaaaaaaugcaucccccccccccccccccccccccccccccccaaaggcucuuuucagagccaccagaauu

SEQ ID NO: 14471 - RNA, 1627 nt, Artificial Sequence
  FLUAV/H1N1/A/Michigan/45/2015__EPI662593 neuraminidase mRNA gc (NA)
aggagaaagcuuaccaugaaccccaaccagaagaucaucaccaucggcagcaucugcaugaccaucgggauggccaaccugauccuccagaucggcaacaucaucuccaucugggugagccacuccauccagaucgggaaccagagccagaucgagacgugcaaccaguccgucaucaccuacgagaacaacaccugggugaaccagaccuacgugaacaucagcaacacgaacuucgccgcgggccaguccgucgugagcgugaagcuggccgggaacuccagccugugcccggucuccggcugggccaucuacagcaaggacaacuccgugcgcaucggcagcaagggggacguguucgucauccgggagcccuucaucuccugcagcccccucgagugccgcaccuucuuccugacccagggcgcccugcucaacgacaagcacuccaacgggaccaucaaggaccggagccccuaccgcacgcugauguccugcccgaucggcgaggugcccagccccuacaacagccgguucgaguccguggccuggagcgcguccgccugccacgacgggaucaacuggcugaccaucggcaucagcggccccgacuccggggccgucgccgugcucaaguacaacggcaucaucaccgacaccaucaagagcuggcgcaacaacauccugcggacgcaggaguccgagugcgcgugcgugaacgggagcugcuucaccaucaugaccgacggcccguccgacggccaggccagcuacaagaucuuccgcaucgagaaggggaagaucaucaaguccgucgagaugaaggcccccaacuaccacuacgaggagugcagcugcuaccccgacuccagcgagaucacgugcgugugccgggacaacuggcacggcuccaaccgccccugggugagcuucaaccagaaccuggaguaccagaugggguacaucugcuccggcgucuucggggacaacccgcggcccaacgacaagaccggcagcugcggccccguguccagcaacggggccaacggcgugaagggguucagcuucaaguacggcaacggggucuggaucggccgcaccaaguccaucagcucccggaagggcuucgagaugaucugggaccccaacggguggaccggcaccgacaacaaguucagcaucaagcaggacaucguggggaucaacgagugguccggcuacagcggguccuucgugcagcacccggagcucacgggccuggacugcauccgccccugcuucugggucgagcugauccggggccgccccgaggagaacaccaucuggaccagcggguccagcaucuccuucugcggcgugaacagcgacaccgucgggugguccuggcccgacggcgccgagcucccguucacgaucgacaagugaggacuaguuauaagacugacuagcccgaugggccucccaacgggcccuccuccccuccuugcaccgagauuaauaaaaaaaaaaaaaaaaaaaaaaaaaaaaaaaaaaaaaaaaaaaaaaaaaaaaaaaaaaaaaaaaugcaucccccccccccccccccccccccccccccccaaaggcucuuuucagagccaccagaauu

SEQ ID NO: 14472 - RNA, 1627 nt, Artificial Sequence
  FLUAV/H1N1/A/Netherlands/602/2009__AGU92703 neuraminidase mRNA gc (NA)
aggagaaagcuuaccaugaaccccaaccagaagaucaucaccaucggcagcgugugcaugaccaucgggauggccaaccugauccuccagaucggcaacaucaucuccaucuggaucagccacuccauccagcuggggaaccagaaccagaucgagacgugcaaccagagcgucaucaccuacgagaacaacaccugggugaaccagaccuacgugaacaucuccaacacgaacuucgccgcgggccagagcgucguguccgugaagcuggccgggaacagcucccucugcccggucagcggcugggccaucuacuccaaggacaacagcgugcgggugggcuccaagggggacgucuucgugauccgcgagccguucaucagcugcuccccccuggagugccggaccuucuuccugacccagggcgcccuccugaacgacaagcacagcaacgggaccaucaaggaccgcucccccuaccggacgcugaugagcugcccgaucggcgaggugcccucccccuacaacagccgcuucgagagcgucgccugguccgcgagcgccugccacgacgggaucaacuggcucaccaucggcaucuccggccccgacaacggggccguggccgugcugaaguacaacggcaucaucaccgacaccaucaagagcuggcggaacaacauccugcgcacgcaggaguccgagugcgcgugcgucaacgggagcugcuucaccgugaugaccgacggcccguccaacggccaggccagcuacaagaucuuccggaucgagaaggggaagaucgugaaguccgucgagaugaacgcccccaacuaccacuacgaggagugcagcugcuaccccgacuccagcgagaucaccugcgugugccgcgacaacuggcacggcuccaaccggcccugggugagcuucaaccagaaccucgaguaccagaucggguacaucugcuccggcaucuucggggacaacccgcgccccaacgacaagacgggcagcugcggccccgucuccagcaacggggccaacggcgugaagggguucuccuucaaguacggcaacgggguguggaucggccggaccaagagcaucagcucccgcaacggcuucgagaugaucugggaccccaacggguggaccggcaccgacaacaacuucagcaucaagcaggacaucgucgggaucaacgagugguccggcuacagcggguccuucauccagcacccggagcugacgggccuggacugcauccggcccugcuucuggguggagcucauccgcggccggcccaaggagaacaccaucuggaccagcggguccagcaucuccuucugcggcgucaacagcgacaccguggggugguccuggcccgacggcgccgagcugccguucacgaucgacaagugaggacuaguuauaagacugacuagcccgaugggccucccaacgggcccuccuccccuccuugcaccgagauuaauaaaaaaaaaaaaaaaaaaaaaaaaaaaaaaaaaaaaaaaaaaaaaaaaaaaaaaaaaaaaaaaaugcaucccccccccccccccccccccccccccccccaaaggcucuuuucagagccaccagaauu

SEQ ID NO: 14473 - RNA, 1627 nt, Artificial Sequence
  FLUAV/H3N2/A/Hong Kong/4801/2014__EPI578429 neuraminidase mRNA gc (NA)
aggagaaagcuuaccaugaaccccaaccagaagaucaucaccaucggcuccgugucccugaccaucuccacgaucugcuucuucaugcagaucgccauccucaucaccaccgucacccugcacuucaagcaguacgaguucaacuccccgcccaacaaccaggugaugcugugcgagcccacgaucaucgagcgcaacaucaccgagaucguguaccucaccaacaccacgaucgagaaggagaucugccccaagccggccgaguaccggaacugguccaagccccagugcgggaucaccggcuucgcgcccuucuccaaggacaacuccauccgccuguccgccgggggcgacaucugggucacccgggagcccuacguguccugcgacccggacaagugcuaccaguucgcccuggggcagggcaccacgcucaacaacgugcacuccaacaacaccguccgcgaccggacccccuaccgcacccugcugaugaacgagcucggcgugcccuuccaccuggggacgaagcaggucugcaucgccugguccuccagcuccugccacgacggcaaggccuggcugcacgucugcaucaccggggacgacaagaacgcgaccgccuccuucaucuacaacggccggcucguggacuccguggucagcugguccaaggacauccugcgcacccaggaguccgagugcaucugcaucaacgggacgugcaccguggugaugaccgacggcuccgccuccggcaaggccgacaccaagauccuguucaucgaggaggggaagaucguccacacguccacccucuccggcuccgcgcagcacguggaggagugcuccugcuacccccgguacccgggggugcgcugcgucugccgggacaacuggaagggcuccaaccgcccgaucguggacaucaacaucaaggaccacuccaucgugagcuccuacgucugcuccggccuggugggggacaccccgcggaagaacgacuccagcuccagcucccacugccuggaccccaacaacgaggagggcgggcacggcgugaaggggugggccuucgacgacggcaacgacgucuggaugggccgcaccaucaacgagacgucccggcucggguacgagaccuucaaggugaucgagggcugguccaacccgaaguccaagcugcagaccaaccgccaggucaucguggaccggggcgaccgcuccggguacuccgggaucuucuccguggagggcaaguccugcaucaaccggugcuucuacgucgagcugauccgcggccggaaggaggagaccgaggugcucuggacgagcaacuccaucguggucuucugcgggaccagcggcaccuacgggaccggcuccuggcccgacggggccgaccugaaccugaugcccaucugaggacuaguuauaagacugacuagcccgaugggccucccaacgggcccuccuccccuccuugcaccgagauuaauaaaaaaaaaaaaaaaaaaaaaaaaaaaaaaaaaaaaaaaaaaaaaaaaaaaaaaaaaaaaaaaaugcaucccccccccccccccccccccccccccccccaaaggcucuuuucagagccaccagaauu

SEQ ID NO: 14474 - RNA, 1618 nt, Artificial Sequence
  FLUBV/H0N0/B/Brisbane/60/2008__EPI173278 neuraminidase mRNA gc (NA)
aggagaaagcuuaccaugcugcccagcaccauccagacccucacgcuguuccugaccuccggcggggugcuccugagccuguacgucuccgccagccucuccuaccugcuguacagcgacauccuccugaaguucuccccgaccgagaucaccgcccccacgaugccccuggacugcgcgaacgccagcaacgugcaggccgugaaccgcuccgccaccaagggcgucacccuccugcugcccgagccggaguggaccuacccccggcucagcugccccggguccacguuccagaaggcccugcugaucagcccccaccgcuucggcgagaccaaggggaacuccgcgccgcucaucauccgggagcccuucaucgccugcggccccaacgagugcaagcacuucgcccugacccacuacgccgcgcagcccggcggguacuacaacggcacccgcggggaccggaacaagcugcgccaccucaucagcgugaagcugggcaagaucccgacgguggagaacuccaucuuccacauggccgccuggagcggguccgccugccacgacggcaaggaguggaccuacaucggcgucgacgggcccgacaacaacgcccugcucaaggugaaguacggcgaggcguacaccgacaccuaccacagcuacgccaacaagauccugcggacgcaggaguccgccugcaacugcaucgggggcaacugcuaccugaugaucaccgacggcagcgccagcgggguguccgagugccgcuuccucaagauccgggagggccgcaucaucaaggagaucuuccccaccgggcgggucaagcacaccgaggagugcacgugcggcuucgccagcaacaagaccaucgagugcgcgugccgcgacaacuccuacaccgccaagcggcccuucgugaagcugaacguggagaccgacacggccgagauccgccugaugugcaccgacaccuaccucgacaccccgcggcccaacgacgggagcaucacgggccccugcgaguccaacggcgacaaggggagcggcgggaucaagggcggguucguccaccagcgcauggaguccaagaucggccggugguacagccgcaccauguccaagaccgagcggaugggcauggggcuguacgugaaguacgacggcgaccccugggccgacagcgacgcccuggcguucuccggggugauggucagcaugaaggagccgggcugguacuccuucggguucgagaucaaggacaagaagugcgacgugcccugcaucggcaucgagauggugcacgacggcgggaaggagaccuggcacagcgccgccacggccaucuacugccucaugggcuccgggcagcugcugugggacaccgucaccggcguggacauggcccucugaggacuaguuauaagacugacuagcccgaugggccucccaacgggcccuccuccccuccuugcaccgagauuaauaaaaaaaaaaaaaaaaaaaaaaaaaaaaaaaaaaaaaaaaaaaaaaaaaaaaaaaaaaaaaaaaugcaucccccccccccccccccccccccccccccccaaaggcucuuuucagagccaccagaauu

SEQ ID NO: 14475 - RNA, 1618 nt, Artificial Sequence
  FLUBV/H0N0/B/Phuket/3073/2013__EPI540672 neuraminidase mRNA gc (NA)
aggagaaagcuuaccaugcugcccagcaccauccagacccucacgcuguuccugaccuccggcggggugcuccugagccuguacgucuccgccagccucuccuaccugcuguacagcgacauccuccugaaguucucccgcaccgaggugaccgccccgaucaugccccuggacugcgcgaacgccagcaacgugcaggccgucaaccgguccgccacgaagggcgugacgccccuccugcccgagccggaguggaccuacccccgccugagcugccccggguccaccuuccagaaggcccuccugaucagcccccaccgguucggcgagaccaaggggaacuccgcgccgcugaucauccgcgagcccuucaucgccugcggccccaaggagugcaagcacuucgcccucacccacuacgccgcgcagcccggcggguacuacaacggcacccgggaggaccgcaacaagcugcggcaccugaucagcgugaagcucgggaagaucccgaccgucgagaacuccaucuuccacauggccgccuggagcggcuccgccugccacgacgggcgcgaguggacguacaucggcguggacggccccgacagcaacgcccugcugaagaucaaguacggggaggcguacaccgacaccuaccacuccuacgccaagaacauccuccggacccaggagagcgccugcaacugcaucggcggggacugcuaccugaugaucacggacggccccgccagcggcaucuccgagugccgcuuccugaagauccgggaggggcgcaucaucaaggagaucuuccccaccggccgggugaagcacaccgaggagugcacgugcggguucgccagcaacaagaccaucgagugcgcgugccgcgacaacuccuacaccgccaagcggccguucgucaagcucaacguggagaccgacaccgccgagauccgccugaugugcacgaagaccuaccuggacacgccccggcccaacgacggcagcaucaccgggcccugcgaguccgacggcgacgagggcagcgggggcaucaagggcggguucgugcaccagcgcauggccuccaagaucgggcggugguacagccgcaccauguccaagaccaagcggaugggcaugggccucuacgucaaguacgacggggacccguggaccgacagcgaggcccuggcgcuguccggcgugauggugagcauggaggagcccgggugguacuccuucggcuucgagaucaaggacaagaagugcgacguccccugcaucgggaucgagauggugcacgacggcggcaagaccacguggcacagcgccgccaccgccaucuacugccucaugggguccggccagcugcugugggacaccgugaccggggucaacaugacgcucugaggacuaguuauaagacugacuagcccgaugggccucccaacgggcccuccuccccuccuugcaccgagauuaauaaaaaaaaaaaaaaaaaaaaaaaaaaaaaaaaaaaaaaaaaaaaaaaaaaaaaaaaaaaaaaaaugcaucccccccccccccccccccccccccccccccaaaggcucuuuucagagccaccagaauu

SEQ ID NO: 14476 - RNA, 1627 nt, Artificial Sequence
  FLUAV/H1N1/A/Brisbane/02/2018__EPI1212833 neuraminidase mRNA gc (NA)
aggagaaagcuuaccaugaaccccaaccagaagaucaucaccaucggcagcacgugcaugaccaucgggauggccaaccugauccuccagaucggcaacaucaucuccaucugggugagccacuccauccagaucgggaaccagagccagaucgagaccugcaaccaguccgucaucaccuacgagaacaacaccugggugaaccagacguacgugaacaucagcaacaccaacuucgccgcgcgccaguccgucgccagcgugaagcuggccggcaacuccagccugugcccgguguccgggugggccaucuacagcaaggacaacuccguccggaucggcagcaagggcgacguguucgugauccgcgagcccuucaucuccugcagcccccucgagugccggaccuucuuccugacccagggggcccugcucaacgacaagcacuccaacggcacgaucaaggaccgcagccccuaccggacccugauguccugcccgaucggggagguccccagccccuacaacagccgcuucgaguccguggcguggagcgccuccgccugccacgacggcaccaacuggcugaccaucgggaucagcggccccgacuccggcgccguggcgguccucaaguacaacgggaucaucacggacaccaucaagagcuggcggaacaacauccugcgcacccaggaguccgagugcgccugcgugaacggcagcugcuucaccaucaugacggacgggccguccgacggccaggccagcuacaagaucuuccggaucgagaagggcaagaucaucaaguccguggagaugaaggcccccaacuaccacuacgaggagugcagcugcuaccccgacuccagcgagaucacgugcgucugccgcgacaacuggcacggguccaaccggcccugggugagcuucaaccagaaccuggaguaccagaugggcuacaucugcuccgggguguucggcgacaacccgcgccccaacgacaagaccgggagcugcggccccgucuccagcaacggcgccaacggggugaagggcuucagcuucaaguacgggaacggcguguggaucgggcggaccaaguccaucagcucccgcaagggcuucgagaugaucugggaccccaacggcuggaccgggaccgacaacaaguucagcaucaagcaggacaucgucggcaucaacgagugguccggguacagcggcuccuucgugcagcacccggagcucaccgggcuggacugcauccggcccugcuucuggguggagcugauccgcggccggcccgaggagaacaccaucuggacgagcggcuccagcaucuccuucugcggggucgacagcgacaccgugggcugguccuggcccgacggggcggagcucccguucaccaucgacaagugaggacuaguuauaagacugacuagcccgaugggccucccaacgggcccuccuccccuccuugcaccgagauuaauaaaaaaaaaaaaaaaaaaaaaaaaaaaaaaaaaaaaaaaaaaaaaaaaaaaaaaaaaaaaaaaaugcaucccccccccccccccccccccccccccccccaaaggcucuuuucagagccaccagaauu

SEQ ID NO: 14477 - RNA, 1627 nt, Artificial Sequence
  FLUAV/H1N1/A/Guangdong-Maonan/SWL1536/2019__EPI1542569 neuraminidase mRNA gc (NA)
aggagaaagcuuaccaugaaccccaaccagaagaucaucaccaucggcagcaucugcaugaccaucgggauggccaaccugauccuccagaucggcaacaucaucuccaucugggugagccacuccauccagaucgggaaccagagccagaucgagacgugcaacaagaacgucaucaccuacgagaacaacaccugggugaaccagaccuacgugaacaucuccaacacgaacagcgccgcgcgccaguccgucgccagcgugaagcuggccggcaacuccagccugugcccgguguccgggugggccaucuacagcaaggacaacuccguccggaucggcagcaagggcgacguguucgugauccgcgagcccuucaucuccugcagcccccucgagugccggaccuucuuccugacccagggggcccugcucaacgacaagcacuccaacggcaccaucaaggaccgcagccccuaccggacgcugauguccugcccgaucggggagguccccagccccuacaacagccgcuucgaguccguggcguggagcgccuccgccugccacgacggcaccaacuggcugaccaucgggaucagcggccccgacuccggcgccguggcgguccucaaguacaacgggaucaucaccgacacgaucaagagcuggcggaacaacauccugcgcacccaggaguccgagugcgccugcgugaacggcagcugcuucaccaucaugaccgacgggccguccgacggccaggccagcuacaagaucuuccggaucgagaagggcaagaucaucaaguccguggagaugaaggcccccaacuaccacuacgaggagugcagcugcuaccccgacuccagcgagaucacgugcgucugccgcgacaacuggcacggguccaaccggcccugggugagcuucaaccagaaccuggaguaccagaugggcuacaucugcuccgggguguucggcgacaacccgcgccccaacgacaagaccgggagcugcggccccgucuccagcaacggcgccaacggggugaagggcuucagcuucaaguacgggaacggcguguggaucgggcggaccaaguccaucagcucccgcaagggcuucgagaugaucugggaccccaacggcuggaccgggacggacaacaaguucagcaagaagcaggacaucgucggcaucaacgagugguccggguacagcggcuccuucgugcagcacccggagcucaccgggcugaacugcauccggcccugcuucuggguggagcugauccgcggccggcccgaggagaacaccaucuggaccagcggcuccagcaucuccuucugcggggucgacagcgacaucgugggcugguccuggcccgacggggcggagcucccguucacgaucgacaagugaggacuaguuauaagacugacuagcccgaugggccucccaacgggcccuccuccccuccuugcaccgagauuaauaaaaaaaaaaaaaaaaaaaaaaaaaaaaaaaaaaaaaaaaaaaaaaaaaaaaaaaaaaaaaaaaugcaucccccccccccccccccccccccccccccccaaaggcucuuuucagagccaccagaauu

SEQ ID NO: 14478 - RNA, 1627 nt, Artificial Sequence
  FLUAV/H3N2/A/Singapore/INFIMH-16-0019/2016__EPI1047603 neuraminidase mRNA gc (NA)
aggagaaagcuuaccaugaaccccaaccagaagaucaucaccaucggcagcgugucccugaccaucagcacgaucugcuucuucaugcagaucgccauccucaucaccaccgucacccugcacuucaagcaguacgaguucaacuccccgcccaacaaccaggugaugcugugcgagcccacgaucaucgagcgcaacaucaccgagaucguguaccucaccaacaccacgaucgagaaggagaucugccccaagccggccgaguaccggaacuggagcaagccccagugcgggaucaccggcuucgcgcccuucuccaaggacaacagcauccgccuguccgccgggggcgacaucugggucacccgggagcccuacgugagcugcgacccggacaagugcuaccaguucgcccuggggcagggcaccacgcucaacaacgugcacuccaacaacaccguccgcgaccggacccccuaccgcacccugcugaugaacgagcucggcgugcccuuccaccuggggacgaagcaggucugcaucgccuggagcuccagcuccugccacgacggcaaggccuggcugcacgugugcaucaccggggacgacaagaacgcgaccgccagcuucaucuacaacggccggcucaucgacuccguggugagcugguccaaggacauccugcgcacccaggagagcgagugcgucugcaucaacgggacgugcaccguggugaugaccgacggcaacgccaccggcaaggccgacacgaagauccuguucaucgaggaggggaagaucguccacaccuccaagcucagcggcagcgcgcagcacguggaggagugcuccugcuacccccgguacccgggggugcgcugcgucugccgggacaacuggaagggcagcaaccgccccaucguggacaucaacaucaaggaccacuccaucgugagcuccuacgucugcagcggccuggugggggacaccccgcggaagaacgacuccagcuccagcucccacugccugaaccccaacaacgaggagggcgggcacggcgugaaggggugggccuucgacgacggcaacgacgucuggaugggccgcaccaucaacgagacgagccggcucggguacgagaccuucaagguggucgagggcugguccaaccccaagagcaagcugcagaucaaccgccaggugaucguggaccgcggggaccgguccggcuacagcgggaucuucuccgucgagggcaagagcugcaucaaccggugcuucuacguggagcugauccgcggccggaaggaggagaccgaggugcucuggaccuccaacagcaucgucguguucugcgggacgagcggcaccuacgggaccggcuccuggcccgacggggccgaccugaaccugaugcacaucugaggacuaguuauaagacugacuagcccgaugggccucccaacgggcccuccuccccuccuugcaccgagauuaauaaaaaaaaaaaaaaaaaaaaaaaaaaaaaaaaaaaaaaaaaaaaaaaaaaaaaaaaaaaaaaaaugcaucccccccccccccccccccccccccccccccaaaggcucuuuucagagccaccagaauu

SEQ ID NO: 14479 - RNA, 1627 nt, Artificial Sequence
  FLUAV/H3N2/A/Kansas/14/2017__EPI1146344 neuraminidase mRNA gc (NA)
aggagaaagcuuaccaugaaccccaaccagaagaucaucaccaucggcagcgugucccugaccaucagcacgaucugcuucuucaugcagaucgccauccucaucaccaccgucacccugcacuucaagcaguacgaguucaacuccccgcccaacaaccaggugaugcugugcgagcccacgaucaucgagcgcaacaucaccgagaucguguaccucaccaacaccacgaucgagcgggagaucugccccaagccggccgaguaccgcaacuggagcaagccccagugcgggaucaccggcuucgcgcccuucuccaaggacaacagcauccggcuguccgccgggggcgacaucugggucacccgcgagcccuacgugagcugcgacccggacaagugcuaccaguucgcccuggggcagggcaccacgaucaacaacgugcacuccaacaacaccgcccgggaccgcaccccgcaccggacccuccugaugaacgagcugggcguccccuuccaccucgggacgaagcaggucugcaucgccuggagcuccagcuccugccacgacggcaaggcguggcugcacgugugcaucaccggggacgacaagaacgccaccgccagcuucaucuacaacggccgccugguggacuccguggugagcugguccaaggacauccuccggacccaggagagcgagugcgucugcaucaacgggacgugcaccguggugaugaccgacggcaacgccaccggcaaggcggacacgaagauccuguucaucgaggaggggaagaucguccacaccuccaagcugagcggcagcgcccagcacguggaggagugcuccugcuacccccgcuacccgggggugcggugcgucugccgcgacaacuggaagggcagcaaccggcccaucguggacaucaacaucaaggaccacuccaucgugagcuccuacgucugcagcggccucgugggggacacgccccgcaagaccgacuccagcuccagcucccacugccugaaccccaacaacgagaagggcgggcacggcgugaaggggugggccuucgacgacggcaacgacgucuggaugggccggaccaucaacgagaccagccgccugggguacgagaccuucaagguggucgagggcugguccaaccccaagagcaagcuccagaucaaccggcaggucaucguggaccgcggggaccgguccggcuacagcgggaucuucuccguggagggcaagagcugcaucaaccgcugcuucuacguggagcugauccggggccgcaaggaggagaccgaggugcuguggacguccaacagcaucgucguguucugcgggaccagcggcaccuacgggaccggcuccuggcccgacggggccgaccucaaccugaugcacaucugaggacuaguuauaagacugacuagcccgaugggccucccaacgggcccuccuccccuccuugcaccgagauuaauaaaaaaaaaaaaaaaaaaaaaaaaaaaaaaaaaaaaaaaaaaaaaaaaaaaaaaaaaaaaaaaaugcaucccccccccccccccccccccccccccccccaaaggcucuuuucagagccaccagaauu

SEQ ID NO: 14480 - RNA, 1627 nt, Artificial Sequence
  FLUAV/H3N2/A/Kansas/14/2017-CDC-LV24A__EPI1444881 neuraminidase mRNA gc (NA)
aggagaaagcuuaccaugaaccccaaccagaagaucaucaccaucggcagcgugucccugaccaucagcacgaucugcuucuucaugcagaucgccauccucaucaccaccgucacccugcacuucaagcaguacgaguucaacuccccgcccaacaaccaggugaugcugugcgagcccacgaucaucgagcgcaacaucaccgagaucguguaccucaccaacaccacgaucgagcgggagaucugccccaagccggccgaguaccgcaacuggagcaagccccagugcgggaucaccggcuucgcgcccuucuccaaggacaacagcauccggcuguccgccgggggcgacaucugggucacccgcgagcccuacgugagcugcgacccggacaagugcuaccaguucgcccuggggcagggcaccacgaucaacaacgugcacuccaacaacaccgcccgggaccgcacgccccaccggacccuccugaugaacgagcugggcguccccuuccaccucgggaccaagcaggucugcaucgccuggagcuccagcuccugccacgacggcaaggcguggcugcacgugugcaucaccggggacgacaagaacgccaccgccagcuucaucuacaacggccgccugguggacuccguggugagcugguccaaggacauccuccggacccaggagagcgagugcgucugcaucaacgggacgugcaccguggugaugaccgacggcaacgccaccggcaaggcggacacgaagauccuguucaucgaggaggggaagaucguccacaccuccaagcugagcggcagcgcccagcacguggaggagugcuccugcuacccccgcuacccgggggugcggugcgucugccgcgacaacuggaagggcagcaaccggcccaucguggacaucaacaucaaggaccacuccaucgugagcuccuacgucugcagcggccucgugggggacacgccccgcaagaccgacaacuccagcuccagccacugccugaaccccaacaacgagaagggcgggcacggcgugaaggggugggccuucgacgacggcaacgacgucuggaugggccggaccaucaacgagaccucccgccugggguacgagaccuucaagguggucgagggcuggagcaacccgaaguccaagcuccagaucaaccggcaggucaucguggaccgcggggaccggagcggcuacuccgggaucuucagcguggagggcaaguccugcaucaaccgcugcuucuacguggagcugauccggggccgcaaggaggagaccgaggugcuguggacgagcaacuccaucgucguguucugcgggaccagcggcaccuacgggaccggcagcuggcccgacggggccgaccucaaccugaugcacaucugaggacuaguuauaagacugacuagcccgaugggccucccaacgggcccuccuccccuccuugcaccgagauuaauaaaaaaaaaaaaaaaaaaaaaaaaaaaaaaaaaaaaaaaaaaaaaaaaaaaaaaaaaaaaaaaaugcaucccccccccccccccccccccccccccccccaaaggcucuuuucagagccaccagaauu

SEQ ID NO: 14481 - RNA, 1627 nt, Artificial Sequence
  FLUAV/H3N2/A/Switzerland/8060/2017__EPI1154879 neuraminidase mRNA gc (NA)
aggagaaagcuuaccaugaaccccaaccagaagaucaucaccaucggcagcgugucccugaccaucagcacgaucugcuucuucaugcagaucgccauccucaucaccaccgucacccugcacuucaagcaguacgaguucaacuccccgcccaacaaccaggugaugcugugcgagcccacgaucaucgagcgcaacaucaccgagaucguguaccucaccaacaccacgaucgagaaggagaucugccccaagccggccgaguaccggaacuggagcaagccccagugcgggaucaccggcuucgcgcccuucuccaaggacaacagcauccgccuguccgccgggggcgacaucugggucacccgggagcccuacgugagcugcgacccggacaagugcuaccaguucgcccuggggcagggcaccacgcucaacaacgugcacuccaacaacaccguccgcgaccggacccccuaccgcacccugcugaugaacgagcucggcgugcccuuccaccuggggacgaagcaggucugcauggccuggagcuccagcuccugccacgacggcaaggccuggcugcacgugugcgugaccggggacgacaagaacgcgaccgccagcuucaucuacaacggccggcucguggacuccgucgugagcugguccaaggacauccugcgcacccaggagagcgagugcgugugcaucaacgggacgugcaccgucgugaugaccgacggcaacgccaccggcaaggccgacacgaagauccuguucaucgaggaggggaagaucgugcacaccuccaagcucagcggcagcgcgcagcacgucgaggagugcuccugcuacccccgguacccgggggugcgcugcgugugccgggacaacuggaagggcagcaaccgccccaucgucgacaucaacaucaaggaccacuccaucgugagcuccuacgugugcagcggccuggucggggacacgccccggaaguccgacagcuccagcuccagccacugccugaaccccaacaacgaggagggcgggcacggcgugaaggggugggccuucgacgacggcaacgacgucuggaugggccgcaccaucaacgagaccucccggcucggguacgagaccuucaaggugguggagggcuggagcaacuccaagagcaagcugcagaucaaccgccaggucaucguggaccgcggggaccgguccggcuacagcgggaucuucuccguggagggcaagagcugcaucaaccggugcuucuacgucgagcugauccgcggccggaaggaggagaccgaggugcucuggaccagcaacuccaucguggucuucugcgggacgagcggcaccuacgggaccggcuccuggccggacggggccgaccugaaccugaugcacaucugaggacuaguuauaagacugacuagcccgaugggccucccaacgggcccuccuccccuccuugcaccgagauuaauaaaaaaaaaaaaaaaaaaaaaaaaaaaaaaaaaaaaaaaaaaaaaaaaaaaaaaaaaaaaaaaaugcaucccccccccccccccccccccccccccccccaaaggcucuuuucagagccaccagaauu

SEQ ID NO: 14482 - RNA, 1627 nt, Artificial Sequence
  FLUAV/H3N2/A/Switzerland/8060/2017(H3N2)-CDC-LV21A__EPI1364258 neuraminidase mRNA gc (NA)
aggagaaagcuuaccaugaaccccaaccagaagaucaucaccaucggcagcgugucccugaccaucagcacgaucugcuucuucaugcagaucgccauccucaucaccaccgucacccugcacuucaagcaguacgaguucaacuccccgcccaacaaccaggugaugcugugcgagcccacgaucaucgagcgcaacaucaccgagaucguguaccucaccaacaccacgaucgagaaggagaucugccccaagccggccgaguaccggaacuggagcaagccccagugcgggaucaccggcuucgcgcccuucuccaaggacaacagcauccgccuguccgccgggggcgacaucugggucacccgggagcccuacgugagcugcgacccggacaagugcuaccaguucgcccuggggcagggcaccacgcucaacaacgugcacuccaacaacaccguccgcgaccggacccccuaccgcacccugcugaugaacgagcucggcgugcccuuccaccuggggacgaagcaggucugcauggccuggagcuccagcuccugccacgacggcaaggccuggcugcacgugugcgugaccggggacgacaagaacgcgaccgccagcuucaucuacaacggccggcucguggacuccgucgugagcugguccaaggacauccugcgcacccaggagagcgagugcgugugcaucaacgggacgugcaccgucgugaugaccgacggcaacgccaccggcaaggccgacacgaagauccuguucaucgaggaggggaagaucgugcacaccuccaagcucagcggcagcgcgcagcacgucgaggagugcuccugcuacccccgguacccgggggugcgcugcgugugccgggacaacuggaagggcagcaaccgccccaucgucgacaucaacaucaaggaccacuccaucgugagcuccuacgugugcagccggcuggucggcgacacgccccgcaaguccgacagcuccagcuccagccacugccugaaccccaacaacgaggagggcgggcacggggugaagggcugggccuucgacgacgggaacgacgucuggaugggccggaccaucaacgagaccucccgccucggcuacgagaccuucaaggugguggagggguggagcaacuccaagagcaagcugcagaucaaccggcaggucaucguggaccgcggcgaccgguccggguacagcggcaucuucuccguggagggcaagagcugcaucaaccgcugcuucuacgucgagcugauccgggggcgcaaggaggagaccgaggugcucuggaccagcaacuccaucguggucuucugcggcacgagcgggaccuacggcaccggguccuggccggacggcgccgaccugaaccugaugcacaucugaggacuaguuauaagacugacuagcccgaugggccucccaacgggcccuccuccccuccuugcaccgagauuaauaaaaaaaaaaaaaaaaaaaaaaaaaaaaaaaaaaaaaaaaaaaaaaaaaaaaaaaaaaaaaaaaugcaucccccccccccccccccccccccccccccccaaaggcucuuuucagagccaccagaauu

SEQ ID NO: 14483 - RNA, 1627 nt, Artificial Sequence
  FLUAV/H3N2/A/Hong Kong/2671/2019__EPI1543099 neuraminidase mRNA gc (NA)
aggagaaagcuuaccaugaaccccaaccagaagaucaucaccaucggcagcgugucccugaccaucagcacgaucugcuucuucaugcagaucgccauccucaucaccaccgucacccugcacuucaagcaguacgaguucaacuccccgcccaacaaccaggugaugcugugcgagcccacgaucaucgagcgcaacaucaccgagaucguguaccucaccaacaccacgaucgagaaggagaucugccccaagccggccgaguaccggaacuggagcaagccccagugcgggaucaccggcuucgcgcccuucuccaaggacaacagcauccgccuguccgccgggggcgacaucugggucacccgggagcccuacgugagcugcgaccuggacaagugcuaccaguucgcccucgggcagggcaccacgcugaacaacgugcacuccaacaacaccguccgcgaccggaccccguaccgcacccugcucaugaacgagcugggcgugcccuuccaccuggggacgaagcaggucugcaucgccuggagcuccagcuccugccacgacggcaaggccuggcuccacgugugcaucaccggggacgacaagaacgcgaccgccagcuucaucuacaacggccggcugguggacuccguggucagcugguccaacgacauccugcgcacccaggagagcgagugcgugugcaucaacgggacgugcaccguggucaugaccgacggcaacgccaccggcaaggccgacacgaagauccucuucaucgaggaggggaagaucgugcacaccuccaagcugagcggcagcgcgcagcacguggaggagugcuccugcuacccccgguaccccgggguccgcugcgugugccgggacaacuggaagggcagcaaccgcccgaucaucgacaucaacaucaaggaccacuccaucgugagcuccuacgucugcagcggccuggugggggacacgccccggaaguccgacagcuccagcuccagccacugccucaaccccaacaacgaggagggcgggcacggcgugaaggggugggccuucgacgacggcaacgacgucuggaugggccgcaccaucaacgagaccucccggcugggguacgagaccuucaagguggucgagggcuggagcaaccccaaguccaagcugcagaucaaccgccaggugaucguggaccgcggggaccggagcggcuacuccgggaucuucagcgucgagggcaaguccugcaucaaccggugcuucuacguggagcucauccgcggccggaaggaggagaccgaggugcuguggaccagcaacagcaucgucguguucugcgggacguccggcaccuacgggaccggcagcuggccggacggggccgaccugaaccucaugcacaccugaggacuaguuauaagacugacuagcccgaugggccucccaacgggcccuccuccccuccuugcaccgagauuaauaaaaaaaaaaaaaaaaaaaaaaaaaaaaaaaaaaaaaaaaaaaaaaaaaaaaaaaaaaaaaaaaugcaucccccccccccccccccccccccccccccccaaaggcucuuuucagagccaccagaauu

SEQ ID NO: 14484 - RNA, 1627 nt, Artificial Sequence
  FLUAV/H3N2/A/Hong Kong/45/2019__EPI1691929 neuraminidase mRNA gc (NA)
aggagaaagcuuaccaugaaccccaaccagaagaucaucaccaucggcagcgugucccugaccaucagcacgaucugcuucuucaugcagaucgccauccucaucaccaccgucacccugcacuucaagcaguacgaguucaacucccugccgaacaaccaggugaugcucugcgagcccacgaucaucgagcgcaacaucaccgagaucguguaccugaccaacaccacgaucgagaaggagaucugccccaagcccgccgaguaccggaacuggagcaagccgcagugcgggaucaccggcuucgcgcccuucuccaaggacaacagcauccgccuguccgccgggggcgacaucugggucacccgggagcccuacgugagcugcgaccucgacaagugcuaccaguucgcccuggggcagggcaccacgcugaacaacgugcacuccaacaacaccguccgcgaccggacccccuaccgcacccuccugaugaacgagcugggcgugccguuccaccucgggacgaagcaggucugcaucgccuggagcuccagcuccugccacgacggcaaggccuggcugcacgugugcaucaccggggacgacaagaacgcgaccgccagcuucaucuacaacggccggcugguggacuccguggucagcugguccaacgacauccuccgcacccaggagagcgagugcgugugcaucaacgggacgugcaccguggucaugaccgacggcaacgccaccggcaaggccgacacgaagauccuguucaucgaggaggggaagaucgugcacaccuccaagcugagcggcagcgcgcagcacguggaggagugcuccugcuacccccgguaccccgggguccgcugcgugugccgggacaacuggaagggcagcaaccgccccaucaucgacaucaacaucaaggaccacuccaucgugagcuccuacgucugcagcggccucgugggggacaccccgcggaaguccgacagcuccagcuccagccacugccugaaccccaacaacgaggagggcgggcacggcgugaaggggugggccuucgacgacggcaacgacgucuggaugggccgcaccaucaacgagacgucccggcugggguacgagaccuucaagguggucgagggcuggagcaaccccaaguccaagcuccagaucaaccgccaggugaucguggaccgcggggaccggagcggcuacuccgggaucuucagcgucgagggcaaguccugcaucaaccggugcuucuacguggagcugauccgcggccggaaggaggagaccgaggugcuguggaccagcaacagcaucgucguguucugcgggacguccggcaccuacgggaccggcagcuggcccgacggggccgaccucaaccugaugcacaucugaggacuaguuauaagacugacuagcccgaugggccucccaacgggcccuccuccccuccuugcaccgagauuaauaaaaaaaaaaaaaaaaaaaaaaaaaaaaaaaaaaaaaaaaaaaaaaaaaaaaaaaaaaaaaaaaugcaucccccccccccccccccccccccccccccccaaaggcucuuuucagagccaccagaauu

SEQ ID NO: 14485 - RNA, 1627 nt, Artificial Sequence
  FLUAV/H3N2/A/South Australia/34/2019__EPI1387330 neuraminidase mRNA gc (NA)
aggagaaagcuuaccaugaaccccaaccagaagaucaucaccaucggcagcgugucccugaccaucagcacgaucugcuucuucaugcagaucgccauccucaucaccaccgucacccugcacuucaagcaguacgaguucaacuccccgcccaacaaccaggugaugcugugcgagcccacgaucaucgagcgcaacaucaccgagaucguguaccucaccaacaccacgaucgagaaggagaucugccccaagccggccgaguaccggaacuggagcaagccccagugcgggaucaccggcuucgcgcccuucuccaaggacaacagcauccgccuguccgccgggggcgacaucugggucacccgggagcccuacgugagcugcgaccuggacaagugcuaccaguucgcccucgggcagggcaccacgcugaacaacgugcacuccaacaacaccguccgcgaccggaccccguaccgcacccugcucaugaacgagcugggcgugcccuuccaccuggggacgaagcaggucugcaucgccuggagcuccagcuccugccacgacggcaaggccuggcuccacgugugcaucaccggggacgacaagaacgcgaccgccagcuucaucuacaacggccggcugguggacuccguggucagcugguccaacgacauccugcgcacccaggagagcgagugcgugugcaucaacgggacgugcaccguggucaugaccgacggcaacgccaccggcaaggccgacacgaagauccucuucaucgaggaggggaagaucgugcacaccuccaagcugagcggcagcgcgcagcacguggaggagugcuccugcuacccccgguaccccgggguccgcugcgugugccgggacaacuggaagggcagcaaccgcccgaucaucgacaucaacaucaaggaccacuccaucgugagccgguacgucugcuccggccuggugggggacacgccccgcaagagcgacuccagcuccagcucccacugccucaaccccaacaacgagaagggcgggcacggcgugaaggggugggccuucgacgacggcaacgacgucuggaugggccggaccaucaacgagaccagccgccugggguacgagaccuucaagguggucgagggcugguccaaccccaagagcaagcugcagaucaaccggcaggucaucguggaccgcggggaccgguccggcuacagcgggaucuucuccguggagggcaagagcugcaucaaccgcugcuucuacguggagcucauccggggccgcaaggaggagaccgaggugcuguggaccuccaacagcaucgucguguucugcgggacgagcggcaccuacgggaccggcuccuggccggacggggccgaccugaaccucaugcacaucugaggacuaguuauaagacugacuagcccgaugggccucccaacgggcccuccuccccuccuugcaccgagauuaauaaaaaaaaaaaaaaaaaaaaaaaaaaaaaaaaaaaaaaaaaaaaaaaaaaaaaaaaaaaaaaaaugcaucccccccccccccccccccccccccccccccaaaggcucuuuucagagccaccagaauu

SEQ ID NO: 14486 - RNA, 1615 nt, Artificial Sequence
  FLUAV/H7N9/A/chicken/Zhejiang/C483/2013(H7N9)__AGN69396.1 neuraminidase mRNA gc (NA)
aggagaaagcuuaccaugaaccccaaccagaagauccugugcaccagcgccaccgccaucaucaucggcgcgaucgccgugcucaucgggaucgccaaccugggccugaacaucgggcuccaccugaagccgggcugcaacugcucccacagccagcccgagacgaccaacaccucccagaccaucaucaacaacuacuacaacgagacgaacaucaccaacauccagauggaggagcgcaccagccggaacuucaacaaccugaccaaggggcucugcacgaucaacuccuggcacaucuacggcaaggacaacgccguccgcaucggcgagagcuccgacgugcuggugacccgggagcccuacgucagcugcgaccccgacgagugccgcuucuacgcccugucccaggggaccaccauccggggcaagcacagcaacgggacgauccacgaccgcucccaguaccgggcgcucaucagcuggccgcuguccagcccgcccaccguguacaacucccgcguggagugcaucggcuggagcuccaccagcugccacgacgggaagucccggaugagcaucugcaucagcggccccaacaacaacgccuccgccgucgugugguacaaccgccggcccguggccgagaucaacaccugggcgcgcaacauccugcggacgcaggagagcgagugcgucugccacaacggcgugugccccguggucuucaccgacggguccgccaccggccccgccgacacccgcaucuacuacuucaaggaggggaagauccucaagugggagagccugacgggcaccgccaagcacaucgaggagugcuccugcuacggcgagcggaccgggaucacgugcacgugccgcgacaacuggcagggcagcaaccggcccgugauccagaucgacccgguggccaugacccacaccucccaguacaucugcagccccguccugaccgacaacccccgccccaacgacccgaacaucgggaagugcaacgaccccuaccccggcaacaacaacaacggggugaagggcuucuccuaccucgacggcgcgaacaccuggcuggggcggaccaucagcaccgccucccgcagcggcuacgagaugcugaaggugcccaacgcccucaccgacgaccgguccaagccgauccaggggcagacgaucguccugaacgccgacuggagcggcuacuccgggagcuucauggacuacugggccgagggcgacugcuaccgcgcgugcuucuacguggagcugauccgcggccggcccaaggaggacaaggugugguggaccuccaacagcaucgucuccaugugcagcagcaccgaguuccucgggcaguggaacuggcccgacggcgccaagaucgaguacuuccugugaggacuaguuauaagacugacuagcccgaugggccucccaacgggcccuccuccccuccuugcaccgagauuaauaaaaaaaaaaaaaaaaaaaaaaaaaaaaaaaaaaaaaaaaaaaaaaaaaaaaaaaaaaaaaaaaugcaucccccccccccccccccccccccccccccccaaaggcucuuuucagagccaccagaauu

SEQ ID NO: 14487 - RNA, 1630 nt, Artificial Sequence
  FLUAV/H10N8/A/Jiangxi/IPB13/2013(H10N8)__AHK10769.1 neuraminidase mRNA gc (NA)
aggagaaagcuuaccaugaaccccaaccagaagaucaucaccaucggcagcgugucccuggggcucgucauccugaacauccugcuccacaucgugagcaucaccgugacgguccuggugcugccgggcaacgggaacaacgaguccugcaacgagaccgugauccgcgaguacaacgagaccguccggguggagaaggugacccaguggcacaacacgaacgucaucgaguacaucgagcgccccgagaacgaccacuucaugaacaacaccgaggcccucugcgacgccaagggcuucgcgcccuucagcaaggacaacgggauccggaucggcucccgcggccacguguucgugauccgggagcccuucgucagcugcuccccgaccgagugccgcaccuucuuccugacgcaggggagccugcucaacgacaagcacuccaacggcaccgugaaggaccggagccccuaccgcacccugauguccguggagaucgggcagagccccaacgucuaccaggcccgguucgaggccguggccugguccgccaccgcgugccacgacggcaagaaguggaugacgaucggggugaccggccccgacgccaaggccgucgccguggugcacuacggcgggaucccgaccgacgucaucaacagcugggcgggcgacauccugcgcacccaggaguccagcugcacgugcauccagggggagugcuucugggugaugaccgacggccccgccaaccggcaggcccaguaccgcgccuucaaggccaagcagggcaagaucguggggcaggcggagaucuccuucaacggcgggcacaucgaggagugcagcugcuaccccaacgagggcaaggucgagugcgugugccgggacaacuggaccgggaccaaccgccccguccucgugaucuccccggaccugagcuaccgggugggcuaccugugcgccggccuccccagcgacacgccccgcggggaggacucccaguucaccggcagcugcaccucccccauggggaaccagggcuacggggucaagggcuucggcuuccggcaggggaacgacguguggaugggccgcaccaucagccggacgucccgcagcggguucgagauccugaaggugcggaacggcuggguccagaacuccaaggagcagaucaagcgccaggugguggucgacaaccugaacuggagcggguacuccggcagcuucacccucccggccgagcugaccaagcgcaacugccuggugcccugcuucuggguggagaugauccggggcaaccccgaggagaagaccaucuggacguccagcuccagcaucgucaugugcgggguggaccacgagaucgccgacugguccuggcacgacggcgccauccuccccuucgacaucgacaagaugugaggacuaguuauaagacugacuagcccgaugggccucccaacgggcccuccuccccuccuugcaccgagauuaauaaaaaaaaaaaaaaaaaaaaaaaaaaaaaaaaaaaaaaaaaaaaaaaaaaaaaaaaaaaaaaaaugcaucccccccccccccccccccccccccccccccaaaggcucuuuucagagccaccagaauu

SEQ ID NO: 14488 - RNA, 1618 nt, Artificial Sequence
  FLUBV/H0N0/B/Colorado/06/2017__EPI1001930 neuraminidase mRNA gc (NA)
aggagaaagcuuaccaugcugcccagcaccauccagacccucacgcuguuccugaccuccggcggggugcuccugagccuguacgucuccgccagccucuccuaccugcuguacagcgacauccuccugaaguucuccccgaccgagaucaccgcccccacgaugccccuggacugcgcgaacgccagcaacgugcaggccgugaaccgcuccgccaccaagggcgucacccuccugcugcccgagccggaguggaccuacccccggcucagcugccccggguccacguuccagaaggcccugcugaucagcccccaccgcuucggcgagaccaaggggaacuccgcgccgcucaucauccgggagcccuucguggccugcggccccaacgagugcaagcacuucgcccugacccacuacgccgcgcagcccggcggguacuacaacggcacccgcggggaccggaacaagcugcgccaccucaucagcgugaagcugggcaagaucccgacggucgagaacuccaucuuccacauggccgccuggagcggguccgccugccacgacggcaaggaguggaccuacaucggcguggacgggcccgacaacaacgcccugcucaaggugaaguacggcgaggcguacaccgacaccuaccacagcuacgccaacaacauccugcggacgcaggaguccgccugcaacugcaucgggggcaacugcuaccugaugaucaccgacggcagcgccagcggggucuccgagugccgcuuccucaagauccgggagggccgcaucaucaaggagaucuuccccaccgggcgggugaagcacaccgaggagugcacgugcggcuucgccagcaacaagaccaucgagugcgcgugccgcgacaaccgguacaccgccaagcgccccuucgugaagcugaacgucgagaccgacacggccgagauccggcugaugugcaccgacaccuaccucgacaccccgcgccccaacgacggguccaucacgggccccugcgagagcgacggcgacaagggguccggcgggaucaagggcggguucgugcaccagcggaugaaguccaagaucggccgcugguacagccggaccaugagccagaccgagcgcaugggcauggggcuguacgugaaguacggcggggaccccugggccgacuccgacgcccuggcguucagcggcgucaugguguccaugaaggagccggggugguacagcuucggcuucgagaucaaggacaagaagugcgacgugcccugcaucggcaucgagaugguccacgacgggggcaaggagaccuggcacuccgccgccacggccaucuacugccucauggggagcggccagcugcugugggacaccgugaccggcguggacauggcccucugaggacuaguuauaagacugacuagcccgaugggccucccaacgggcccuccuccccuccuugcaccgagauuaauaaaaaaaaaaaaaaaaaaaaaaaaaaaaaaaaaaaaaaaaaaaaaaaaaaaaaaaaaaaaaaaaugcaucccccccccccccccccccccccccccccccaaaggcucuuuucagagccaccagaauu

SEQ ID NO: 14489 - RNA, 1618 nt, Artificial Sequence
  FLUBV/H0N0/B/Washington/02/2019__EPI1368872 neuraminidase mRNA gc (NA)
aggagaaagcuuaccaugcugcccagcaccauccagacccucacgcuguuccugaccuccggcggggugcuccugagccuguacgucuccgccagccucuccuaccugcuguacagcgacauccuccugaaguucuccccgaccgagaucaccgcccccacgaugccccuggacugcgcgaacgccagcaacgugcaggccgugaaccgcuccgccaccaagggcgucacccuccugcugcccgagccggaguggaccuacccccggcucagcugccccggguccacguuccagaaggcccugcugaucagcccccaccgcuucggcgagaccaaggggaacuccgcgccgcucaucauccgggagcccuucguggccugcggccccaacgagugcaagcacuucgcccugacccacuacgccgcgcagcccggcggguacuacaacggcacccgcggggaccggaacaagcugcgccaccucaucagcgugaagcugggcaagaucccgacggucgagaacuccaucuuccacauggccgccuggagcggguccgccugccacgacggcaaggaguggaccuacaucggcguggacgggcccgacaacaacgcccugcucaaggugaaguacggcgaggcguacaccgacaccuaccacagcuacgccaacaacauccugcggacgcaggaguccgccugcaacugcaucgggggcaacugcuaccugaugaucaccgacggcagcgccagcggggucuccgagugccgcuuccucaagauccgggagggccgcaucaucaaggagaucuuccccaccgggcgggugaagcacaccgaggagugcacgugcggcuucgccagcaacaagaccaucgagugcgcgugccgcgacaaccgguacaccgccaagcgccccuucgugaagcugaacgucgagaccgacacggccgagauccggcugaugugcaccgacaccuaccucgacaccccgcgccccaacgacggguccaucacgggccccugcgagagcgacggcgacaagggguccggcgggaucaagggcggguucgugcaccagcggaugaaguccaagaucggccgcugguacagccggaccaugagcaagaccgagcgcaugggcauggggcuguacgugaaguacggcggggaccccugggccgacuccgacgcccugaccuucagcggcgucaugguguccaugaaggagccggggugguacagcuucggcuucgagaucaaggacaagaagugcgacgugcccugcaucggcaucgagaugguccacgacgggggcaaggagacguggcacuccgcggccaccgccaucuacugccucauggggagcggccagcugcugugggacaccgugaccggcguggacauggcccucugaggacuaguuauaagacugacuagcccgaugggccucccaacgggcccuccuccccuccuugcaccgagauuaauaaaaaaaaaaaaaaaaaaaaaaaaaaaaaaaaaaaaaaaaaaaaaaaaaaaaaaaaaaaaaaaaugcaucccccccccccccccccccccccccccccccaaaggcucuuuucagagccaccagaauu

SEQ ID NO: 14490 - RNA, 1918 nt, Artificial Sequence
  FLUAV/H1N1/A/California/7/2009__ACP41953 hemagglutinin mRNA human (HA)
aggagaaagcuuaccaugaaggccauccuggugguccuccuuuacaccuucgcuacagcaaacgccgacacucugugcauuggcuaucacgcgaauaacagcacggauaccguugacacaguguuggagaagaauguaacugugacccauuccgucaacuuacuggaagauaagcacaaugggaaacuauguaagcucagaggaguggcuccccugcaucuugguaaaugcaacauagccggcuggauccuggggaauccugagugugaaucuuugucaacagcaaguagcugguccuacauuguugagaccccaucuucggacaacggaacuugcuauccgggcgauuuuaucgacuacgaggagcucagggagcagcugucaagcgugaguuccuucgaacgguuugagauuuuccccaagacaucuagcuggccuaaucacgauuccaacaagggugucaccgccgcuuguccacaugcaggggccaaaucauuuuauaagaaucugaucuggcucgugaaaaagggaaacaguuaccccaaauuaagcaagucuuauauaaaugacaagggcaaagaaguacugguucuuuggggcauccaccacccuuccacgucagcugaucaacagagcuuguaccagaacgccgacgcguacguguucgucgggaguucucgcuauuccaagaaauuuaagccagagauugcaauccgacccaaagugcgugaucaggagggaagaaugaauuacuauuggacucugguggaaccuggugacaagauuaccuucgaggccacaggcaaccuagucguuccaagguacgcuuuugccauggaacggaacgcagggagcggaaucauaauuucggauacuccggugcaugacugcaauaccacaugucaaacccccaaaggcgcuaucaacacgucucucccuuuccagaauauucacccaaucacuaucgguaagugccccaaguauguaaaauccacaaagcugcgccuugccaccgggcugagaaacauuccuucaauacagaguaggggauuguuuggcgcgaucgccggcuucauugaagggggauggacugguaugguggacggcugguacggguaucaucaccagaaugaacaaggaagcggcuacgcagcugaucucaaauccacacagaacgccaucgacgagauaaccaauaaggucaacucugugauugagaaaaugaauacgcaguuuaccgcuguugguaaggaguucaaccaccuggaaaagcggaucgaaaauuuaaacaaaaagguggaugacggguuccuggauaucuggacauacaaugccgagcuccuuguccuguuggaaaacgagcgcacucuagacuaucaugauagcaaugugaaaaaccuguacgagaagguacgaucacagcucaaaaacaaugcaaaggaaauuggcaacggauguuuugaguucuaucacaagugcgacaauaccuguauggaaaguguuaaaaacggcacauacgauuauccaaaguacuccgaggaagccaaacugaauagagaggagaucgacggggugaaacuugaaagcacuaggauuuaucaaauacuggcuaucuacucuaccgucgcgucaaguuuggugcucgucgugagccugggagcaauuuccuuuuggaugugcucuaacgguucguuacagugccggaucuguaucugaggacuaguuauaagacugacuagcccgaugggccucccaacgggcccuccuccccuccuugcaccgagauuaauaaaaaaaaaaaaaaaaaaaaaaaaaaaaaaaaaaaaaaaaaaaaaaaaaaaaaaaaaaaaaaaaugcaucccccccccccccccccccccccccccccccaaaggcucuuuucagagccaccagaauu

SEQ ID NO: 14491 - RNA, 1918 nt, Artificial Sequence
  FLUAV/H1N1/A/Michigan/45/2015__EPI662594 hemagglutinin mRNA human (HA)
aggagaaagcuuaccaugaaggccauccuggugguccuccuuuacaccuucacaacugcuaacgcagacacgcugugcauuggcuaucacgccaauaacagcaccgauacaguugacacuguguuggagaagaauguaaccgugacacauuccgucaacuuacuggaagauaagcacaaugggaaacuauguaagcucagaggaguggcgccccugcaucuugguaaaugcaacauagcuggcuggauccuggggaauccugagugugaaucuuugucaaccgccaguagcugguccuacauuguugagacuucuaacucggacaauggaacaugcuauccaggcgauuuuaucaacuacgaagaacucagggagcagcugucaagcgugaguuccuucgaacgguuugagauuuucccgaagaccucuagcuggcccaaucacgacuccaacaagggugucacggcagccuguccucaugcuggggcaaaaucauuuuauaagaaucugaucuggcucgugaaaaagggaaacaguuacccaaaauuaaaucaaagcuauauaaacgauaagggcaaggaaguacugguucuuuggggcauccaccaccccucuacuaccgccgaccagcaguccuuguaccagaacgcugaugccuacguguucgucgggacaucacgcuauagcaaaaaguuuaaaccugagauugcgacucgaccaaaggugcgugaccaagagggaagaaugaauuacuauuggacccugguggaacccggugauaaaaucacauucgaggcaaccggcaaccuagucguuccuagguacgccuuuacgauggaacggaaugcugggaguggaauuaucauaucugacacuccagugcaugauugcaacacaaccugucagacuccggagggcgccauuaauacaucccuccccuuccagaacauccacccuauuaccaucgguaagugcccaaaauauguaaagagcacgaagcugcgccuugcaaccgggcugagaaaugugcccucgauccagucuaggggauuguuuggcgcuauugccggcuucauagaagggggauggacagguauggucgacggcugguacggguaucaucaccaaaacgagcagggauccggcuacgcggccgaccucaaaucaacucagaaugcaaucgauaagauuaccaacaaagugaauaguguuaucgagaagaugaacacacaguuuacugcuguggguaaagaguucaaucaccuggagaagcggauagaaaacuuaaauaagaaagucgacgauggguuccuggacauuuggaccuacaacgccgagcuccuugugcuguuggaaaacgagcgcacacuagauuaucaugacagcaauguaaagaaccuguacgagaaaguucgaaaucaacucaagaacaaugcuaaagaaaucggcaacggauguuuugaguucuaucacaagugcgauaauaccuguauggaauccgugaagaacggcacuuacgacuauccuaaauacucugaggaagccaagcugaauagagagaaaaucgauggggucaaacuugagagcacgaggauuuaucagauccuggcaauuuacucaacaguggccaguuccuugguccucgugguuagccugggagcuauaucuuuuuggaugugcucaaacgguaguuuacagugccggaucuguauuugaggacuaguuauaagacugacuagcccgaugggccucccaacgggcccuccuccccuccuugcaccgagauuaauaaaaaaaaaaaaaaaaaaaaaaaaaaaaaaaaaaaaaaaaaaaaaaaaaaaaaaaaaaaaaaaaugcaucccccccccccccccccccccccccccccccaaaggcucuuuucagagccaccagaauu

SEQ ID NO: 14492 - RNA, 1918 nt, Artificial Sequence
  FLUAV/H1N1/A/Netherlands/602/2009__ACQ45338 hemagglutinin mRNA human (HA)
aggagaaagcuuaccaugaaggccauccuggugguccuccuuuacaccuucgcuacagcaaacgccgacacucugugcauuggcuaucacgcgaauaacagcacggauaccguugacacaguguuggagaaaaauguaacugugacccauuccgucaacuuacuggaagauaagcacaaugggaaacuauguaagcucagaggaguggcuccccugcaucuugguaaaugcaacauagccggcuggauccuggggaauccugagugugaaucuuugucaacagcaaguagcugguccuacauuguugagaccucuucgucagacaacggaacuugcuauccaggcgauuuuaucgacuacgaggagcucagggagcagcugagcaguguguccucuuucgaacgguuugagauuuucccgaagacaagcuccuggcccaaucacgauucaaacaagggugucaccgccgcuuguccucaugcaggggccaaaaguuuuuauaagaaucugaucuggcucgugaaaaagggaaacagcuacccaaaauuaucuaaguccuauauaaaugacaagggcaaagaaguacugguucuuuggggcauccaccaccccucaacgagcgcugaucaacagaguuuguaccagaacgccgacgcguacguguucgucgggucuucccgcuauagcaagaaauuuaagccugagauugcaauccgaccaaaagugcgugaucaggagggaagaaugaauuacuauuggacucugguggaacccggugacaagauuaccuucgaggccacaggcaaccuagucguuccuagguacgcuuuugccauggaacggaacgcagggucgggaaucauaauuucugauacuccagugcaugacugcaauaccacaugucaaaccccgaaaggcgcuaucaacacgucccuccccuuccagaauauucacccuaucacuaucgguaagugcccaaaguauguaaaaucaacaaagcugcgccuugccaccgggcugagaaacgugcccaguauucagagcaggggauuguuuggcgcgauagccggcuucaucgaagggggauggacugguauggucgacggcugguacggguaucaucaccagaaugaacaaggauccggcuacgcagcugaucucaaaucuacacagaacgccauugacgagaucaccaauaaggugaacagcguuauagagaaaaugaauacgcaguuuaccgcuguggguaaggaguucaaccaccuggaaaagcggauugaaaauuuaaacaaaaaggucgaugacggguuccuggauaucuggacauacaaugccgagcuccuugugcuguuggaaaacgagcgcacucuagacuaucaugauucaaauguaaagaaccuguacgagaagguucgaagucagcucaaaaacaaugcaaaggaaaucggcaacggauguuuugaguucuaucacaagugcgacaauaccuguauggaauccgugaaaaacggcacauacgauuauccuaaguacagcgaggaagccaaacugaauagagaggagauugacggggucaaacuugaaucuacuaggaucuaucaaauucuggcuauauacucaaccguggcgaguagcuugguccucgugguuucccugggagcaaucucuuuuuggaugugcucgaacgguagcuuacagugccggauuuguaucugaggacuaguuauaagacugacuagcccgaugggccucccaacgggcccuccuccccuccuugcaccgagauuaauaaaaaaaaaaaaaaaaaaaaaaaaaaaaaaaaaaaaaaaaaaaaaaaaaaaaaaaaaaaaaaaaugcaucccccccccccccccccccccccccccccccaaaggcucuuuucagagccaccagaauu

SEQ ID NO: 14493 - RNA, 1918 nt, Artificial Sequence
  FLUAV/H3N2/A/Hong Kong/4801/2014__EPI643118 hemagglutinin mRNA human (HA)
aggagaaagcuuaccaugaagaccaucauugcccugagcuacauacucugccuuguguucgcucagaaaauccccggcaacgacaauuccacagcaacucuguguuuggggcaccaugccgucccuaacggaacgauuguuaagaccaucacaaaugauagaauugaggugacuaacgcgaccgaauuaguacaaaauucuucaaucggugagauaugcgacaguccacaccagauccuggauggcgaaaacuguacacuaauugacgcucuccugggggauccgcagugcgacggauuucagaauaaaaagugggaucuuuucguggagaggagcaaagccuauuccaacuguuaccccuaugacgucccugauuacgcaucucugcggucguugguggccucaagcggcacccucgaauuuaauaacgagaguuucaauuggacugguguuacacaaaacgggaccuccucugcuugcauccgccgaagcuccucaaguuucuucagccgucugaauuggcugacgcaucucaacuauaaguacccagcauuaaaugugacuaugcccaacaacgagcaguuugacaagcuguauauuuggggaguccaccauccuggcaccgauaaagaccagaucuucccauacgcccagucuuccggcagaauaauugugucaacaaagaggagccaacaggcuguaauccccaauauugggagucggccucgcaucagagauaucccaucuaggauuuccauauacuggacuaucguuaaaccgggagacauucuuuugaucaacagcaccgguaaucugauagcgccccggggcuauuuuaagcuacgcucggggaaaucuuccauuaugcgaucagacgccccuaucggaaaguguaagagugaaugcaucacaccaaacggcagcauucccaaugauaaaccuuuccagaacgugaauagaaucaccuacggugcauguccaagguaugucaagcacuccacgcucaaacuggccacugggaugcggaacgugcccgagaagcagacacguggaauuuuuggcgcuauagccggcuucaucgaaaaugggugggagggaaugguggacgguugguacggcuuucgccaccaaaacucugaggggagaggacaggcagcugaucuuaaaagcacccaggccgcgauugaccaaaucaauggcaagcugaacagguugaucgguaaaacuaaugaaaaguuccaucagauugagaaggaauuuucagaggucgaagggcggauacaggaucucgagaaauauguugaggacacaaagaucgaucuguggaguuacaacgccgaauuacugguggcacucgagaaucagcacaccauugaccuuacggauuccgaaaugaacaaacuguuugagaagaccaaaaagcaauugcgagaaaacgcugaggacaugggcaauggaugcuucaagaucuaucauaaaugugauaacgccugcauuggcagcauccgcaaugggacauacgaccacaacguauacagagacgaggcucuaaauaacagguuucagauaaagggaguggaacugaaaucugguuauaaggauuggauccucuggauuucauucgccaucaguugcuuucugcuuugugucgcacuguugggcuucauuaugugggccugccagaaagggaauauccgguguaacauaugcauuugaggacuaguuauaagacugacuagcccgaugggccucccaacgggcccuccuccccuccuugcaccgagauuaauaaaaaaaaaaaaaaaaaaaaaaaaaaaaaaaaaaaaaaaaaaaaaaaaaaaaaaaaaaaaaaaaugcaucccccccccccccccccccccccccccccccaaaggcucuuuucagagccaccagaauu

SEQ ID NO: 14494 - RNA, 1975 nt, Artificial Sequence
  FLUBV/H0N0/B/Brisbane/60/2008__FJ766840 hemagglutinin mRNA human (HA)
aggagaaagcuuaccaugaaggccaucauugugcugcucauggucguuaccagcaacgcugacagaauaugcacaggcaucacuuccucuaauucaccccacgugguaaaaacggcaacccagggggaggugaacgucacaggagugauuccucuuacuaccacaccaaccaagagucauuucgccaaucugaaagguacugaaacaaggggcaaguuguguccgaaaugcuuaaacuguaccgaucuggacguugcgcuagggcggcccaagugcacgggaaagaucccuagcgcucgcguguccauucuccacgagguccgaccagugacuucuggcuguuuucccaucaugcaugaucguaccaaaauaagacaacugccuaaucuucugagggguuacgaacacauccgguugucgacacauaacguaauuaaugccgagaacgcaccagggggacccuauaagaucggcacuucaggcagcugcccuaauauuaccaacgggaauggauucuuugccacaauggcuugggcaguuccgaaaaacgacaagaauaaaaccgccacgaacccacucacuaucgaagugcccuacauauguacagagggugaggaucagauuaccgucuggggcuuccacagugacaaugaaacucagauggcuaagcuguauggggauuccaagccucagaaauuuacaucuagcgccaacggagugaccacgcacuacgugucccaaaucggcgguuucccaaaccagaccgaggacgggggacugccccagucaggccgcauugucguugauuauauggugcagaagaguggcaaaacagggacuaucaccuaccaaagaggaauccucuuaccucagaagguauggugcgcgagcgguaggucuaaagugauuaagggcucccugccacuuauaggggaagcagacuguuugcaugagaaauauggaggccugaauaagucaaagcccuacuacacaggugagcacgccaaagcuaucgggaacugcccgauuugggucaagacuccucuaaaacucgccaauggcaccaaguaucggcccccagcaaaacugcuuaaggaacgcggauuuuucggcgcuaucgccggguuucuggagggagguugggaaggcaugauagcgggguggcauggauacacaagccacggcgcccacgguguggcaguugcugccgauuugaagaguacccaggaggcuauuaacaaaaucacuaagaaucucaacucucuguccgaauuagaggugaaaaaucugcagcgacucagcggggccauggacgagcuucauaacgaaauccuggaguuggaugaaaaggucgacgaccuaagagcagauacgauuucgucucaaaucgagcuggccgugcuccuguccaaugaaggcauuauaaacucagaggacgagcaccuucuggcuuuggaaaggaaacucaagaagaugcugggaccuagugcgguagagaucggcaauggguguuucgaaacaaaacauaagugcaaccagaccugcuuagaucggauugcagccggaacuuuugacgcuggugaguucagccugcccaccuuugauucccuaaauaucacagccgcaucucucaacgacgauggccuggacaaucacaccauccuuuuguauuacagcacugccgcuucaagucuggccguuacacucaugauugcaauauucguggucuauauggugucccgugauaacgucagcuguucuaucugccugugaggacuaguuauaagacugacuagcccgaugggccucccaacgggcccuccuccccuccuugcaccgagauuaauaaaaaaaaaaaaaaaaaaaaaaaaaaaaaaaaaaaaaaaaaaaaaaaaaaaaaaaaaaaaaaaaugcaucccccccccccccccccccccccccccccccaaaggcucuuuucagagccaccagaauu

SEQ ID NO: 14495 - RNA, 1972 nt, Artificial Sequence
  FLUBV/H0N0/B/Phuket/3073/2013__EPI540671 hemagglutinin mRNA human (HA)
aggagaaagcuuaccaugaaggccaucauugugcugcucauggucguuaccagcaacgcugacagaauaugcacaggcaucacuuccucuaauucaccccacgugguaaaaacggcaacccagggggaagugaacgucacaggagugauuccucuuacuaccacaccaaccaagaguuacuucgccaaucugaaagguacuaggacacggggcaaguuguguccggauugcuuaaacuguaccgaccuggauguugcgcuagggcgccccaugugcgugggaacgacuccuagcgcuaaagccuccauccuccaugaaguccgaccagugaccucuggcuguuuucccauuaugcacgaccguacaaagaucagacaacugccuaaucuucugagggguuaugagaagauacgguugucgacucagaacguaaucgaugcagaaaaagccccagggggacccuaccgccucggcaccucaggcagcugcccuaaugcuacaaguaagauuggguucuuugcaaccauggccugggcuguuccaaaagacaacuauaagaaugccacgaacccgcugacuguggagguccccuacaucuguacagaaggagaggaucagauuaccgugugggguuuccauuccgacaauaaaacucagaugaagucucuguauggcgauagcaacccucaaaaguuuacauccucagcgaauggggugaccacgcacuacgucagucagaucggagacuucccagaucagaccgaggacggcggucucccccagagcgggagaauaguuguggauuauaugaugcaaaaaccuggaaagacaggcacuauuguauaccagaggggcguguuacugccacagaaagucuggugcgcaucugggcgguccaaggugaucaaaggaucacuucccuugauuggugaagccgacugucugcaugaggaauacggcgggcuaaacaagagcaaaccguauuacaccggaaagcacgcuaaggccaucggcaauugcccuaucuggguuaaaacaccccucaagcuggcaaacgguacuaaauaucgcccuccagcuaaacuucugaaggagcgaggguuuuucggcgccauugcgggauuuuuggagggcgggugggaaggaaugauagccgguuggcacggcuacaccagucauggggcacacggaguggcugucgccgcugaccucaagucuacacaggaggccaucaacaagauuaccaaaaaucugaacuccuuaagcgaacuggaggugaagaaucuccaaagacuuucgggcgcaauggaugaacugcauaacgagaucuuggagcuagacgaaaaaguagaugaccugagggccgauacuauaucuucccagauugagcucgcuguucugcuuucaaaugaagguaucaucaacagugaggacgaacaccuguuggcgcucgagcggaagcugaaaaagauguuagggcccagcgcaguggauauuggcaauggauguuucgagacgaagcacaaaugcaaccagacaugccuggaccguaucgccgcuggcaccuuuaaugccggggaguucucccuaccaacuuuugauucucucaacauuaccgcagccagccugaaugacgauggacuugacaaccauacaauauugcuguauuacucaaccgcugccaguucccucgcagucacucugaugcuugcgaucuucauuguguauauggucagccgcgacaaugugucuuguucaaucugccugugaggacuaguuauaagacugacuagcccgaugggccucccaacgggcccuccuccccuccuugcaccgagauuaauaaaaaaaaaaaaaaaaaaaaaaaaaaaaaaaaaaaaaaaaaaaaaaaaaaaaaaaaaaaaaaaaugcaucccccccccccccccccccccccccccccccaaaggcucuuuucagagccaccagaauu

SEQ ID NO: 14496 - RNA, 1912 nt, Artificial Sequence
  FLUAV/H1N1/A/Brisbane/02/2018__EPI1212834 hemagglutinin mRNA human (HA)
aggagaaagcuuaccaugaaggccauccuggugguccuccuuuacaccuucacaacugcuaacgcagacacgcugugcauuggcuaucacgccaauaacagcaccgauacaguugacacuguguuggagaagaauguaaccgugacacauuccgucaacuuacuggaagauaagcacaaugggaaacuauguaagcucggagguguggcgccccugcaucuuggcaaaugcaacauagcuggguggauccugggaaauccugagugugaaucuuugucaaccgccagaaguuggagcuacauuguugagacuuccaacucugacaauggcacaugcuauccaggugauuuuaucaacuacgaagaacucagggagcagcugucgucagugagcaguuucgaacgguuugagauuuucccgaagaccuccucuuggcccaaucacgacagcaacaagggggucacggcagccuguccucaugcuggagcaaaauccuuuuauaagaaucugaucuggcucgugaaaaagggcaacucauacccaaaauuaaaucaaacuuauauaaacgauaagggcaaggaaguacugguucuuugggggauccaccaucccccuaccacagccgaccagcagaguuuguaccagaacgcugaugccuacguguucgucggaacuagccgcuauucuaaaaaguuuaaaccagagauugcgacccgacccaaggugcgugacagagaggguaggaugaauuacuauuggacacugguggaaccuggcgauaaaaucaccuucgaggcaacggggaaccuagucguuccacgguacgccuuuacuauggaacgcaaugcuggauccggcauuaucauaucagacacaccggugcacgauugcaacaccacuugucaaacagccgagggugcaauuaauaccagccuccccuuccagaacguacacccugugacgaucgggaagugcccaaaauaugucaagaguaccaagcugagacuugcuacaggacugaggaaugugcccucuauucagucccggggcuuguuuggcgccaucgcgggguucaucgaaggagguuggacuggcaugguugacgggugguacggauaucaucaccagaacgagcaaggcagcgguuacgccgcagaccucaaaucgaaugcuauugauaagauaaccaacaaagucaauucugugaucgagaagaugaacacacaguuuacugccguggggaaagaguucaaucaccuggagaagcgcauugaaaacuuaaauaagaaaguagacgauggcuuccuggacaucuggaccuacaacgcugagcuccuuguucuguuggaaaacgagcgaacacuagauuaucaugacuccaaugugaagaaccuguacgagaaagucagaaaucagcucaagaacaaugccaaagaaauaggaaacggcuguuuugaguucuaucacaagugcgauaauaccuguauggaaucagugaagaacgggacuuacgacuauccuaaauacagugaggaagcaaagcugaauagggagaaaauugauggagucaaacuugagagcacgcggaucuaucagauccuggccauuuacuccacaguggcuucuagcuugguucucgugguaucacugggugcgaucaguuuuuggaugugcuccaacggcagcuuacaaugccguauuuguauaugaggacuaguuauaagacugacuagcccgaugggccucccaacgggcccuccuccccuccuugcaccgagauuaauaaaaaaaaaaaaaaaaaaaaaaaaaaaaaaaaaaaaaaaaaaaaaaaaaaaaaaaaaaaaaaaaugcaucccccccccccccccccccccccccccccccaaaggcucuuuucagagccaccagaauu

SEQ ID NO: 14497 - RNA, 1912 nt, Artificial Sequence
  FLUAV/H1N1/A/Brisbane/02/2018__EPI1671767 hemagglutinin mRNA human (HA)
aggagaaagcuuaccaugaaggccauccuggugguccuccuuuacaccuucacaacugcuaacgcagacacgcugugcauuggcuaucacgccaauaacagcaccgauacaguugacacuguguuggagaagaauguaaccgugacacauuccgucaacuuacuggaagauaagcacaaugggaaacuauguaagcucggagguguggcgccccugcaucuuggcaaaugcaacauagcuggguggauccugggaaauccugagugugaaucuuugucaaccgccagaaguuggagcuacauuguugagacuuccaacucugacaauggcacaugcuauccaggugauuuuaucaacuacgaagaacucagggagcagcugucgucagugagcaguuucgaacgguuugagauuuucccgaagaccuccucuuggcccaaucacgacagcaacaagggggucacggcagccuguccucaugcuggagcaaaauccuuuuauaagaaucugaucuggcucgugaaaaagggcaacucauacccaaaauuaaaucaaacuuauauaaacgauaagggcaaggaaguacugguucuuugggggauccaccaucccccuaccacagccgaccagcagaguuuguaccagaacgcugaugccuacguguucgucggaacuagccgcuauucuaaaaaguuuaaaccagagauugcgacccgacccaaggugcgugaccaagaggguagaaugaauuacuauuggacacugguggaaccuggcgauaaaaucaccuucgaggcaacggggaaccuagucguuccaagguacgccuuuacuauggaacggaaugcuggauccggcauuaucauaucagacacaccggugcacgauugcaacaccacuugucagacagccgagggugcaauuaauaccagccuccccuuccagaacguacacccugugacgaucgggaagugcccaaaauaugucaagaguaccaagcugcgccuugcuacaggacugagaaaugugcccucuauucaguccaggggcuuguuuggcgccaucgcgggguucaucgaaggagguuggacuggcaugguugacgggugguacggauaucaucaccaaaacgagcagggcagcgguuacgccgcagaccucaaaucgaaugcuauugauaagauaaccaacaaagucaauucugugaucgagaagaugaacacacaguuuacugccguggggaaagaguucaaucaccuggagaagcggauugaaaacuuaaauaagaaaguagacgauggcuuccuggacaucuggaccuacaacgcugagcuccuuguucuguuggaaaacgagcgcacacuagauuaucaugacuccaaugugaagaaccuguacgagaaaguccgaaaucagcucaagaacaaugccaaagaaauaggaaacggcuguuuugaguucuaucacaagugcgauaauaccuguauggaaucagugaagaacgggacuuacgacuauccuaaauacagugaggaagcaaagcugaauagagagaaaauugauggagucaaacuugagagcacgaggaucuaucaaauccuggccauuuacuccacaguggcuucuagcuugguucucgugguaucacugggugcgaucaguuuuuggaugugcuccaacggcagcuuacagugccggauuuguauaugaggacuaguuauaagacugacuagcccgaugggccucccaacgggcccuccuccccuccuugcaccgagauuaauaaaaaaaaaaaaaaaaaaaaaaaaaaaaaaaaaaaaaaaaaaaaaaaaaaaaaaaaaaaaaaaaugcaucccccccccccccccccccccccccccccccaaaggcucuuuucagagccaccagaauu

SEQ ID NO: 14498 - RNA, 1912 nt, Artificial Sequence
  FLUAV/H1N1/A/Guangdong-Maonan/SWL1536/2019__EPI1542570 hemagglutinin mRNA human (HA)
aggagaaagcuuaccaugaaggccauccuggugguccuccuuuacaccuucacaacugcuaacgcagacacgcugugcauuggcuaucacgccaauaacagcaccgauacaguugacacuguguuggagaagaauguaaccgugacacauuccgucaacuuacuggaagauaagcacaaugggaaacuauguaagcucagaggaguggcgccccugcaucuugguaaaugcaacauagcuggcuggauccuggggaauccugagugugaaucuuugucaaccgccaggaguuggagcuacauuguugagacuuccaacucugacaauggaacaugcuauccaggcgauuuuaucaacuacgaggagcuccgggagcagcugucgucagugagcaguuucgaacgcuuugagauuuucccgaagaccuccucuuggcccaaucacgacagcgauaagggugucacggcagccuguccucaugcuggggcaaaauccuuuuauaagaaccugaucuggcucgugaaaaagggaaauucauacccaaaauuaaaccaaacuuauauaaaugacaagggcaaggaaguacugguucuuuggggcauccaccaucccccuaccauugccgcucaggagaguuuguaccagaacgccgaugcguacguguucgucgggacaagccgauauucuaaaaaguuuaaaccagagaucgcaacucgucccaaggugagagaccaggaaggaaggaugaacuacuauuggacccugguggagccuggugauaaaauuacauucgaagccaccggcaaucuagucguuccacgguacgcuuuuacgauggagcgcgacgccggguccggaaucauaauuucagauacuccggugcacgacugcaacacaaccugucaaacucccgaaggcgcaaucaauacaagccucccuuuccagaacguacacccaauuaccaucgguaagugccccaaauaugugaagaguacgaagcugagacuugcuaccgggcugaggaaugucccuucuauccagucccggggauuguuuggcgccauugcgggcuucauagaagggggauggacagguaugguggacggcugguacggguaucaucaccagaacgagcaaggaagcggcuacgccgcagaucucaaaucgaaugcuaucgacaagauuacuaacaaaguuaauucugugaucgaaaagaugaacacccaguuuacagccgucgguaaagaguucaaucaccuggaaaagcgcauagagaacuuaaauaagaaaguggaugacggguuccuggauauuuggacuuacaacgcugaacuccuuguacuguuggagaaugagcgaacccuagacuaucaugauuccaacguuaagaaccuguacgaaaaagugagaaaucagcucaagaacaaugccaaagagaucggcaacggauguuuugaguucuaucacaagugcgacaauacauguauggaaucagucaagaacggcaccuacgauuauccaaaauacagugaagaggcaaagcugaauagggagaaaaucgacggggugaaacuugaaagcacucggauuuaucagauccuggccauuuacuccacggucgcuucuagcuuggugcucguugugucacugggagcgauaaguuuuuggaugugcuccaacgguagcuuacaaugccguaucuguauuugaggacuaguuauaagacugacuagcccgaugggccucccaacgggcccuccuccccuccuugcaccgagauuaauaaaaaaaaaaaaaaaaaaaaaaaaaaaaaaaaaaaaaaaaaaaaaaaaaaaaaaaaaaaaaaaaugcaucccccccccccccccccccccccccccccccaaaggcucuuuucagagccaccagaauu

SEQ ID NO: 14499 - RNA, 1912 nt, Artificial Sequence
  FLUAV/H1N1/A/Guangdong-Maonan/SWL1536/2019__EPI1590725 hemagglutinin mRNA human (HA)
aggagaaagcuuaccaugaaggccauccuggugguccuccuuuacaccuucacaacugcuaacgcagacacgcugugcauuggcuaucacgccaauaacagcaccgauacaguugacacuguguuggagaagaauguaaccgugacacauuccgucaacuuacuggaagauaagcacaaugggaaacuauguaagcucagaggaguggcgccccugcaucuugguaaaugcaacauagcuggcuggauccuggggaauccugagugugaaucuuugucaaccgccaggaguuggagcuacauuguugagacuuccaacucugacaauggaacaugcuauccaggcgauuuuaucaacuacgaggagcuccgggagcagcugucgucagugagcaguuucgaacgcuuugagauuuucccgaagaccuccucuuggcccaaucacgacagcgauaagggugucacggcagccuguccucaugcuggggcaaaauccuuuuauaagaaccugaucuggcucgugaaaaagggaaauucauacccaaaauuaaaccaaacuuauauaaaugacaagggcaaggaaguacugguucuuuggggcauccaccaucccccuaccauugccgugcaggagaguuuguaccagaacgcugaugccuacgucuucguggggacaagccgauauucuaaaaaguuuaaaccagagaucgcgacucgucccaaggugagagaccaggaaggaaggaugaacuacuauuggacccuggucgagccuggugauaaaauuacauucgaagcaaccggcaaucuaguugugccacgguacgccuuuacgauggagcgcgacgcuggguccggaaucauaauuucagauacuccgguacacgacugcaacacaaccugucaaacucccgaaggcgccaucaauacaagccucccuuuccagaacgugcacccaauuaccaucgguaagugccccaaauaugucaagaguacgaagcugagacuugcaaccgggcugaggaaugugccuucuauccagucccggggauuguuuggcgcuauugccggcuucauagaagggggauggacagguaugguugacggcugguacggguaucaucaccagaacgagcaaggaagcggcuacgcggccgaucucaaaucgaaugcaaucgacaagauuacuaacaaagucaauucugugaucgaaaagaugaacacccaguuuacagcuguggguaaagaguucaaucaccuggaaaagcgcauagagaacuuaaauaagaaaguagaugacggguuccuggauauuuggacuuacaacgccgaacuccuuguucuguuggagaaugagcgaacccuagacuaucaugauuccaacgugaagaaccuguacgaaaaagucagaaaucagcucaagaacaaugcuaaagagaucggcaacggauguuuugaguucuaucacaagugcgacaauacauguauggaaucagugaagaacggcaccuacgauuauccaaaauacagugaagaggccaagcugaauagggagaaaaucgacggggucaaacuugaaagcacucggauuuaucagauccuggcaauuuacuccacgguggccucuagcuugguucucgugguaucacugggagcuauaaguuuuuggaugugcuccaacgguagcuuacaaugccguaucuguauuugaggacuaguuauaagacugacuagcccgaugggccucccaacgggcccuccuccccuccuugcaccgagauuaauaaaaaaaaaaaaaaaaaaaaaaaaaaaaaaaaaaaaaaaaaaaaaaaaaaaaaaaaaaaaaaaaugcaucccccccccccccccccccccccccccccccaaaggcucuuuucagagccaccagaauu

SEQ ID NO: 14500 - RNA, 1918 nt, Artificial Sequence
  FLUAV/H3N2/A/Singapore/INFIMH-16-0019/2016__EPI1106227 hemagglutinin mRNA human (HA)
aggagaaagcuuaccaugaagaccaucauugcccugagcuacauacucugccuuguguucgcucagaaaauccccggcaacgacaauuccacagcaacucuguguuuggggcaccaugccgucccuaacggaacgauuguuaagaccaucacaaaugauagaauugaggugacuaacgcgaccgaauuaguacaaaauucuucaaucggugagauaugcgacaguccacaccagauccuggauggcgaaaacuguacacuaauugacgcucuccugggggauccgcagugcgacggauuucagaauaaaaagugggaucuuuucguggagaggagcaaagccuauuccaacuguuaccccuaugacgucccugauuacgcaucucugcggucguugguggccucaagcggcacccucgaauuuaagaaugagaguuucaacuggacugguguuacacaaaaugggaccuccucugcuugcauccgcggaagcuccucaaguuucuucagccgacugaacuggcugacgcaucucaauuauacuuacccagcauuaaacgugaccaugcccaauaaggagcaguuugacaaacuguauauuuggggcguccaccauccuggcacagauaaggaccagaucuuccuuuacgcccagucuuccgggcguauaacugugucaaccaaaagaagccaacaggcuguaauuccaaacaucggaaguaggccccggauucgcgauaucccuucuagaaucuccauuuacuggacaauaguuaagccaggugacaucuugcugauuaacagcaccggcaaucuaaucgccccgaggggguauuuuaaaauacggucgggaaagucuuccauuaugcgcucagacgcgcccaucggcaaguguaaaagugaaugcaucacgccuaacgguagcauuccaaaugauaagcccuuccagaacgugaaucgaaucacuuacggggcauguccuagauaugucaaacacuccacacucaagcuggccaccggaaugaggaacgugccagagaaacagacucggggcauuuuuggcgcuauagccggguucaucgaaaauggaugggaggguaugguggacggcugguacggguuucgucaccaaaacucugagggacgcggccaggcagcugaucuuaagagcacacaggccgcgauugaccaaaucaaugguaaacugaacagauugaucgggaagaccaaugaaaaguuccaucagauugagaaagaauuuucagaggucgaaggcaggguucaggaucucgagaaguauguggaggacacgaaaauagaucuguggaguuacaacgccgaauuacugguagcacucgagaaucagcacaccaucgaccuuacagauuccgaaaugaacaagcuguuugagaaaacuaagaagcaauugcgggaaaaugcugaggacaugggaaacggcugcuucaaaauuuaucauaagugugauaacgccugcaucgagagcauucgaaaugaaaccuacgaccacaacguguaccgcgacgaggcucuaaauaacagauuucagaucaaaggggucgaacugaagucuggauauaaagauuggauacucuggaucucauucgccauuaguugcuuucugcuuuguguggcacuguuggguuucaucaugugggccugccagaagggcaauauuagguguaacaucugcauaugaggacuaguuauaagacugacuagcccgaugggccucccaacgggcccuccuccccuccuugcaccgagauuaauaaaaaaaaaaaaaaaaaaaaaaaaaaaaaaaaaaaaaaaaaaaaaaaaaaaaaaaaaaaaaaaaugcaucccccccccccccccccccccccccccccccaaaggcucuuuucagagccaccagaauu

SEQ ID NO: 14501 - RNA, 1918 nt, Artificial Sequence
  FLUAV/H3N2/A/Singapore/INFIMH-16-0019/2016__EPI1341068 hemagglutinin mRNA human (HA)
aggagaaagcuuaccaugaagaccaucauugcccugagcuacauacucugccuuguguucgcucagaaaauccccggcaacgacaauuccacagcaacucuguguuuggggcaccaugccgucccuaacggaacgauuguuaagaccaucacaaaugauagaauugaggugacuaacgcgaccgaauuaguacaaaauucuucaaucggugagauaugcgacaguccacaccagauccuggauggcgaaaacuguacacuaauugacgcucuccugggggauccgcagugcgacggauuucagaauaaaaagugggaucuuuucguggagaggagcaaagccuauuccaacuguuaccccuaugacgucccugauuacgcaucucugcggucguugguggccucaagcggcacccucgaauuuaagaaugagaguuucaacuggacugguguuacacaaaaugggaccuccucugcuugcauccgcggaagcuccucaaguuucuucagccgacugaacuggcugacgcaucucaauuauaaguacccagcauuaaacgugacuaugcccaauaaagagcaguuugacaagcuguauauuuggggcguccaccauccuggcaccgauaaagaccagaucuucccauacgcccagucuuccgggcguauaacagugucaacuaagagaagccaacaggcuguaauucccaacaucggaaguaggccucggauucgcgguaucccaucuagaaucuccauuuacuggaccauaguuaaaccgggcgauauccuuuugauuaacagcacagggaaucugaucgcccccaggggauauuuuaagauacggucgggcaagucuuccauuaugcgcucagacgcgccuaucgguaaauguaagagugaaugcaucaccccaaacgggagcauucccaaugacaaaccuuuccagaacgugaaucgaaucacguacggagcauguccaagauaugucaagcacuccacucuaaaacucgccacaggcaugaggaacgugcccgagaagcagacccggggcauuuuuggggcuauagccggauucaucgaaaaugguugggagggcaugguggaugggugguacggauuucgucaccaaaacucugagggccgcggucaggcagcugaccugaaaagcacucaggccgcgauugaucaaaucaaugggaaacuuaacagacugaucggcaagacaaaugaaaaguuccaucagauugagaaggaauuuucagaggucgaaggaaggguucaggacuuggagaaauauguggaggauaccaagauagaccucuggaguuacaacgccgaacuguuaguagcacuggagaaucagcacacgaucgaucucaccgacuccgaaaugaacaaacuuuuugagaagacaaagaaacaacugcgggaaaaugcugaggauaugggcaacgggugcuucaagauuuaucauaaaugugacaacgccugcaucgagagcauucgaaaugaaacuuacgaucacaacguguaccgcgacgaggcuuugaauaacagauuucagaucaagggagucgaacuaaaaucugguuauaaggacuggauacuguggaucucauucgccauuaguugcuuucuccuguguguggcacuucugggcuucaucaugugggccugccagaaggggaauauuagguguaacaucugcauaugaggacuaguuauaagacugacuagcccgaugggccucccaacgggcccuccuccccuccuugcaccgagauuaauaaaaaaaaaaaaaaaaaaaaaaaaaaaaaaaaaaaaaaaaaaaaaaaaaaaaaaaaaaaaaaaaugcaucccccccccccccccccccccccccccccccaaaggcucuuuucagagccaccagaauu

SEQ ID NO: 14502 - RNA, 1918 nt, Artificial Sequence
  FLUAV/H3N2/A/Singapore/INFIMH-16-0019/2016 NYMC-X-307__EPI1259099 hemagglutinin mRNA human (HA)
aggagaaagcuuaccaugaagaccaucauugcccugagcuacauacucugccuuguguucgcucagaaaauccccggcaacgacaauuccacagcaacucuguguuuggggcaccaugccgucccuaacggaacgauuguuaagaccaucacaaaugauagaauugaggugacuaacgcgaccgaauuaguacaaaauucuucaaucggugagauaugcgacaguccacaccagauccuggauggcgaaaacuguacacuaauugacgcucuccugggggauccgcagugcgacggauuucagaauaaaaagugggaucuuuucguggagaggagcaaagccuauuccaacuguuaccccuaugacgucccugauuacgcaucucugcggucguugguggccucaagcggcacccucgaauuuaagaaugagaguuucaacuggacugguguuacacaaaaugggaccuccucugcuugcauccgcggaagcuccucaaguuucuucagccgacugaacuggcugacgcaucucaauuauaaguacccagcauuaaacgugacuaugcccaauaaagagcaguuugacaagcuguauauuuggggcguccaccauccuggcaccgauaaagaccagaucuucccauacgcccagucuuccgggcguauaacagugucaacuaagagaagccaacaggcuguaauucccaacaucggaaguaggccucggauucgcgguaucccaucuagaaucuccauuuacuggaccauaguuaaaccgggcgauauccuuuugauuaacagcacagggaaucugaucgcccccaggggauauuuuaagauacggucgggcaagucuuccauuaugcgcucagacgcgccuaucgguaaauguaagagugaaugcaucaccccaaacgggagcauucccaaugacaaaccuuuccagaacgugaauaagaucacguacggagcauguccacgauaugucaaacacuccacucuaaagcucgccacaggcaugagaaacgugcccgagaaacagaccaggggcauuuuuggggcuauagccggauucaucgaaaaugguugggagggcaugguggaugggugguacggauuucggcaccaaaacucugagggccguggucaggcagcugaccuuaagagcacucaggccgcgauugaucaaaucaaugggaagcugaaccgccugaucggcaaaacaaaugaaaaguuccaucagauugagaaagaauuuucagaggucgaaggaagaguucaggacuuggagaaguauguggaggauaccaaaauagaccucuggaguuacaacgccgaacuguuaguagcacuggagaaucagcacacgaucgaucucaccgacuccgaaaugaacaaacuuuuugagaagacaaagaagcaacugagggaaaaugcugaggauaugggcaacgggugcuucaaaauuuaucauaagugugacaacgccugcaucgagagcauucggaaugaaacuuacgaucacaacguguaccgagacgaggcuuugaauaaccgcuuucagaucaaaggagucgaacuaaagucugguuauaaggacuggauacuguggaucucauucgccauuaguugcuuucuccuguguguggcacuucugggcuucaucaugugggccugccagaaagggaauauuagauguaacaucugcauaugaggacuaguuauaagacugacuagcccgaugggccucccaacgggcccuccuccccuccuugcaccgagauuaauaaaaaaaaaaaaaaaaaaaaaaaaaaaaaaaaaaaaaaaaaaaaaaaaaaaaaaaaaaaaaaaaugcaucccccccccccccccccccccccccccccccaaaggcucuuuucagagccaccagaauu

SEQ ID NO: 14503 - RNA, 1918 nt, Artificial Sequence
  FLUAV/H3N2/A/Singapore/INFIMH-16-0019/2016-CDC-LV18A__EPI1583318 hemagglutinin mRNA human (HA)
aggagaaagcuuaccaugaagaccaucauugcccugagcuacauacucugccuuguguucgcucagaaaauccccggcaacgacaauuccacagcaacucuguguuuggggcaccaugccgucccuaacggaacgauuguuaagaccaucacaaaugauagaauugaggugacuaacgcgaccgaauuaguacaaaauucuucaaucggugagauaugcgacaguccacaccagauccuggauggcgaaaacuguacacuaauugacgcucuccugggggauccgcagugcgacggauuucagaauaaaaagugggaucuuuucguggagaggagcaaagccuauuccaacuguuaccccuaugacgucccugauuacgcaucucugcggucguugguggccucaagcggcacccucgaauuuaagaaugagaguuucaacuggacugguguuacacaaaaugggaccuccucugcuugcauccgcggaagcuccucaaguuucuucagccgacugaacuggcugacgcaucucaauuauaaguacccagcauuaaacgugacuaugcccaauaaagagcaguuugacaagcuguauauuuggggcguccaccauccuggcaccgauaaagaccagaucuucccauacgcccagucuuccgggcguauaauugugucaacaaagagaagccaacaggcuguaauccccaacauuggaaguaggccucggauccgcgauaucccaucuagaauuuccauauacuggacuaucguuaaaccgggugacauucuuuugaucaacagcaccggcaaucugauagcccccaggggguauuuuaagauucggucgggaaagucuuccaucaugcgcucagacgcgccuaucggcaaauguaagagugaaugcauuacaccaaacgguagcauccccaaugauaaaccuuuccagaacgugaaucgaauuaccuacggggcauguccaagauaugucaagcacuccacgcuaaaacucgccacuggaaugaggaacgugcccgagaagcagacacggggcauauuuggcgcuaucgccggguucauugaaaauggaugggaggguaugguggacggcugguacggguuucgucaccaaaacucugagggacgcggccaggcagcugaucugaaaagcacccaggccgcgaucgaccaaaucaaugguaaacuuaacagacugauugggaagacuaaugaaaaguuccaucagauagagaaggaauuuucagaggucgaaggcaggguucaggauuuggagaaauauguggaggacacaaagaucgaucucuggaguuacaacgccgaacuguuaguagcacuggagaaucagcacaccauugaccucacggauuccgaaaugaacaaacuuuuugagaagaccaagaaacaacugcgggaaaaugcugaggacaugggaaacggcugcuucaagaucuaucauaaaugugauaacgccugcauugagagcauccgaaaugaaacauacgaccacaacguguaccgcgacgaggcuuugaauaacagauuucagauaaagggggucgaacuaaaaucuggauauaaggauuggauccuguggauuucauucgccaucaguugcuuucuccuguguguggcacuucuggguuucauuaugugggccugccagaagggcaauaucagguguaacauaugcauuugaggacuaguuauaagacugacuagcccgaugggccucccaacgggcccuccuccccuccuugcaccgagauuaauaaaaaaaaaaaaaaaaaaaaaaaaaaaaaaaaaaaaaaaaaaaaaaaaaaaaaaaaaaaaaaaaugcaucccccccccccccccccccccccccccccccaaaggcucuuuucagagccaccagaauu

SEQ ID NO: 14504 - RNA, 1918 nt, Artificial Sequence
  FLUAV/H3N2/A/Kansas/14/2017__EPI1146345 hemagglutinin mRNA human (HA)
aggagaaagcuuaccaugaagaccaucauugcccugagcugcauacucugucuuguguucgcucagaaaauccccggcaacgacaauuccacagcaacucugugcuuggggcaccaugccgucccuaacggaacgauuguuaagaccaucacaaaugauagaauugaggugacuaacgcgaccgaauuaguacaaaauucuucaaucggugagauaugugacaguccacaccagauccuggauggcgaaaacugcacacuaauugacgcucuccugggggauccgcagugugacggauuucagaauaaaaagugggaucuuuucguggagaggaacaaagccuacagcaauugcuaucccuacgacgucccugauuaugcaucccugcggucuuugguggccucgucaggcacccucgaauuuaacaaugagagcuucaacugggcugguguuacucaaaaugggacaaguuccucuuguauccgcggaagcaaguccucauuuuucagucgacugaacuggcugacccaucucaauagcaaguacccagcauuaaacgugacgaugcccaacaaugagcaguuugacaaacuguauauuuggggcguccaccauccuggcacugauaaggaccagaucucucuuuacgcccaguccucagggcguauaaccgugagcacaaaaagaagucaacaggcuguaauuccaaacaucggaucuaggccccggauucgcgauaucccuuccagaaucagcauuuauuggacuauaguuaagccaggugacaucuugcugauuaauucgaccggcaaccuaaucgccccgaggggguacuucaaaauacggucuggaaaguccucaauuaugcgcagugacgcgcccaucggcaagugcaaaagcgaauguaucacaccuaaugguuccauuccaaacgauaagcccuuucagaaugugaaccgaaucaccuacggggcaugcccuagauaugucaaacagucuacgcucaagcuggccacuggaaugaggaaugugccagagcggcaaacacguggcauuuucggcgcuauagccggguuuaucgaaaacggaugggaggguaugguggacggcugguacggguuccgccaccagaauagcgagggaagaggccaggcagcugaucuuaaaucaacccaagccgcgauugaccagaucaacgguaagcugaauagguugaucgggaaaacuaacgaaaaguuucaccagauugagaaggaguucagugaagucgaaggccggauacaggaucucgagaaauauguugaggacacaaagaucgaucugugguccuacaaugccgaauuacugguggcacucgagaaccaacauaccauugaccuuacggauagcgaaaugaacaaacuguucgagaagaccaaaaagcaguugcgagaaaaugcugaggacaugggaaacggcuguuuuaagaucuaucacaaaugcgauaaugccugcauggggucuauucgcaacggaacauacgaccauaauguauauagagacgaggcucuaaacaauagguuccagaucaaggguguggaacugaaaucaggcuacaaggauuggauacucuggaucaguuuugccauuagcuguuuccugcuuugcgucgcacuguugggguuuaucaugugggccugucagaaaggaaacauucggugcaauaucuguauaugaggacuaguuauaagacugacuagcccgaugggccucccaacgggcccuccuccccuccuugcaccgagauuaauaaaaaaaaaaaaaaaaaaaaaaaaaaaaaaaaaaaaaaaaaaaaaaaaaaaaaaaaaaaaaaaaugcaucccccccccccccccccccccccccccccccaaaggcucuuuucagagccaccagaauu

SEQ ID NO: 14505 - RNA, 1918 nt, Artificial Sequence
  FLUAV/H3N2/A/Kansas/14/2017__EPI1261067 hemagglutinin mRNA human (HA)
aggagaaagcuuaccaugaagaccaucauugcccugagcugcauacucugucuuguguucgcucagaaaauccccggcaacgacaauuccacagcaacucugugcuuggggcaccaugccgucccuaacggaacgauuguuaagaccaucacaaaugauagaauugaggugacuaacgcgaccgaauuaguacaaaauucuucaaucggugagauaugugacaguccacaccagauccuggauggcgaaaacugcacacuaauugacgcucuccugggggauccgcagugugacggauuucagaauaaaaagugggaucuuuucguggagaggaacaaagccuacagcaauugcuaucccuacgacgucccugauuaugcaucccugcggucuuugguggccucgucaggcacccucgaauuuaacaaugagagcuucaacugggcugguguuacucaaaaugggacaaguuccucuuguauccgcggaagcaaguccucauuuuucagucgacugaacuggcugacccaucucaauagcaaguacccagcauuaaacgugacgaugcccaacaaugagcaguuugacaaacuguauauuuggggcguccaccauccuggcacugauaagaaccagaucucucuuuacgcccaguccucagggcguauaaccgugagcacaaaaagaagucaacaggcuguaauuccaaauaucggaucuaggccccggauucgcgacaucccuuccagaaucagcauuuauuggacuauaguuaagccaggugauaucuugcugauuaccucgacaggcaaccuaaucgccccgaggggguacuucaaaauacggucuggaaaguccucaauuaugcgcagugacgcgcccaucggcaagugcaaaagcgaauguaucaccccuaaugguuccauuccaaacgacaagcccuuucagaaugugaaccgaaucacguacggggcaugcccuagauaugucaaacagucuacucucaagcuggccacaggaaugaggaaugugccagagcggcaaacccguggcauuuucggcgcuauagccggguuuaucgaaaacggaugggaggguaugguggauggcugguacggguuccgccaccagaauagcgagggaagaggccaggcagcugaccuuaaaucaacucaagccgcgauugaucagaucaacgguaagcugaauagguugaucgggaaaacaaacgaaaaguuucaccagauugagaaggaguucagugaagucgaaggccggauacaggaccucgagaaauauguugaggauaccaagaucgaccugugguccuacaaugccgaauuacugguggcacucgagaaccaacauacgauugaucuuaccgacagcgaaaugaacaaacuguucgagaagacuaaaaagcaguugcgagaaaaugcugaggauaugggaaacggcuguuuuaagaucuaucacaaaugcgacaaugccugcauggggucuauucgcaacggaacauacgaucauaauguauauagagacgaggcucuaaacaauagguuccagaucaaggguguggaacugaaaucaggcuacaaggacuggauacucuggaucaguuuugccauuagcuguuuccugcuuugcgucgcacuguugggguuuaucaugugggccugucagaaaggaaacauucggugcaauaucuguauaugaggacuaguuauaagacugacuagcccgaugggccucccaacgggcccuccuccccuccuugcaccgagauuaauaaaaaaaaaaaaaaaaaaaaaaaaaaaaaaaaaaaaaaaaaaaaaaaaaaaaaaaaaaaaaaaaugcaucccccccccccccccccccccccccccccccaaaggcucuuuucagagccaccagaauu

SEQ ID NO: 14506 - RNA, 1918 nt, Artificial Sequence
  FLUAV/H3N2/A/Kansas/14/2017__EPI1691978 hemagglutinin mRNA human (HA)
aggagaaagcuuaccaugaagaccaucauugcccugagcugcauacucugucuuguguucgcucagaaaauccccggcaacgacaauuccacagcaacucugugcuuggggcaccaugccgucccuaacggaacgauuguuaagaccaucacaaaugauagaauugaggugacuaacgcgaccgaauuaguacaaaauucuucaaucggugagauaugugacaguccacaccagauccuggauggcgaaaacugcacacuaauugacgcucuccugggggauccgcagugugacggauuucagaauaaaaagugggaucuuuucguggagaggaacaaagccuacagcaauugcuaucccuacgacgucccugauuaugcaucccugcggucuuugguggccucgucaggcacccucgaauuuaacaaugagagcuucaacugggcugguguuacucaaaaugggacaaguuccucuuguauccgcggaagcaaguccucauuuuucagucgacugaacuggcugacccaucucaauagcaaguacccagcauuaaacgugacgaugcccaacaaugagcaguuugacaaacuguauauuuggggcguccaccauccugugacugauaagaaccagaucucucuuuacgcccaguccucaggccguauaaccguaagcacaaaaagaagucaacaggcuguuauuccaaauaucggguauaggccccggauucgcgacaucccuucuagaaucuccauuuacuggacuauagugaagccaggagauaucuugcugauuaacagcaccgguaaucuaaucgccccgaggggcuacuucaaaauacggucggggaagucuuccauuaugcgcucagacgcgcccaucggaaagugcaaaagugaauguaucacaccuaacggcagcauuccaaaugacaagcccuuucagaacgucaaucgaaucaccuauggugcaugcccuagauacgugaaacaguccacgcucaagcuggccacugggaugaggaacgugccagagcggcaaacacguggaauuuucggcgcuauagccggcuuuaucgaaaaugggugggagggaauggucgaugguugguauggcuuccgccaccagaacucugaggggagaggacaggcagcugaccuuaaaagcacccaagccgcgauugaucagaucaauggcaagcugaacagguugaucgguaaaacuaaugaaaaguuucaccagauugagaaggaguucucagaaguugaagggcggauacaggaccucgagaaauacguggaggauacaaagaucgaccuguggaguuauaacgccgaauuacugguagcacucgagaaccaacauaccauugaucuuacggacuccgaaaugaauaaacuguucgagaagaccaaaaagcaguugcgagaaaacgcugaggauaugggcaauggauguuuuaagaucuaccacaaaugcgacaacgccugcaugggcagcauucgcaaugggacauaugaucauaacguguacagagacgaggcucuaaauaacagguuccagaucaagggagucgaacugaaaucugguuacaaggacuggauacucuggaucucauuugccauuaguuguuuccugcuuugcguggcacuguugggcuuuaucaugugggccugucagaaagggaauauucggugcaacaucuguauaugaggacuaguuauaagacugacuagcccgaugggccucccaacgggcccuccuccccuccuugcaccgagauuaauaaaaaaaaaaaaaaaaaaaaaaaaaaaaaaaaaaaaaaaaaaaaaaaaaaaaaaaaaaaaaaaaugcaucccccccccccccccccccccccccccccccaaaggcucuuuucagagccaccagaauu

SEQ ID NO: 14507 - RNA, 1918 nt, Artificial Sequence
  FLUAV/H3N2/A/Kansas/14/2017 CBER-22B CDC19A__EPI1388416 hemagglutinin mRNA human (HA)
aggagaaagcuuaccaugaagaccaucauugcccugagcugcauacucugucuuguguucgcucagaaaauccccggcaacgacaauuccacagcaacucugugcuuggggcaccaugccgucccuaacggaacgauuguuaagaccaucacaaaugauagaauugaggugacuaacgcgaccgaauuaguacaaaauucuucaaucggugagauaugugacaguccacaccagauccuggauggcgaaaacugcacacuaauugacgcucuccugggggauccgcagugugacggauuucagaauaaaaagugggaucuuuucguggagaggaacaaagccuacagcaauugcuaucccuacgacgucccugauuaugcaucccugcggucuuugguggccucgucaggcacccucgaauuuaacaaugagagcuucaacugggcugguguuacucaaaaugggacaaguuccucuuguauccgcggaagcaaguccucauuuuucagucgacugaacuggcugacccaucucaauagcaaguacccagcauuaaacgugacgaugcccaacaaugagcaguuugacaaacuguauauuuggggcguccaccauccugugacugauaagaaccagaucucucuuuacgcccaguccucaggccguauaaccguaagcacaaaaagaagucaacaggcuguuauuccaaauaucggguauaggccccggauucgcgacaucccuucuagaaucuccauuuacuggacuauagugaagccaggagauaucuugcugauuaacagcaccgguaaucuaaucgccccgaggggcuacuucaaaauacggucggggaagucuuccauuaugcgcucagacgcgcccaucggaaagugcaaaagugaauguaucacaccuaacggcagcauuccaaaugacaagcccuuucagaacgucaaucgaaucaccuauggugcaugcccuagauacgugaaacaguccacgcucaagcuggccacugggaugaggaacgugccagagcggcaaacacguggaauuuucggcgcuauagccggcuuuaucgaaaaugggugggagggaauggucgaugguugguauggcuuccgccaccagaacucugaggggagaggacaggcagcugaccuuaaaagcacccaagccgcgauugaucagaucaauggcaagcugaacagguugaucgguaaaacuaaugaaaaguuucaccagauugagaaggaguucucagaaguugaagggcggauacaggaccucgagaaauacguggaggauacaaagaucgaccuguggaguuauaacgccgaauuacugguagcacucgagaaccaacauaccauugaucuuacggacuccgaaaugaauaaacuguucgagaagaccaaaaagcaguugcgagaaaacgcugaggauaugggcaauggauguuuuaagaucuaccacaaaugcgacaacgccugcauuggcagcauccgcaaugggacauaugaucauaacguguacagagacgaggcucuaaauaacagguuccagauaaagggagucgaacugaaaucugguuacaaggacuggauccucuggauuucauuugccaucaguuguuuccugcuuugcguggcacuguugggcuuuauuaugugggccugucagaaagggaauauccggugcaacauauguauuugaggacuaguuauaagacugacuagcccgaugggccucccaacgggcccuccuccccuccuugcaccgagauuaauaaaaaaaaaaaaaaaaaaaaaaaaaaaaaaaaaaaaaaaaaaaaaaaaaaaaaaaaaaaaaaaaugcaucccccccccccccccccccccccccccccccaaaggcucuuuucagagccaccagaauu

SEQ ID NO: 14508 - RNA, 1918 nt, Artificial Sequence
  FLUAV/H3N2/A/Switzerland/8060/2017__EPI1154878 hemagglutinin mRNA human (HA)
aggagaaagcuuaccaugaagaccaucauugcccugagcuacauacucugccuuguguucgcucagaaaauccccggcaacgacaauuccacagcaacucuguguuuggggcaccaugccgucccuaacggaacgauuguuaagaccaucacaaaugauagaauugaggugacuaacgcgaccgaauuaguacaaaauucuucaaucggugagauaugcgacaguccacaccagauccuggauggcgaaaacuguacacuaauugacgcucuccugggggauccgcagugcgacggauuucagaauaaaaagugggaucuuuucguggagaggagcaaagccuauuccucuuguuaccccuaugacgucccugauuacgcaucgcugcggucauugguggccagcaguggcacccucgaauuuaacaaugaguccuucaacuggacugguguuaagcaaaaugggacaucuagcgcuugcauccgcaaguccucaaguagcuuuuucucucgacugaacuggcugacccaucucaauuauacguacccagcauuaaacgugacuaugcccaauaacgagcaguuugacaaacuguauauuuggggaguccaccauccuggcaccgauaaggaccagaucuuccuuuacgcccaguccucaggccguauaacagugagcacuaaaagaagucaacaggcuguaauuccaaacaucgggucuaggccccggauucgcgauaucccuuccagaaucagcauuuacuggaccauaguuaagccaggagacaucuugcugauuaauucgacagguaaccuaaucgccccgaggggcuauuuuaaaauacagucugggaaguccucaauuaugcggagugacgcgcccaucggaaaguguaaaagcgaaugcaucaccccuaauggcuccauuccaaacgauaagcccuuccagaaugugaaccgcaucacguacggugcauguccucgauaugucaaacacucuacucucaagcuggccacagggaugagaaaugugccagagaaacaaaccaggggaauuuuuggcgcuauagccggcuucaucgaaaacgggugggagggaaugguggacgguugguacggcuuucggcaccagaauagcgaggggcguggacaggcagcugaucuuaagucaacucaagccgcgauugaccagaucaacggcaaacugaaucgcuugaucgguaagacaaacgaaaaguuccaucagauugagaaagaguucagugaagucgaagggagaauacaggaucucgagaaguauguugaggacaccaaaaucgaucugugguccuacaaugccgaauuacugguggcacucgagaaccaacacacgauugaccuuaccgauagcgaaaugaauaagcuguuugagaaaacaaagaagcaguugagggaaaacgcugaggacaugggcaacggaugcuucaaaaucuaucauaagugugauaaugccugcauuggcucuauccggaacgggacuuacgaccacaauguauaccgagacgaggcucuaaacaaucgcuuucagauaaaaggaguggaacugaagucagguuauaaagauuggauccucuggauuaguuucgccaucagcugcuuucugcuuugugucgcacuguugggcuucauuaugugggccugccagaaggggaacaucagauguaauauaugcauuugaggacuaguuauaagacugacuagcccgaugggccucccaacgggcccuccuccccuccuugcaccgagauuaauaaaaaaaaaaaaaaaaaaaaaaaaaaaaaaaaaaaaaaaaaaaaaaaaaaaaaaaaaaaaaaaaugcaucccccccccccccccccccccccccccccccaaaggcucuuuucagagccaccagaauu

SEQ ID NO: 14509 - RNA, 1918 nt, Artificial Sequence
  FLUAV/H3N2/A/Switzerland/8060/2017__EPI1266285 hemagglutinin mRNA human (HA)
aggagaaagcuuaccaugaagaccaucauugcccugagcuacauacucugccuuguguucgcucagaaaauccccggcaacgacaauuccacagcaacucuguguuuggggcaccaugccgucccuaacggaacgauuguuaagaccaucacaaaugauagaauugaggugacuaacgcgaccgaauuaguacaaaauucuucaaucggugagauaugcgacaguccacaccagauccuggauggcgaaaacuguacacuaauugacgcucuccugggggauccgcagugcgacggauuucagaauaaaaagugggaucuuuucguggagaggagcaaagccuauuccucuuguuaccccuaugacgucccugauuacgcaucgcugcggucauugguggccagcaguggcacccucgaauuuaacaaugaguccuucaacuggacugguguuaagcaaaaugggacaucuagcgcuugcauccgcaaguccucaaguagcuuuuucucucgacugaacuggcugacccaucucaauuauaaauacccagcauuaaacgugacgaugcccaauaacgagcaguuugacaagcuguauauuuggggaguccaccauccuggcacugauaaagaccagaucuucccauacgcccaguccucaggccguauaaccgugagcacaaagagaagucaacaggcuguaauucccaacaucgggucuaggccucggauucgcgauaucccauccagaaucagcauuuacuggacuauaguuaaaccgggagacauccuuuugauuaauucgaccgguaaccugaucgcccccaggggcuauuuuaagauacagucugggaaguccucaauuaugcggagugacgcgccuaucggaaaauguaagagcgaaugcaucacaccaaauggcuccauucccaacgauaaaccuuuccagaaugugaaccgcaucaccuacggugcauguccacgauaugucaagcacucuacgcuaaaacucgccacugggaugagaaaugugcccgagaagcaaacaaggggaauuuuuggcgcuauagccggcuucaucgaaaacgggugggagggaaugguggacgguugguacggcuuucggcaccagaauagcgaggggcguggacaggcagcugaucugaaaucaacccaagccgcgauugaccagaucaacggcaaacuuaaucgccugaucgguaagacuaacgaaaaguuccaucagauugagaaggaguucagugaagucgaagggagaauacaggauuuggagaaauauguugaggacacaaagaucgaucucugguccuacaaugccgaacuguuaguggcacuggagaaccaacacaccauugaccucacggauagcgaaaugaauaaacuuuuugagaagaccaagaaacagcugagggaaaacgcugaggacaugggcaacggaugcuucaagaucuaucauaaaugugauaaugccugcauuggcucuauccggaacgggacauacgaccacaauguauaccgagacgaggcuuugaacaaucgcuuucagauaaagggaguggaacuaaaaucagguuauaaggauuggauccuguggauuaguuucgccaucagcugcuuucuccugugugucgcacuucugggcuucauuaugugggccugccagaaggggaacaucagauguaauauaugcauuugaggacuaguuauaagacugacuagcccgaugggccucccaacgggcccuccuccccuccuugcaccgagauuaauaaaaaaaaaaaaaaaaaaaaaaaaaaaaaaaaaaaaaaaaaaaaaaaaaaaaaaaaaaaaaaaaugcaucccccccccccccccccccccccccccccccaaaggcucuuuucagagccaccagaauu

SEQ ID NO: 14510 - RNA, 1918 nt, Artificial Sequence
  FLUAV/H3N2/A/Hong Kong/2671/2019__EPI1543098 hemagglutinin mRNA human (HA)
aggagaaagcuuaccaugaagaccaucauugcccugagcuacauacucugccuuguguucacacagaaaauccccggcaacgacaauuccacugcuacgcuguguuuggggcaccaugcagucccuaacggaaccauuguuaagacaaucacuaaugauagaauugaggugaccaacgccacagaauuaguacaaaauucuucaaucggugagauaugcgacaguccacaccagauccuggauggcgggaacuguacccuaauugacgcgcuccugggagauccgcagugcgacggcuuucagaauaaaaagugggaucuuuucguggaaaggagccgggcuuauuccaacuguuaccccuaugacgucccugauuacgccucucugcgcucguugguggcaucaagcgguacucucgaguuuaaaaaugaaaguuucaacugggccgggguuacacaaaauggaaaguccuuuucuugcauccgaggcagcuccucaaguuucuuuagccgucugaacuggcugacccaucucaauuauacguacccagcuuuaaacgugacuaugcccaauaaggagcaguucgacaaacuguauauuuggggcguccaccauccugggaccgauaaggaccagaucucucuuuacgcacaguccucaggaagaauaacagugagcacuaaaaggagucaacaggccguaauuccaaacaucgguucucggccccgcauuagagauaucccuuccaggaucagcauuuacuggaccauaguuaagccaggcgacaucuugcugauuaacucgacagggaaucuaaucgcuccgcggggauauuuuaaaauacgcucuggcaaguccucaauuaugcgaagugacgcccccaucgguaaguguaaaagcgagugcaucaccccuaacggguccauuccaaaugauaagcccuuccagaacgugaauagaaucacguacggagcguguccuagguaugucaaacagucuacucucaagcuggcaacaggcaugcggaacgugccagaaaaacaaacccguggcauuuuuggggccauagcuggauucaucgagaaugguugggaaggcaugguggacgggugguacggauuucgccaccagaacagcgagggcagaggucaggccgcagaucuuaagucaacucaagcugccauugaccagaucaaugggaaacugaacagguugaucggcaagacaaaugagaaguuccaccagauugaaaaagaguucagugaagucgagggacggguucaggaucucgaaaaguauguggaggacaccaaaauagaucugugguccuacaacgcggaguuacugguagcccucgaaaaucaacauacgaucgaccuuaccgauagcgagaugaacaagcuguuugagaaaacaaagaagcaguugcgagaaaaugcagaagacaugggcaacgggugcuucaaaauuuaucacaagugugauaacgcuugcaucggaucuauucgcaaugagacuuacgaccauaacguguacagagacgaggcccuaaauaacagguuucagaucaaaggugucgaacugaagucaggcuauaaagauuggauacucuggaucaguuucgcuauuagcugcuuucugcuuuguguggcccuguugggguucaucaugugggcaugccagaagggaaauauucgguguaacaucugcauaugaggacuaguuauaagacugacuagcccgaugggccucccaacgggcccuccuccccuccuugcaccgagauuaauaaaaaaaaaaaaaaaaaaaaaaaaaaaaaaaaaaaaaaaaaaaaaaaaaaaaaaaaaaaaaaaaugcaucccccccccccccccccccccccccccccccaaaggcucuuuucagagccaccagaauu

SEQ ID NO: 14511 - RNA, 1918 nt, Artificial Sequence
  FLUAV/H3N2/A/Hong Kong/2671/2019__EPI1642843 hemagglutinin mRNA human (HA)
aggagaaagcuuaccaugaagaccaucauugcccugagcuacauacucugccuuguguucacacagaaaauccccggcaacgacaauuccacugcuacgcuguguuuggggcaccaugcagucccuaacggaaccauuguuaagacaaucacuaaugauagaauugaggugaccaacgccacagaauuaguacaaaauucuucaaucggugagauaugcgacaguccacaccagauccuggauggcgggaacuguacccuaauugacgcgcuccugggagauccgcagugcgacggcuuucagaauaaaaagugggaucuuuucguggaaaggagccgggcuuauuccaacuguuaccccuaugacgucccugauuacgccucucugcgcucguugguggcaucaagcgguacucucgaguuuaaaaaugaaaguuucaacugggccgggguuacacaaaauggaaaguccuuuucuugcauccgaggcagcuccucaaguuucuuuagccgucugaacuggcugacccaucucaauuauauuuacccagcuuuaaacgugacgaugcccaauaaggagcaguucgacaaacuguauaucuggggcguccaccauccugugacugauaaggaccagauaucucuuuacgcacaguccucagggagaauuaccguaagcacaaaaaggagucaacaggccguuaucccaaacauuggaucucggccccgcaucagaaacaucccuuccaggauuagcauauacuggacuaucgugaagccaggugauauuuugcugaucaauucgaccggcaaccuaauagcuccgcggggguauuuuaaaauucgcucuggaaaguccucaaucaugcgaagugacgcccccaucggcaaguguaaaagcgagugcauuacaccuaaugguuccaucccaaacgacaagcccuuccagaaugucaacagaauuaccuacggggcguguccuagguaugugaaacagucuacgcucaagcuggcaacuggaaugcggaaugugccagaaaaacaaacacguggcauauuuggcgccaucgcuggguucauugagaacggaugggaagguauggucgauggcugguacggguuucgccaccagaauagcgagggaagaggccaggccgcagaccuuaagucaacccaagcugccaucgaucagaucaacgguaaacugaauagguugauugggaagacuaacgagaaguuccaccagauagaaaaagaguucagugaaguugagggccgggugcaggaccucgaaaaguauguagaggauacaaaaaucgaccugugguccuacaaugcggaguuacugguggcccucgaaaaccaacauaccauugaucuuacggacagcgagaugaauaagcuguuugagaaaaccaagaagcaguugcgagaaaacgcagaagauaugggaaacggcugcuucaaaaucuaucacaagugugacaaugcuugcauugggucuauccgcaacgagacauacgaucauaaugucuacagagacgaggcccuaaacaauagguuucagauaaaaggaguggaacugaagucagguuauaaagacuggauccucuggauuaguuucgcuaucagcugcuuucugcuuuguguugcccuguugggcuucauuaugugggcaugccagaaggggaacauccgguguaauauaugcauuugaggacuaguuauaagacugacuagcccgaugggccucccaacgggcccuccuccccuccuugcaccgagauuaauaaaaaaaaaaaaaaaaaaaaaaaaaaaaaaaaaaaaaaaaaaaaaaaaaaaaaaaaaaaaaaaaugcaucccccccccccccccccccccccccccccccaaaggcucuuuucagagccaccagaauu

SEQ ID NO: 14512 - RNA, 1918 nt, Artificial Sequence
  FLUAV/H3N2/A/Hong Kong/45/2019__EPI1691930 hemagglutinin mRNA human (HA)
aggagaaagcuuaccaugaagaccaucauugcccugagcuacauacucugccuuggcuucacacagaaaauccccgggaacgacaauuccacugcuacgcuguguuugggacaccaugcagugccuaacgguaccauugucaagacaaucacuaaugauagaauugagguuaccaacgccacagaauuagugcaaaauucuucaaucggcgagauaugcgacaguccacaccagauccuggaugggggaaacuguacccuaauugacgcgcuccugggcgauccgcagugcgacgguuuucagaauaaaaagugggaucuuuucguagaaaggagccgggcuuauuccaacuguuaccccuaugacgugccugauuacgccucucugcgcucguuggucgcaucaagcgggacucucgaguuuaaaaaugaaaguuucaacugggccggagugacacaaaauggcaaguccuuuucuugcauccgaggcagcuccucaaguuucuuuagccgucugaacuggcugacccaucucaauuauacguacccagcuuuaaacguuacuaugcccaauaaggagcaguucgacaaacuguauauuuggggagugcaccauccugggaccgauaaggaccagaucucucuuuacgcacaguccucagguagaauaacagucagcacuaaaaggagucaacaggccgugauuccaaacaucggcucucggccccgcauuagagauaucccuuccaggaucagcauuuacuggaccauaguaaagccaggggacaucuugcugauuaacucgacaggaaaucuaaucgcuccgcggggcuauuuuaaaauacgcucugguaaguccucaauuaugcgaagugacgcccccaucgggaaguguaaaagcgagugcaucaccccuaacggauccauuccaaaugauaagcccuuccagaacguuaauagaaucacguacggcgcguguccuagguaugugaaacagaacacucucaagcuggcaacaggcaugcggaaugucccagaaaaacaaacccgugggauuuuuggagccauagcugguuucaucgagaacggcugggaagggaugguggacggaugguacggcuuucgccaccaaaauucugaggguagagggcaggccgcagaucuuaagagcacucaggcugccauugaccagaucaacggcaaacugaauagguugaucggaaagacaaacgagaaguuccaccagauugaaaaagaguucucagaaguggagggccggguccaggaucucgaaaaguauguugaggacaccaaaauagaucuguggaguuacaaugcggaguuacugguggcccucgaaaaccaacauacgaucgaccuuaccgauuccgagaugaauaagcuguuugagaaaacaaagaagcaguugcgagaaaacgcagaagacauggggaacggaugcuucaaaauuuaucacaagugugauaaugcuugcaucgguagcauucgcaacgagacuuacgaccauaauguauacagagacgaggcccuaaacaauagguuucagaucaaaggcguggaacugaagucuggguauaaagauuggauacucuggaucucauucgcuauuaguugcuuucugcuuugugucgcccuguugggauucaucaugugggcaugccagaagggcaacauucgguguaauaucugcauaugaggacuaguuauaagacugacuagcccgaugggccucccaacgggcccuccuccccuccuugcaccgagauuaauaaaaaaaaaaaaaaaaaaaaaaaaaaaaaaaaaaaaaaaaaaaaaaaaaaaaaaaaaaaaaaaaugcaucccccccccccccccccccccccccccccccaaaggcucuuuucagagccaccagaauu

SEQ ID NO: 14513 - RNA, 1918 nt, Artificial Sequence
  FLUAV/H3N2/A/South Australia/34/2019__EPI1387331 hemagglutinin mRNA human (HA)
aggagaaagcuuaccaugaagaccaucauugcccugagcuacauacucugccuuguguucgcucagaaaauccccggcaacgacaauuccacagcaacucuguguuuggggcaccaugccgucccuaacggaacgauuguuaagaccaucacaaaugauagaauugaggugacuaacgcgaccgaauuaguacaaaauucuucaaucggugagauaugcgacaguccacaccagauccuggauggcgggaacuguacacuaauugacgcucuccugggagauccgcagugcgacggcuuucagaauaaaaagugggaucuuuucguggaaaggagccgggccuauuccaacuguuaccccuaugacgucccugauuacgcaucucugcgcucguugguggccucaagcgguacccucgaguuuaaaaaugaaaguuucaacuggacugggguuaagcaaaauggaacauccucugcuugcauccgaggcagcuccucaaguuucuuuagccgucugaacuggcugacccaucucaauuauacguacccagcauuaaacgugacuaugcccaauaaggagcaguuugacaaacuguauauuuggggcguccaccauccugggaccgauaaggaccagaucuuccuuuacgcccagucuuccggaagaauaacagugucaacuaaaaggagccaacaggcuguaauuccaaacaucgguuuucggccccgcauuagagauaucccuaguaggaucucuauuuacuggaccauaguuaagccaggcgacaucuugcugauuaacuccacagggaaucuaaucgccccgcggggauauuucaaaauacgcagcggcaagucgucuauuaugcgauccgacgcgcccaucgguaaguguaaaucagagugcaucaccccuaacgggaguauuccaaaugauaagcccuuucagaacgugaauagaaucacguacggagcauguccuagguaugucaaacagagcacucucaagcuggccacaggcaugcggaacgugccagaaaaacaaacccguggcauuuucggggcuauagccggauuuaucgagaaugguugggaaggcaugauggacgggugguacggauuccgccaccagaacuccgagggcagaggucaggcagcugaucuuaagucuacucaagccgcgauugaccagaucaaugggaaacugaacagguugaucggcaagacaaaugagaaguuccaccagauugaaaaagaguuuagcgaaguggagggacggguccaggaucucgaaaaguauguugaggacaccaaaauagaucuguggucauacaacgccgaguuacugguggcacucgaaaaucaacauacgaucgaccuuaccgauagugagaugaacaagcuguucgaaaagacaaagaagcaguugcgagagaaugcugaagacaugggcaacgggugcuuuaaaauuuaucacaagugugauaacgccugcaucggauccauucgcaaugagacuuacgaccauaacguauacagagacgaggcucuaaauaacagguuccagaucaaagguguggaacugaaaagcggcuauaaagauuggauacucuggaucucuuuugccauuucaugcuuccugcuuuguaucgcacuguugggguuuauuaugugggccugccagaagggaaauauccgguguaacauaugcauuugaggacuaguuauaagacugacuagcccgaugggccucccaacgggcccuccuccccuccuugcaccgagauuaauaaaaaaaaaaaaaaaaaaaaaaaaaaaaaaaaaaaaaaaaaaaaaaaaaaaaaaaaaaaaaaaaugcaucccccccccccccccccccccccccccccccaaaggcucuuuucagagccaccagaauu

SEQ ID NO: 14514 - RNA, 1918 nt, Artificial Sequence
  FLUAV/H3N2/A/South Australia/34/2019__EPI1440494 hemagglutinin mRNA human (HA)
aggagaaagcuuaccaugaagaccaucauugcccugagcuacauacucugccuuguguucgcucagaaaauccccggcaacgacaauuccacagcaacucuguguuuggggcaccaugccgucccuaacggaacgauuguuaagaccaucacaaaugauagaauugaggugacuaacgcgaccgaauuaguacaaaauucuucaaucggugagauaugcgacaguccacaccagauccuggauggcgggaacuguacacuaauugacgcucuccugggagauccgcagugcgacggcuuucagaauaaaaagugggaucuuuucguggaaaggagccgggccuauuccaacuguuaccccuaugacgucccugauuacgcaucucugcgcucguugguggccucaagcgguacccucgaguuuaaaaaugaaaguuucaacuggacugggguuaagcaaaauggaacauccucugcuugcauccgaggcagcuccucaaguuucuuuagccgucugaacuggcugacccaucucaauuauaaguacccagcauuaaacgugacgaugcccaauaaagagcaguuugacaagcuguauauuuggggcguccaccauccuaucacugauaaagaccagauauuccuuuacgcccagucuuccgggagaauuaccgugucaacaaagaggagccaacaggcuguaaucccaaacauuggauuucggccccgcaucagagauaucccuaguaggauuucuauauacuggacuaucguuaaaccaggugacauuuugcugaucaacuccaccggcaaucuaauagccccgcggggguauuucaagauucgcagcggaaagucgucuaucaugcgauccgacgcgcccaucggcaaauguaagucagagugcauuacaccuaacgguaguaucccaaaugauaaacccuuucagaacgugaauagaauuaccuacggggcauguccuagguaugucaagcagagcacgcucaaacuggccacuggaaugcggaacgugccagaaaagcaaacacguggcauauucggcgcuaucgccggguuuauugagaauggaugggaagguaugauggacggcugguacggguuccgccaccagaacuccgagggaagaggccaggcagcugaucuuaaaucuacccaagccgcgaucgaccagaucaaugguaagcugaacagguugauugggaagacuaaugagaaauuccaccagauagaaaaggaguuuagcgaaguggagggccggguccaggaucucgaaaaauauguugaggacacaaagaucgaucuguggucauacaacgccgaguuacugguggcacucgaaaaucaacauaccauugaccuuacggauagugagaugaacaaacuguucgaaaagaccaagaaacaguugcgagagaaugcugaagacaugggaaacggcugcuuuaagaucuaucacaaaugugauaacgccugcauuggguccauccgcaaugagacauacgaccauaacguauacagagacgaggcucuaaauaacagguuccagauaaagggaguggaacugaaaagcgguuauaaggauuggauccucuggauuucuuuugccaucucaugcuuccugcuuuguauugcacuguugggcuuuaucaugugggccugccagaaggggaauauacgguguaacauuugcaucugaggacuaguuauaagacugacuagcccgaugggccucccaacgggcccuccuccccuccuugcaccgagauuaauaaaaaaaaaaaaaaaaaaaaaaaaaaaaaaaaaaaaaaaaaaaaaaaaaaaaaaaaaaaaaaaaugcaucccccccccccccccccccccccccccccccaaaggcucuuuucagagccaccagaauu

SEQ ID NO: 14515 - RNA, 1900 nt, Artificial Sequence
  FLUAV/H7N9/A/chicken/Zhejiang/C483/2013(H7N9)__AGN69400.1 hemagglutinin mRNA human (HA)
aggagaaagcuuaccaugaacacccagauccugguguucgcccucauugcuauaauccccacaaaugcagacaagauuugccuuggccaccaugccgucagcaacgggacuaaaguuaauacgcugaccgagagaggaguggaaguagugaacgcgacagagacugucgaaaggaccaauaucccucggauuuguuccaaggguaaaaagacaguggauuugggccaaugcggguuacugggaaccaucacuggcccaccgcagugugaccaguuucuagaguucucugcugaucucauaaucgaacgccgagaggguucagacguuugcuaccccgggaaauuugugaacgaggaagcccugcgucagauucuuagagagaguggaggcaucgauaaggaagcaaugggcuucacauauagcgggauuaggaccaauggagccacguccgcuugucggcgcucugguucgucauuuuacgcagagaugaaguggcuguugagcaacacugacaaugccgcuuucccucaaaugaccaaaaguuauaagaacacaagaaaauccccagcccucaucgucuggggcauacaccauucugugagcacugcggagcagaccaagcuguacggguccggaaauaaacugguaacaguuggcucaaguaacuaucagcagagcuuugugcccucuccuggugcaaggccacaagucaaugggcaguccggacggauugauuuccacuggcucauguuaaaccccaaugacaccgugacguuuucauucaacggcgccuuuaucgcuccugaucgcgccagcuuccugcgaggcaagaguauggggauucagucuggagugcaggucgacgcaaacugcgaaggugauuguuaccauuccggcgggacuaucaucagcaaucuuccauuucaaaacauugacucgagagcuguuggaaagugcccgagguaugugaaacagcggucuuugcugcuagccacaggcaugaagaauguacccgagauaccuaaaggucguggccucuucggggcgaucgccggauucauugaaaacggcugggaggggcugaucgauggaugguacgguuuucgccaccagaaugcacaaggcgaagggaccgcugccgacuacaaguccacucagucagcuauagaccagauuacaggaaaacuuaacagacugaucgagaagaccaaucagcaauucgaguugaucgauaacgaauuuaaugagguggaaaaacagauuggcaacgucaucaauuggacgagggacaguauuaccgagguguggagcuauaacgccgaacuccugguugcaauggagaaucagcacacaauagauuuagccgacuccgagauggauaagcuguacgaacgggugaagcgacagcuccgcgagaacgcugaagaggacgguacuggguguuucgaaaucuuucauaaaugcgaugacgauuguauggcgucuauuagaaauaacaccuaugaccacagcaaguacagggaggaggcaaugcaaaaccggauccagaucgauccagucaaacuuucaaguggcuauaaggacgugauucugugguucuccuuuggagccagcugcuucauauugcuagcuaucguaaugggccugguuuuuauuugcgugaaaaaugggaacaugcgcuguacaaucugcauuugaggacuaguuauaagacugacuagcccgaugggccucccaacgggcccuccuccccuccuugcaccgagauuaauaaaaaaaaaaaaaaaaaaaaaaaaaaaaaaaaaaaaaaaaaaaaaaaaaaaaaaaaaaaaaaaaugcaucccccccccccccccccccccccccccccccaaaggcucuuuucagagccaccagaauu

SEQ ID NO: 14516 - RNA, 1903 nt, Artificial Sequence
  FLUAV/H10N8/A/Jiangxi/IPB13/2013(H10N8)__AHK10761.1 hemagglutinin mRNA human (HA)
aggagaaagcuuaccauguacaagaucguggucauuauagcccugcucggcgcuguuaaagggcuugacaagaucugccugggacaccaugcaguggccaacgguaccauuguaaaaacauugacuaaugagcaggaagaggugacgaacgcgaccgaaacagucgagagcacuggcaucaauagauuauguaugaaggggaggaaacacaaggaucugggaaacugccaucccauuggcaugcuaaucgguaccccugcuugugaccuccaccugacagggaugugggauacccuuauagaacgggagaaugccaucgcauauugcuacccaggagccacugugaacguugaggcucugcgccaaaagauuauggaauccggcggcaucaauaaaauuucuacaggguucaccuauggaucaaguaucaacagcgcagguacgacucgagccuguaugcguaauggcgggaacuccuuuuacgcugaguugaaguggcucgugucuaaaucgaagggacagaauuucccgcagaccacaaacacuuauagaaauaccgacacagccgaacaucugauaauguggggcauucaccaccccucaagcacccaggagaaaaacgaucuguacgguacgcaaagucucuccaucucugucgggagcuccacuuauaggaauaacuuugugccuguaguuggagcgcggccacaggugaacggccagucaggccgcauugacuuccauuggacauuaguccagcccggggauaauaucaccuuuagucacaacggaggucugaucgcaccuagcagagugucuaaacuuauuggcaggggguugggaauacaauccgacgccccaaucgauaauaacugcgagucaaaguguuucuggcggggcgguagcauuaauacucgccugcccuuucagaaccuaaguccucgaacaguggggcagugcccaaaguacgucaauagaaggucucucaugcuggcuaccggcaugcggaacguuccggaacuuauccagggacguggccuguucggggccauagcaggauuuuuggagaaugguugggaaggcaugguggacgggugguacggauuccgccaucaaaacgcucagggcacgggucaggccgcggauuauaaguccacccaagccgcaauugaccagaucacagggaaacucaauagacugguagagaagacuaacaccgaauuugagagcaucgagucggaguucucugaaauugaacaccagaucggcaaugugauuaacuggacaaaagauuccauaacugacaucuggaccuaccaggcugaguuacuggucgccauggaaaaucaacacacaauugacauggcugauucagagaugcucaaccuuuaugagagggugcggaagcagcugcgacagaacgccgaagaggacggaaaaggcuguuuugaaaucuaccaugcaugcgaugacaguuguauggagagcauccgcaauaacaccuaugaucacucccaguacagagaagaggccuugcuaaauaggcugaacauuaaucccguuacucucucuagcggguauaaggacauaauccugugguucucauucggagcuaguugcuuugugcuucuggcggucgugauggguuuguucuuuuucugccucaagaacggcaauaugcgguguacgauuugcaucugaggacuaguuauaagacugacuagcccgaugggccucccaacgggcccuccuccccuccuugcaccgagauuaauaaaaaaaaaaaaaaaaaaaaaaaaaaaaaaaaaaaaaaaaaaaaaaaaaaaaaaaaaaaaaaaaugcaucccccccccccccccccccccccccccccccaaaggcucuuuucagagccaccagaauu

SEQ ID NO: 14517 - RNA, 1969 nt, Artificial Sequence
  FLUBV/H0N0/B/Colorado/06/2017__EPI1011552 hemagglutinin mRNA human (HA)
aggagaaagcuuaccaugaaggccaucauugugcugcucauggucguuaccagcuccgcugacagaauaugcacaggcaucacuucuucaaacaguccccacgugguaaaaacggcaacccagggggaggugaaugucacaggagugauuccucuuacuaccacaccaaccaagagccauuucgccaaccugaaagguacugaaacaaggggcaaguuguguccgaaaugcuuaaauuguaccgaucuggacguugcgcuagggcggcccaagugcacgggaaagaucccuuccgcucgcgugucuauucuccacgagguccgaccagugacuucgggcuguuuucccaucaugcaugaucguaccaaaauaagacaacugccuaaccuucugagggguuacgaacacguacgguugucaacacauaauguuaucaacgccgagggggcaccaggaggccccuauaagauuggcacuagcgggaguugcccuaauaucaccaacggaaaugguuucuuugccacaauggcuugggcagugccagacaaaaacaagaccgccacgaauccgcucacuauugaaguccccuacguguguacagagggcgaggaucagaucaccguguggggguuccacuccgacaacgaaacucagauggcuaaacuguauggagauucuaagccucagaaguuuacaagcuccgccaauggcgucaccacgcacuacguuucacaaauagguggguucccaaaccagaccgaggacggaggccugccccagaguggccgcauugugguagauuauauggugcagaaaagcgggaagacaggaacuaucaccuaccaaagagguauucucuuaccucagaaagucuggugcgcgucuggcagguccaaggugaucaaagggucacugccacuuaucggagaagcagacuguuugcaugagaaguauggcggucugaauaaaagcaagcccuacuacacaggggagcacgccaaggcuauuggcaacugcccgauauggguuaaaacuccucuaaagcucgccaacggaaccaaauaucggcccccagcaaagcugcuuaaagaacgcggcuuuuucggggcuaucgccggauuucuggaggguggcugggaagggaugauugcgggauggcauggcuacacaagucacggugcccacgggguggcagucgcugccgauuugaagucuacccaggaggcuaucaauaagauaacuaaaaaccucaauucccugagcgaauuagaggugaagaaccugcagcgacucucgggcgccauggacgagcuucauaaugaaauucuggaguuggaugaaaaaguagacgaccuaagagcagauacgaucucuucccaaaucgagcuggccguucuccugucaaacgaaggaauuaucaauagugaggacgagcaccuucuggcuuuggaaaggaagcucaaaaagaugcugggcccuagcgcgguggagauugggaacggauguuucgaaacaaagcauaaaugcaaucagaccugcuuagauaagauagcagccgguacuuuugacgcuggcgaguucucccugcccaccuuugauucucuaaacaucacagccgcaagccucaaugacgaugggcuggacaaccacaccauucuuuuguauuacucaacugccgcuaguucccuggccgucacacucaugaucgcaaucuucguggucuauauggugagccgggauaauguuucuuguucaauuugccugugaggacuaguuauaagacugacuagcccgaugggccucccaacgggcccuccuccccuccuugcaccgagauuaauaaaaaaaaaaaaaaaaaaaaaaaaaaaaaaaaaaaaaaaaaaaaaaaaaaaaaaaaaaaaaaaaugcaucccccccccccccccccccccccccccccccaaaggcucuuuucagagccaccagaauu

SEQ ID NO: 14518 - RNA, 1969 nt, Artificial Sequence
  FLUBV/H0N0/B/Colorado/06/2017__EPI1051642 hemagglutinin mRNA human (HA)
aggagaaagcuuaccaugaaggccaucauugugcugcucauggucguuaccagcuccgcugacagaauaugcacaggcaucacuucuucaaacaguccccacgugguaaaaacggcaacccagggggaggugaaugucacaggagugauuccucuuacuaccacaccaaccaagagccauuucgccaaccugaaagguacugaaacaaggggcaaguuguguccgaaaugcuuaaauuguaccgaucuggacguugcgcuagggcggcccaagugcacgggaaagaucccuuccgcucgcgugucuauucuccacgagguccgaccagugacuucgggcuguuuucccaucaugcaugaucguaccaaaauaagacaacugccuaaccuucugagggguuacgaacacguacgguugucaacacauaauguuaucaacgccgagggggcaccaggaggccccuauaagauuggcacuagcgggaguugcccuaauaucaccaacggaaaugguuucuuugccacaauggcuugggcagugccagacaaaaacaagaccgccacgaauccgcucacuauugaaguccccuacguguguacagagggcgaggaucagaucaccguguggggguuccacuccgacacugaaacacagauggcuaaacuguauggagauucuaagccucagaaguuuaccagcuccgccaacggcgucacgacccacuacguuucacaaauagguggguucccaaaucagacagaggacggaggccugccccagaguggccgcauugugguagauuauauggugcagaaaagcgggaagacuggaaccaucacauaccaaagagguauucucuuaccucagaaagucuggugcgcgucuggcagguccaaggugaucaaagggucacugccacuuaucggagaagcagacuguuugcaugagaaguauggcggucugaacaaaagcaagcccuacuacacuggggagcacgccaaggcuauuggcaauugcccgauauggguuaaaaccccucuaaagcucgccaacggaacaaaauaucggcccccagcaaagcugcuuaaagaacgcggcuuuuucggggcuaucgccggauuucuggaggguggcugggaagggaugauugcgggauggcauggcuacaccagucacggugcccacgggguggcagucgcugccgauuugaagucuacucaggaggcuaucaacaagauaacgaaaaaucucaacucccugagcgaauuagaggugaagaaucugcagcgacucucgggcgccauggacgagcuucauaacgaaauucuggaguuggaugaaaaaguagacgaccuaagagcagauacaaucucuucccaaaucgagcuggccguucuccugucaaaugaaggaauuaucaacagugaggacgagcaccuucuggcuuuggaaaggaagcucaaaaagaugcugggcccuagcgcgguggagauugggaauggauguuucgaaaccaagcauaaaugcaaccagacuugcuuagauaagauagcagccgguaccuuugacgcuggcgaguucucccugcccacauuugauucucuaaauaucaccgccgcaagccucaacgacgaugggcuggacaaucacacuauucuuuuguauuacucaacagccgcuaguucccuggccgucacgcucaugaucgcaaucuucguggucuauauggugagccgggauaacguuucuuguucaauuugccugugaggacuaguuauaagacugacuagcccgaugggccucccaacgggcccuccuccccuccuugcaccgagauuaauaaaaaaaaaaaaaaaaaaaaaaaaaaaaaaaaaaaaaaaaaaaaaaaaaaaaaaaaaaaaaaaaugcaucccccccccccccccccccccccccccccccaaaggcucuuuucagagccaccagaauu

SEQ ID NO: 14519 - RNA, 1969 nt, Artificial Sequence
  FLUBV/H0N0/B/Colorado/06/2017 BX-71__EPI1151760 hemagglutinin mRNA human (HA)
aggagaaagcuuaccaugaaggccaucauugugcugcucauggucguuaccagcuccgcugacagaauaugcacaggcaucacuucuucaaacaguccccacgugguaaaaacggcaacccagggggaggugaaugucacaggagugauuccucuuacuaccacaccaaccaagagccauuucgccaaccugaaagguacugaaacaaggggcaaguuguguccgaaaugcuuaaauuguaccgaucuggacguugcgcuagggcggcccaagugcacgggaaagaucccuuccgcucgcgugucuauucuccacgagguccgaccagugacuucgggcuguuuucccaucaugcaugaucguaccaaaauaagacaacugccuaaccuucugagggguuacgaacacguacgguugucaacacauaauguuaucaacgccgagggggcaccaggaggccccuauaagauuggcacuagcgggaguugcccuaauaucaccaacggaaaugguuucuuugccacaauggcuugggcagugccagacaaaaacaagaccgccacgaauccgcucacuauugaaguccccuacguguguacagagggcgaggaucagaucaccguguggggguuccacuccgacacugaaacacagauggcuaaacuguauggagauucuaagccucagaaguuuaccagcuccgccaacggcgucacgacccacuacguuucacaaauagguggguucccaaaucagacagaggacggaggccgcccccagaguggcagaauugugguagauuauauggugcagaaaagcgggaagacuggaaccaucacauaccaaagggguauucugcucccucagaaagucuggugcgcgucuggccgguccaaggugaucaaagggucauuaccacugaucggagaagcagacugucuucaugagaaguauggcgguuugaacaaaagcaagcccuacuacacuggggagcacgccaaggcuauuggcaauugcccgauauggguuaaaaccccucugaagcuagccaacggaacaaaauaucgacccccagcaaagcuccugaaagaacgcggcuuuuucggggcuaucgccggauuucuugaggguggcugggaagggaugauugcgggauggcauggcuacaccagucacggugcccacgggguggcagucgcugccgaucugaagucuacucaggaggcuaucaacaagauaacgaaaaauuugaacucccucagcgaacuggaggugaagaauuuacagagacugucgggcgccauggacgagcuccauaacgaaauucuugagcuggaugaaaaaguagacgacuugagggcagauacaaucucuucccaaaucgagcuagccguucugcucucaaaugaaggaauuaucaacagugaggacgagcaucugcuugcucuggaacggaaguugaaaaagaugcucggcccuagcgcgguggagauugggaauggauguuucgaaaccaagcacaaaugcaaccagacuugccuggauaagauagcagccgguaccuuugacgcuggcgaguucuccuuacccacauuugauucucugaauaucaccgccgcaagccuaaacgacgaugggcucgacaaucacacuauucugcuuuauuacucaacagccgcuaguuccuuggccgucacgcugaugaucgcaaucuucguggucuauauggugagccgugauaacguuucuuguucaauuugccucugaggacuaguuauaagacugacuagcccgaugggccucccaacgggcccuccuccccuccuugcaccgagauuaauaaaaaaaaaaaaaaaaaaaaaaaaaaaaaaaaaaaaaaaaaaaaaaaaaaaaaaaaaaaaaaaaugcaucccccccccccccccccccccccccccccccaaaggcucuuuucagagccaccagaauu

SEQ ID NO: 14520 - RNA, 1966 nt, Artificial Sequence
  FLUBV/H0N0/B/Washington/02/2019__EPI1368874 hemagglutinin mRNA human (HA)
aggagaaagcuuaccaugaaggccaucauugugcugcucauggucguuaccagcaacgcugacagaauaugcacaggcaucacuuccucuaauucaccccacgugguaaaaacggcaacccagggggaagugaacgucacaggagugauuccucuuacuaccacaccaaccaagagucauuucgccaaucugaaagguacugaaacaaggggcaaguuguguccgaaaugcuuaaacuguaccgaucuggacguugcgcuagggcggcccaagugcacgggaaagaucccuagcgcucgcguguccauucuccacgagguccgaccagugacuucuggcuguuuucccaucaugcaugaucguaccaaaauaagacaacugccuaaucuucugagggguuacgaacacguacgguugucgacacauaacguuaucaaugccgaggacgcaccagggcgccccuaugaaauuggaacuucaggcagcugcccuaacaucaccaauggcaacggguucuuugccacaauggcuugggcagugccaaagaauaaaaccgccacgaacccgcucacuauugagguccccuacaucuguacagagggagaagaucagauaaccgugugggguuuccacagugacaaugagacucagauggcuaagcuguauggcgauuccaaaccucagaaguuuacaucuagcgccaacggggugaccacgcacuacgucucccaaauuggaggcuucccaaaucagaccgaagacggugggcugccccagucaggaagaaucguuguggauuauaugguacagaagaguggcaaaacaggcacuauuaccuaccaaagggggauccucuuaccucagaagguguggugcgcgagcggacggucuaaagucaucaaggguucccugccacuuauuggcgaggcagacuguuugcaugagaaauaugggggacugaacaagucaaaacccuacuacacaggcgaacacgccaaggcuauagguaacugcccgaucugggugaagacuccucuaaaacucgccaaugggaccaaguaucgacccccagcaaaacugcuuaaggagcgcggcuuuuucggagcuauugccggcuuucuggaagggggaugggaggguaugaucgcgggcuggcauggguacacaagccacggagcccacggcguugcaguggcugccgauuugaaaaguacccaggaagcuauaaacaagauuacuaagaaucucaacucucuguccgaguuagaggucaaaaaucugcagagacucagcggugccauggacgaacuucauaacgagauccuggaauuggaugagaagguggacgaccuaagggcagauacgaucucgucucaaauugaacuggccguacuccuguccaaugaggggaucauuaacucagaggacgaacaccuucuggcuuuggagcggaaacucaagaaaaugcugggcccuagugcgguugaaauaggaaauggcuguuucgagacaaagcauaagugcaaccagaccugcuuagaucguaucgcagccgggacuuuugacgcuggagaguucagccugcccaccuuugauucccuaaauauuacagccgcaucucucaacgacgauggucuggacaaucacaccauccuuuuguauuacagcacugccgcuucaagucuggccgugacacucaugaucgcaauuuucgucguguauauggucucccgcgauaacgugagcuguucuauaugccugugaggacuaguuauaagacugacuagcccgaugggccucccaacgggcccuccuccccuccuugcaccgagauuaauaaaaaaaaaaaaaaaaaaaaaaaaaaaaaaaaaaaaaaaaaaaaaaaaaaaaaaaaaaaaaaaaugcaucccccccccccccccccccccccccccccccaaaggcucuuuucagagccaccagaauu

SEQ ID NO: 14521 - RNA, 1966 nt, Artificial Sequence
  FLUBV/H0N0/B/Washington/02/2019__EPI1422452 hemagglutinin mRNA human (HA)
aggagaaagcuuaccaugaaggccaucauugugcugcucauggucguuaccagcaacgcugacagaauaugcacaggcaucacuuccucuaauucaccccacgugguaaaaacggcaacccagggggaagugaacgucacaggagugauuccucuuacuaccacaccaaccaagagucauuucgccaaucugaaagguacugaaacaaggggcaaguuguguccgaaaugcuuaaacuguaccgaucuggacguugcgcuagggcggcccaagugcacgggaaagaucccuagcgcucgcguguccauucuccacgagguccgaccagugacuucuggcuguuuucccaucaugcaugaucguaccaaaauaagacaacugccuaaucuucugagggguuacgaacacguacgguugucgacacauaacguuaucaaugccgaggacgcaccagggcgccccuaugaaauuggaacuucaggcagcugcccuaacaucaccaauggcaacggguucuuugccacaauggcuugggcagugccaaagaauaaaaccgccacgaacccgcucacuauugagguccccuacaucuguacagagggagaagaucagauaaccgugugggguuuccacagugacuccgagacucagauggcuaagcuguauggcgauucuaaaccucagaaguuuacaagcuccgccaauggggugaccacgcacuacgucucacaaauuggaggcuucccaaaccagaccgaagacggugggcugccccagaguggaagaaucguuguggauuauaugguacaaaagagcggcaaaacaggcacuauuaccuaccagagggggauccucuuaccucagaagguguggugcgcgucuggacgguccaaagucaucaaggguucacugccacuuauuggcgaggcagacuguuugcaugagaaauaugggggacugaauaagagcaaacccuacuacacaggcgaacacgccaaggcuauagguaacugcccgaucugggugaagacuccucuaaaacucgccaacgggaccaaguaucgacccccagcaaaacugcuuaaggagcgcggcuuuuucggagcuauugccggcuuucuggaagggggaugggaggguaugaucgcgggcuggcauggguacacaagucacggagcccacggcguugcaguggcugccgauuugaaaucuacccaggaagcuauaaauaagauuacuaagaaccucaauucccugagcgaguuagaggucaaaaaccugcagagacucucgggugccauggacgaacuucauaaugagauccuggaauuggaugagaagguggacgaccuaagggcagauacgaucucuucccaaauugaacuggccguacuccugucaaacgaggggaucauuaauagugaggacgaacaccuucuggcuuuggagcggaaacucaagaaaaugcugggcccuagcgcgguugaaauaggaaacggcuguuucgagacaaagcauaagugcaaucagaccugcuuagaucguaucgcagccgggacuuuugacgcuggagaguucucccugcccaccuuugauucucuaaacauuacagccgcaagccucaaugacgauggucuggacaaccacaccauccuuuuguauuacucaacugccgcuaguucccuggccgugacacucaugaucgcaauuuucgucguguauauggucagccgcgauaaugugucuuguucaauaugccugugaggacuaguuauaagacugacuagcccgaugggccucccaacgggcccuccuccccuccuugcaccgagauuaauaaaaaaaaaaaaaaaaaaaaaaaaaaaaaaaaaaaaaaaaaaaaaaaaaaaaaaaaaaaaaaaaugcaucccccccccccccccccccccccccccccccaaaggcucuuuucagagccaccagaauu

SEQ ID NO: 14522 - RNA, 1627 nt, Artificial Sequence
  FLUAV/H1N1/A/California/7/2009__GQ906802 neuraminidase mRNA human (NA)
aggagaaagcuuaccaugaaccccaaucagaagaucauuaccauaggcagcgugugcaugacaaucgggauggccaaccugauucuccaaaucggaaauauuaucuccauauggaucucucacucaauucagcuugguaaccagaaucagaucgagacuuguaaccaaagugucauuacguacgaaaauaacaccuggguuaaucagacauaugugaacaucagcaauacuaacuucgcugcaggccaguccguagugucugucaaacuggccggaaauucgucauugugcccugugagcggaugggcgauauacaguaaggacaacuccguuagaauuggcucuaaaggugauguguuugucaucagggagccauucauuagcuguuccccguuagaaugccggaccuuuuuccugacacagggggcucuacucaaugacaagcauucaaacggaaccaucaaagaucgcagucccuaucgaacucugaugagcuguccuaucggcgaggugccaucucccuacaacucccguuuugaaucaguagccuggagcgcaagugccugccacgacggcauuaauuggcuuacaauagggaucucuggaccugauaacggugcuguugcagugcugaaguauaauggcauuaucaccgacacgauaaaguccuggagaaacaauauuuugaggacucaagagagcgagugugccugcgucaacgggucguguuucaccgugaugacagauggaccaucuaauggccaggcuuccuacaaaaucuuucggaucgaaaaggguaaaauugugaagucagucgagaugaacgcccccaauuaucauuacgaagagugcaguuguuacccugacagcuccgagaucacuugcguuugccgcgauaacuggcacgggucuaauagaccaugggugagcuucaaccagaaucucgaauaucagauuggauacauauguucaggcaucuuuggcgacaacccgaggcccaaugauaaaaccgggaguugcggaccuguauccagcaacggugcgaacggcgugaagggguucucuuuuaaguauggaaauggcgucuggauuggucggacaaaaucaaucaguagccgcaacggguucgagaugaucugggacccaaauggcuggaccggaacggauaacaauuuuuccauuaagcaagacauagugggcaucaacgaauggucuggguacucggggagcuucguucagcaucccgagcugacuggucuggacuguauucgaccuugcuucuggguggaacucaucagaggcaggccaaaagagaauacaauuuggaccuccgggucaaguaucucuuuuuguggagucaacagcgauacugugggcugguccuggcccgacggugcagaguuaccguucacaauagauaagugaggacuaguuauaagacugacuagcccgaugggccucccaacgggcccuccuccccuccuugcaccgagauuaauaaaaaaaaaaaaaaaaaaaaaaaaaaaaaaaaaaaaaaaaaaaaaaaaaaaaaaaaaaaaaaaaugcaucccccccccccccccccccccccccccccccaaaggcucuuuucagagccaccagaauu

SEQ ID NO: 14523 - RNA, 1627 nt, Artificial Sequence
  FLUAV/H1N1/A/Michigan/45/2015__EPI662593 neuraminidase mRNA human (NA)
aggagaaagcuuaccaugaaccccaaucagaagaucauuaccauaggcagcaucugcaugacaauugggauggccaaccugauccuccaaauuggaaauaucauauccaucugggugucucacucaauucagaucgguaaccagagucagauugagacuuguaaucaaagcgucaucacguacgaaaacaauaccuggguuaaccagacauaugugaauauauccaacacuaauuucgcugcaggccagucuguagugucggucaaacuugccgggaacucaagccugugcccugugaguggaugggcgauuuacuccaaggacaauucuguuagaaucggcagcaaaggugauguguuugucauuagggagccauucaucuccuguucaccguuggaaugccggaccuuuuucuuaacacagggggcucugcuaaacgacaagcauaguaauggaaccaucaaagaucgcagccccuaucgaacucucaugucuuguccuauuggcgaggugccaucccccuacaacucacguuuugaaagcguagccuggagugcaucugccugccacgacggcauaaacuggcugacaaucgggauuuccggaccugauagcggugcuguugcagugcuuaaguauaauggcaucauaaccgacacgauuaagucguggagaaacaauauccugaggacucaagagucugagugugccugcgucaacggguccuguuucaccaucaugacagauggaccaucagacggccaggcuaguuacaaaauuuuucggaucgaaaaggguaaaauuauaaagagcguggagaugaaagcccccaauuaucauuacgaagagugcuccuguuacccugauucuagcgagaucacuugcgugugccgcgacaacuggcacgggucaaauagaccaugggucaguuucaaccagaauuuggaauaucagaugggauacauuuguuccggcguuuuuggcgauaacccgaggcccaaugacaagaccgggagcugcggaccugugucuucaaacggugcgaauggcguaaagggguucaguuuuaaauauggaaacggcguguggaucggucggacaaagagcaucuccucucgcaaaggguucgagaugauuugggauccaaauggcuggaccggaacggacaacaaguuuucgauaaaacaagacaucgucggcauuaacgaauggagcggguacuccggaucauucgugcagcaucccgagcucacuggucuggauuguauccgaccuugcuucuggguugaacugauuagaggcaggccagaggagaauacaaucuggaccagugggucuagcauauccuuuuguggagugaacucagacacugucggcuggagcuggcccgauggugcagaacucccguucacaaucgacaagugaggacuaguuauaagacugacuagcccgaugggccucccaacgggcccuccuccccuccuugcaccgagauuaauaaaaaaaaaaaaaaaaaaaaaaaaaaaaaaaaaaaaaaaaaaaaaaaaaaaaaaaaaaaaaaaaugcaucccccccccccccccccccccccccccccccaaaggcucuuuucagagccaccagaauu

SEQ ID NO: 14524 - RNA, 1627 nt, Artificial Sequence
  FLUAV/H1N1/A/Netherlands/602/2009__AGU92703 neuraminidase mRNA human (NA)
aggagaaagcuuaccaugaaccccaaucagaagaucauuaccauaggcagcgugugcaugacaaucgggauggccaaccugauucuccaaaucggaaauauuaucuccauauggaucucucacucaauucagcuugguaaccagaaucagaucgagacuuguaaccaaagugucauuacguacgaaaauaacaccuggguuaaucagacauaugugaacaucagcaauacuaacuucgcugcaggccaguccguagugucugucaaacuggccggaaauucgucauugugcccugugagcggaugggcgauauacaguaaggacaacuccguuagagugggcucuaaaggugaugucuuugugauuagggagccauucaucagcuguuccccguuagaaugccggaccuuuuuccugacacagggggcucuacucaaugacaagcauucaaacggaaccauuaaagaucgcagucccuaucgaacucugaugagcuguccuaucggcgagguaccaucucccuacaacucccguuuugaaucaguugccuggagcgcaagugccugccacgacggcaucaauuggcuuacaauugggauaucuggaccugauaacggugcuguggcaguccugaaguauaauggcaucauuaccgacacgaucaaguccuggagaaacaauauauugaggacucaagagagcgagugugccugcgugaacgggucguguuucaccgugaugacagauggaccaucuaauggccaggcuuccuacaaaauuuuucggaucgaaaaggguaaaaucgucaagucaguugagaugaacgcccccaauuaucauuacgaagagugcaguuguuacccugacagcuccgagauuacuugcgugugccgcgauaacuggcacgggucuaauagaccaugggugagcuucaaccagaaucucgaauaucagaucggauacauuuguucaggcauauuuggcgacaacccgaggcccaaugauaaaaccgggaguugcggaccuguauccagcaacggugcgaacggcgucaagggguucucuuuuaaguauggaaauggcguguggaucggucggacaaaaucaauuaguagccgcaacggguucgagaugaucugggacccaaauggcuggaccggaacggauaacaauuuuuccaucaagcaagacauuguuggcauaaacgaauggucuggguacucggggagcuucauccagcaucccgagcugacuggucuggacuguauucgaccuugcuucuggguggaacucaucagaggcaggccaaaagagaauacaauuuggaccuccgggucaaguaucucuuuuuguggagucaacagcgauacugugggcugguccuggcccgacggugcagaguuaccguucacaauagauaagugaggacuaguuauaagacugacuagcccgaugggccucccaacgggcccuccuccccuccuugcaccgagauuaauaaaaaaaaaaaaaaaaaaaaaaaaaaaaaaaaaaaaaaaaaaaaaaaaaaaaaaaaaaaaaaaaugcaucccccccccccccccccccccccccccccccaaaggcucuuuucagagccaccagaauu

SEQ ID NO: 14525 - RNA, 1627 nt, Artificial Sequence
  FLUAV/H3N2/A/Hong Kong/4801/2014__EPI578429 neuraminidase mRNA human (NA)
aggagaaagcuuaccaugaaccccaaucagaagaucauuaccauaggcagcgugucccugacaaucucuacuauuugcuucuuuaugcaaaucgccauucucaucacgaccgucacacuucacuucaaacaguacgaguuuaacucaccuccaaauaaccagguuaugcugugugaaccgacuauaaucgagagaaauauuaccgaaaucguguauuugacaaacaccacuauugagaaggaaaucugccccaaaccugcugaguacaggaauuggaguaagccacagugugggauaacaggauucgcacccuuuagcaaagacaacuccauucgguuaucugccgguggcgauaucuggguaacccgcgagccuuaugugucgugcgacccagauaaguguuaccaauucgcgcuggggcagggaacgacucuaaauaacguccauucaaauaacaccgugcgagaccguacacccuauagaacucuccugaugaaugaacuuggcguuccuuuucaccuggguaccaaacaggugugcauugcuuggagcaguuccucuugucaugaugggaaggccugguugcacgucugcaucacaggagacgauaagaacgcaaccgccagcuucaucuacaauggcaggcucguggacuccguaguuucauggaguaaagauauucugcggacgcaggagagcgaauguauaugcaucaacggcacuuguacaguggucaugaccgacgggucugcuuccggaaaggcagauacuaaaauucuguuuaucgaggaggguaagauagugcauacaucaacccucagcggcagugcccaacacguggaagagugcucuugcuauccacgcuacccgggggucagauguguuugcagggacaacuggaagggauccaaucggcccauuguggauaucaacaucaaagaccacagcauuguaucgucuuacguguguuccggcuuagucggugacacgccucgcaagaaugauucaaguagcuccucucauugccuggacccaaacaaugaagaagggggacacggcgugaaaggcugggcuuucgaugacgggaacgauguuuggaugggacgaaccaucaaugagacaagcagacuugguuaugagacuuuuaaggugauugagggcuggucaaaccccaaaaguaaguugcagaccaauaggcaggucauaguggaccguggggaucgguccggauacagcggcaucuucucuguagaagguaaaucauguauuaaccgcugcuuuuauguugagcugaucagagggaggaaggaagagacagaagugcuauggaccaguaauagcaucgucguguucuguggcacuuccggaacauacggcaccgggucuuggccugacggagccgaucucaaccugaugccaauuugaggacuaguuauaagacugacuagcccgaugggccucccaacgggcccuccuccccuccuugcaccgagauuaauaaaaaaaaaaaaaaaaaaaaaaaaaaaaaaaaaaaaaaaaaaaaaaaaaaaaaaaaaaaaaaaaugcaucccccccccccccccccccccccccccccccaaaggcucuuuucagagccaccagaauu

SEQ ID NO: 14526 - RNA, 1618 nt, Artificial Sequence
  FLUBV/H0N0/B/Brisbane/60/2008__EPI173278 neuraminidase mRNA human (NA)
aggagaaagcuuaccaugcugcccagcaccauccagacacucacucuuuuccugacguccggcgggguguuguuaucucuguacgucucagccagucuaagcuaucuccuguacuccgacauucuucugaaguuuucuccuaccgagauaacagcuccaacuaugccguuggauugcgcaaacgccucgaauguucaagcggugaacagaucagcuaccaaaggaguaacacuccugcugcccgaaccugaguggaccuauccaaggcucagcugucccgguaguacuuuccagaaggccuuacugaucuccccucaccgguuuggcgaaacaaaaggaaauucugcaccacuuauuauccgcgagcccuucauugccugcgggccuaacgaauguaagcauuuugcuuugacccacuacgcagcccagccaggcgguuauuacaaugggacgcgaggagaccguaacaaacugagacaucuaaucagcgugaagcucggcaagauaccgacugucgaaaauuccaucuuccacauggcugccuggucaggcagugcgugccaugaugggaaagaguggaccuauauuggaguggacggucccgauaacaaugcacugcuuaagguuaaauacggcgaggccuacacagacacuuaucacagcuacgcuaacaagauccugaggacccaggagucugccuguaauugcauugggggaaacuguuauuugaugaucacagauggcuccgcaucaggugugagcgaaugccgguuucucaaaauacgcgaggggagaauuaucaaggagauuuucccuaccggaagggucaagcacacggaagaguguacuugcggcuuugcuaguaauaaaacaaucgaaugugccugccgggacaacucuuacaccgcgaagcgcccauucgugaaacugaauguagagacugauacagccgaaauccgauuaaugugcaccgacacguaucuggauacccccagaccuaacgacggcuccauuacagggccaugugagagcaacggagauaaggguucgggcgggauaaaaggaggcuuuguucaucaaaggauggagucuaagaucggucggugguacucccguacuaugucaaaaaccgaacgcauggggaugggccucuaugugaaguacgacggagaccccugggcagauagugacgcucuugccuucagcggcgucaugguguccaugaaggagccggggugguacucuuuuggauucgaaauuaaagauaagaaaugcgacgugccuuguaucgguauagagaugguccacgauggcgggaaggaaacauggcauagcgcugccacugcaauuuauugccugaugggaucaggccaguugcuaugggacaccguuacagguguggauauggcccugugaggacuaguuauaagacugacuagcccgaugggccucccaacgggcccuccuccccuccuugcaccgagauuaauaaaaaaaaaaaaaaaaaaaaaaaaaaaaaaaaaaaaaaaaaaaaaaaaaaaaaaaaaaaaaaaaugcaucccccccccccccccccccccccccccccccaaaggcucuuuucagagccaccagaauu

SEQ ID NO: 14527 - RNA, 1618 nt, Artificial Sequence
  FLUBV/H0N0/B/Phuket/3073/2013__EPI540672 neuraminidase mRNA human (NA)
aggagaaagcuuaccaugcugcccagcaccauccagacacucacucuuuuccugacguccggcgggguguuguuaucucuguacgucucagccagucuaagcuaucuccuguacuccgacauucuucugaaguuuucuagaaccgagguuacagcuccuauaaugccauuggauugcgcaaacgccucgaaugugcaagcgguaaacaggucagcuacuaaaggagugaccccgcuccugcccgaaccugaguggacauauccacggcugagcugucccgguaguaccuuccagaaggcccucuuaaucuccccucaccgcuuuggcgaaacuaaaggaaauucugcaccacugauuauccgagagcccuucauugccugcgggccuaaggaauguaaacauuuugcucuuacacacuacgcagcccagccaggcgguuauuacaacgggacccgugaggacagaaauaaguugaggcaucugaucagcgucaagcuaggaaaaauaccgacgguggagaacuccaucuuccacauggcugccuggucaggcagugcgugccaugauggccgggaauggacuuauauugggguugacggacccgauagcaaugcacuccugaagaucaaauacggugaggccuacaccgacacauaucacucuuacgcuaagaacauucuucgcacucaggaauccgccuguaauugcaucggcggggauuguuaucugaugauaaccgacggaccugcaucaggcauuagcgagugcagauuuuugaaaaucagggagggucggauuaucaaggaaaucuucccaacagggcgcgugaagcacaccgaggaauguacgugcggauuugcuaguaacaaaacuauugagugugccugccgagauaauucuuacacagcgaagagacccuucgucaaacucaacguggaaaccgacacugccgagauaaggcugaugugcacaaagaccuauuuagauacgccucggccaaaugacggcuccaucaccggccccugugagagcgauggggacgaaggaucggguggcauuaaagggggauuuguacaucaacguauggcaucuaagaucggccgcugguacuccagaacaaugucaaaaacuaagaggauggguauggggcuguauguuaaguacgacggcgauccguggaccgacagugaggcucucgcccuuagcggagugauggucuccauggaggaaccuggcugguacucuuucggguuugaaauaaaagauaagaaaugcgacgugcccuguauuggaaucgagauggugcacgaugguggcaagacaacuuggcauagcgcugccaccgcaaucuauugccugauggggucaggacaguugcuaugggacacagucaccggcguuaacaugacucugugaggacuaguuauaagacugacuagcccgaugggccucccaacgggcccuccuccccuccuugcaccgagauuaauaaaaaaaaaaaaaaaaaaaaaaaaaaaaaaaaaaaaaaaaaaaaaaaaaaaaaaaaaaaaaaaaugcaucccccccccccccccccccccccccccccccaaaggcucuuuucagagccaccagaauu

SEQ ID NO: 14528 - RNA, 1627 nt, Artificial Sequence
  FLUAV/H1N1/A/Brisbane/02/2018__EPI1212833 neuraminidase mRNA human (NA)
aggagaaagcuuaccaugaaccccaaucagaagaucauuaccauaggcagcacaugcaugacuaucgggauggccaaccugauucuccaaaucggaaauauuaucuccauaugggugucucacucaauccagauugguaaccagagucagaucgagacguguaaucaaagcgucauuaccuacgaaaacaauacauggguuaaccagacuuaugugaauaucuccaacaccaauuucgcugcaagacagucuguagccucggugaaacuugcgggcaacucaagccugugcccugucagugggugggcuauauacuccaaggacaauucugugaggauuggaagcaaaggcgauguuuuugugauccgggagccauucauuuccuguucaccguuggaaugccgcacauuuuucuuaacccagggugcccugcuaaacgacaagcauaguaaugggacuaucaaagaucgaagccccuaucguacacucaugucuuguccuaucggagaggucccaucccccuacaacucaagauuugaaagcguggcauggagugccucugcuugccacgacggcaccaacuggcugacgauuggcauauccgggccugauagcggagcaguagccguucuuaaguauaaugguaucauuacugacaccaucaagucguggaggaacaauauacugcggacacaagagucugagugugcuugcgugaacggcuccuguuucacuauuaugaccgaugggccaucagacggacaggccaguuacaaaaucuuucgcaucgaaaagggcaaaauuaucaagagcgucgagaugaaagcgcccaauuaucauuacgaagagugcuccuguuacccugauucuagcgagauuacaugcgugugcagagacaacuggcacgguucaaauaggccaugggugaguuucaaccagaauuuggaauaucagaugggguacauauguuccggagucuuuggcgauaacccgcggcccaaugacaagaccggcagcugcgggccuguuucuucaaacggagcaaauggugugaagggcuucaguuuuaaauaugggaacggaguauggaucggccgcacuaagagcauuuccucucgaaaagguuucgagaugaucugggauccaaauggguggacgggcacagacaacaaguuuucgaucaaacaagacauugugggaauaaacgaauggagcggcuacuccgggucauucguccagcaucccgagcucaccggacuggauuguaucagaccuugcuucuggguggaacugauuaggggucggccagaggagaauacuaucuggacaaguggcucuagcauuuccuuuugugggguugacucagauaccgugggauggagcuggcccgacggcgccgaacucccguucacgaucgauaagugaggacuaguuauaagacugacuagcccgaugggccucccaacgggcccuccuccccuccuugcaccgagauuaauaaaaaaaaaaaaaaaaaaaaaaaaaaaaaaaaaaaaaaaaaaaaaaaaaaaaaaaaaaaaaaaaugcaucccccccccccccccccccccccccccccccaaaggcucuuuucagagccaccagaauu

SEQ ID NO: 14529 - RNA, 1627 nt, Artificial Sequence
  FLUAV/H1N1/A/Guangdong-Maonan/SWL1536/2019__EPI1542569 neuraminidase mRNA human (NA)
aggagaaagcuuaccaugaaccccaaucagaagaucauuaccauaggcagcaucugcaugacaauugggauggccaaccugauccuccaaauuggaaauaucauauccaucugggugucucacucaauucagaucgguaaccagagucagauugagacuuguaauaaaaacgucaucacguacgaaaauaacaccuggguuaaucaaacauaugugaacauaagcaauacuaacuccgcugcaagacagucuguagccucggugaaacuugcgggcaauucaagccugugcccugucagugggugggcuauuuacuccaaggacaacucugugaggaucggaagcaagggcgauguuuucgugauucgggagccauuuaucuccuguucaccguuggaaugccgcaccuucuuuuuaacacagggugcccugcuaaaugacaaacauaguaacgggaccaucaaggaucgaagccccuaucguacucucaugucuuguccuauuggagaggucccaucccccuacaacucaagauucgaaagcguggcauggagugccucugcuugccacgacggcacaaauuggcugaccauaggcaucuccgggccugauagcggagcaguagccguucuuaaguauaacgguauuaucacggacacuauaaaaucguggaggaauaacauucugcggacccaggagucugagugugcuugcgugaauggcuccuguuuuacaaucaugacugaugggccaucagacggacaagccaguuacaagaucuuccgcauugaaaaaggcaagaucauuaaaagcgucgagaugaaggcgcccaacuaucauuacgaagagugcuccuguuacccugauucuagcgagauaaccugcgugugcagagacaauuggcacgguucaaacaggccaugggugaguuuuaaucagaacuuggaauaucagaugggguacaucuguuccggagucuucggcgauaauccgcggcccaacgacaagacaggcagcugcgggccuguuucuucaaauggagcaaacggugugaaaggcuuuaguuucaaguaugggaauggaguauggauuggccgcaccaaaagcaucuccucucgaaaggguuuugagaugaucugggauccaaacggguggacgggcacugacaacaaauucucgaagaaacaggacauugugggaauaaaugaauggagcggcuacuccgggucauuuguccaacaucccgagcucacaggacugaacuguaucagaccuugcuucuggguggaacugauuaggggucggccagaggagaauaccaucuggacaaguggcucuagcauuuccuucugugggguugauucagacaucgugggauggagcuggcccgauggcgccgaacucccguuuacuauagacaagugaggacuaguuauaagacugacuagcccgaugggccucccaacgggcccuccuccccuccuugcaccgagauuaauaaaaaaaaaaaaaaaaaaaaaaaaaaaaaaaaaaaaaaaaaaaaaaaaaaaaaaaaaaaaaaaaugcaucccccccccccccccccccccccccccccccaaaggcucuuuucagagccaccagaauu

SEQ ID NO: 14530 - RNA, 1627 nt, Artificial Sequence
  FLUAV/H3N2/A/Singapore/INFIMH-16-0019/2016__EPI1047603 neuraminidase mRNA human (NA)
aggagaaagcuuaccaugaaccccaaucagaagaucauuaccauaggcagcgugucccugacaaucucuacuauuugcuucuuuaugcagaucgccauucucaucacgaccgucacacuucacuucaaacaguacgaguuuaacucaccuccaaauaaccagguuaugcugugugaaccgacuauaaucgagagaaauauuaccgaaaucguguauuugacaaacaccacuauugagaaggaaaucugccccaaaccugcugaguacaggaauuggaguaagccacagugugggauaacaggauucgcacccuuuagcaaagacaacuccauucgguuaucugccgguggcgauaucuggguaacccgcgagccuuaugugucgugcgacccagauaaguguuaccaauucgcgcuggggcagggaacgacucuaaauaacguccauucaaauaacaccgugcgagaccguacacccuauagaacucuccugaugaaugaacuuggcguuccuuuucaccuggguaccaaacaggugugcauugcuuggagcaguuccucuugucaugaugggaaggccugguugcacgucugcaucacaggagacgauaagaacgcaaccgccagcuucaucuacaauggcaggcucauugacuccgugguaucauggaguaaagauauacugcggacgcaggagagcgaauguguuugcaucaacggcacuuguacaguggucaugaccgacgggaacgcuacuggaaaggcagauacaaaaauucuguuuaucgaggaggguaagauagugcauaccucuaagcucuccggcucagcccaacacguggaagagugcagcugcuauccacgcuacccgggggucagauguguuugcagggacaauuggaaaggaaguaaccggcccauuguggauaucaauaucaaggaccacucuauuguauccagcuacguguguucgggcuuagucggugacacgccucgcaaaaacgauucuuccucaaguagccauugccugaauccaaacaaugaagaagggggacacggcgugaagggcugggcuuucgacgaugggaacgacguuuggaugggacgaaccaucaaugagacauccagacuugguuaugagacuuuuaaaguggucgagggcuggucuaaccccaagagcaaauugcagauuaauaggcaagugauaguagaucguggggaccggucaggauacaguggcaucuucuccguugaagguaagagcuguauuaaccgcugcuuuuauguggagcugaucagagggaggaaggaagagaccgaaguccuauggacaucuaauucaaucguggucuucuguggcaccaguggaacuuacggcacagggagcuggccugauggagccgaccucaaccugaugcauauuugaggacuaguuauaagacugacuagcccgaugggccucccaacgggcccuccuccccuccuugcaccgagauuaauaaaaaaaaaaaaaaaaaaaaaaaaaaaaaaaaaaaaaaaaaaaaaaaaaaaaaaaaaaaaaaaaugcaucccccccccccccccccccccccccccccccaaaggcucuuuucagagccaccagaauu

SEQ ID NO: 14531 - RNA, 1627 nt, Artificial Sequence
  FLUAV/H3N2/A/Kansas/14/2017__EPI1146344 neuraminidase mRNA human (NA)
aggagaaagcuuaccaugaaccccaaucagaagaucauuaccauaggcagcgugucccugacaaucucuacuauuugcuucuuuaugcagaucgccauucucaucacgaccgucacacuucacuucaaacaguacgaguuuaacucaccuccaaauaaccagguuaugcugugugaaccgacuauaaucgagagaaauauuaccgaaaucguguauuugacaaacaccacuauugagagggaaaucugccccaagccugcugaguaccggaauuggaguaaaccacagugugggauaacaggauucgcacccuuuagcaaggacaacuccauucgcuuaucugccgguggcgauaucuggguaacccgagagccuuaugugucgugcgacccagauaaauguuaccaauucgcgcuggggcagggaacgacuauuaauaacguccauucaaauaacaccgcucgugacagaacaccccacaggacucuacucaugaaugaacugggcgugccuuuucaucuugguaccaagcagguuugcaucgccuggagcaguuccucuugucacgaugggaaggcauggcugcaugugugcaucacaggagacgauaaaaacgccaccgcuagcuucauuuauaauggccgguuggucgacuccgugguaucauggaguaaggauauacuccgcacgcaggagagcgaauguguuugcaucaacggcacuuguacaguggucaugaccgacgggaacgcaacuggaaaagccgauacaaagauucuguuuaucgaggaggguaaaauagugcacaccucuaagcuguccggcucagcucaacacguggaagagugcagcugcuacccaagauauccgggggucagguguguuugccgggacaauuggaagggaaguaaccgccccauuguggauaucaauaucaaagaccauucuauuguauccagcuacguguguucgggccucgucggugacacgccucgaaagaccgauucuuccucaaguagccacugcuuaaacccaaauaacgaaaaagggggacauggcgugaagggcugggccuucgacgaugggaaugacguuuggaugggaagaacaaucaacgagacuuccaggcuggguuacgaaaccuuuaaaguggucgagggcuggucuaaucccaagagcaaacuucagauuaaccggcaagugauaguagaucguggggaccgcucaggauauaguggcaucuucuccguugaggguaagagcuguauuaauagaugcuuuuacguggaauugaucagggggcggaaggaggaaacagagguccuguggacuucuaacucaaucguggucuucuguggcaccaguggaacauauggcaccgggagcuggccugauggagcggaccuaaaucucaugcacauuugaggacuaguuauaagacugacuagcccgaugggccucccaacgggcccuccuccccuccuugcaccgagauuaauaaaaaaaaaaaaaaaaaaaaaaaaaaaaaaaaaaaaaaaaaaaaaaaaaaaaaaaaaaaaaaaaugcaucccccccccccccccccccccccccccccccaaaggcucuuuucagagccaccagaauu

SEQ ID NO: 14532 - RNA, 1627 nt, Artificial Sequence
  FLUAV/H3N2/A/Kansas/14/2017-CDC-LV24A__EPI1444881 neuraminidase mRNA human (NA)
aggagaaagcuuaccaugaaccccaaucagaagaucauuaccauaggcagcgugucccugacaaucucuacuauuugcuucuuuaugcagaucgccauucucaucacgaccgucacacuucacuucaaacaguacgaguuuaacucaccuccaaauaaccagguuaugcugugugaaccgacuauaaucgagagaaauauuaccgaaaucguguauuugacaaacaccacuauugagagggaaaucugccccaagccugcugaguaccggaauuggaguaaaccacagugugggauaacaggauucgcacccuuuagcaaggacaacuccauucgcuuaucugccgguggcgauaucuggguaacccgagagccuuaugugucgugcgacccagauaaauguuaccaauucgcgcuggggcagggaacgacuauuaauaacguccauucaaauaacaccgcucgugacagaacaccccacaggacucuacucaugaaugaacugggcgugccuuuucaucuugguaccaagcagguuugcaucgccuggagcaguuccucuugucacgaugggaaggcauggcugcaugugugcaucacaggagacgauaaaaacgccaccgcuagcuucauuuauaauggccgguuggucgacuccgugguaucauggaguaaggauauacuccgcacgcaggagagcgaauguguuugcaucaacggcacuuguacaguggucaugaccgacgggaacgcaacuggaaaagccgauacaaagauucuguuuaucgaggaggguaaaauagugcacaccucuaagcuguccggcucagcucaacacguggaagagugcagcugcuacccaagauauccgggggucagguguguuugccgggacaauuggaagggaaguaaccgccccauuguggauaucaauaucaaagaccauucuauuguauccagcuacguguguucgggccucgucggugacacgccucgaaagaccgauaacucuuccucaagucacugcuuaaauccaaacaaugaaaaagggggacauggcgugaagggcugggccuucgacgaugggaacgacguuuggaugggaagaacaaucaaugagacuagcaggcuggguuacgaaaccuuuaaaguggucgagggcugguccaaccccaagucuaaacuucagauuaaucggcaagugauaguagaucguggggaccgcagcggauauucaggcaucuucaguguugaggguaaguccuguauuaacagaugcuuuuacguggaauugaucagggggcggaaggaggaaacagagguccuguggacuagcaauucuaucguggucuucuguggcaccucaggaacauauggcaccgggaguuggccugauggagcggaccuaaaccucaugcacauuugaggacuaguuauaagacugacuagcccgaugggccucccaacgggcccuccuccccuccuugcaccgagauuaauaaaaaaaaaaaaaaaaaaaaaaaaaaaaaaaaaaaaaaaaaaaaaaaaaaaaaaaaaaaaaaaaugcaucccccccccccccccccccccccccccccccaaaggcucuuuucagagccaccagaauu

SEQ ID NO: 14533 - RNA, 1627 nt, Artificial Sequence
  FLUAV/H3N2/A/Switzerland/8060/2017__EPI1154879 neuraminidase mRNA human (NA)
aggagaaagcuuaccaugaaccccaaucagaagaucauuaccauaggcagcgugucccugacaaucucuacuauuugcuucuuuaugcaaaucgccauucucaucacgaccgucacacuucacuucaaacaguacgaguuuaacucaccuccaaauaaccagguuaugcugugugaaccgacuauaaucgagagaaauauuaccgaaaucguguauuugacaaacaccacuauugagaaggaaaucugccccaaaccugcugaguacaggaauuggaguaagccacagugugggauaacaggauucgcacccuuuagcaaagacaacuccauucgguuaucugccgguggcgauaucuggguaacccgcgagccuuaugugucgugcgacccagauaaguguuaccaauucgcgcuggggcagggaacgacucuaaauaacguccauucaaauaacaccgugcgagaccguacacccuauagaacucuccugaugaaugaacuuggcguuccuuuucaccuggguaccaaacaggugugcauggcuuggagcaguuccucuugucaugaugggaaggccugguugcacgucugcgugacaggagacgauaagaacgcaaccgccagcuucauuuacaauggcaggcucguagacuccguugugucauggaguaaagauauccugcggacgcaggagagcgaaugugucugcaucaacggcacuuguacaguggugaugaccgacgggaacgcuacuggaaaggcagauacaaaaauucuguuuauagaggaggguaagaucguccauaccucuaagcucuccggcucagcccaacacguugaagagugcagcugcuauccacgcuacccgggggugagauguguaugcagggacaauuggaaaggaaguaaccggcccauuguggauaucaauauaaaggaccacucuauugucuccagcuacguguguucgggcuuaguuggugacacgccucgcaaaucugauuccucaaguagcucccauugccugaacccaaauaacgaagaagggggacacggcgugaagggcugggcuuucgacgaugggaaugacgucuggaugggacgaaccaucaacgagacaucuagacuugguuaugagacuuuuaaagugguagagggcuggagcaauucaaagaguaaauugcagaucaacaggcagguuauuguggaucguggggaccgguccggauacagcggcaucuucucugucgaagguaagucauguauuaaucgcugcuuuuauguggagcugauaagagggaggaaggaagagaccgaaguccuauggacaaguaacagcaucgugguuuucuguggcacuuccggaaccuacggcacagggucuuggcccgauggagccgaccucaaucugaugcauauuugaggacuaguuauaagacugacuagcccgaugggccucccaacgggcccuccuccccuccuugcaccgagauuaauaaaaaaaaaaaaaaaaaaaaaaaaaaaaaaaaaaaaaaaaaaaaaaaaaaaaaaaaaaaaaaaaugcaucccccccccccccccccccccccccccccccaaaggcucuuuucagagccaccagaauu

SEQ ID NO: 14534 - RNA, 1627 nt, Artificial Sequence
  FLUAV/H3N2/A/Switzerland/8060/2017(H3N2)-CDC-LV21A__EPI1364258 neuraminidase mRNA human (NA)
aggagaaagcuuaccaugaaccccaaucagaagaucauuaccauaggcagcgugucccugacaaucucuacuauuugcuucuuuaugcaaaucgccauucucaucacgaccgucacacuucacuucaaacaguacgaguuuaacucaccuccaaauaaccagguuaugcugugugaaccgacuauaaucgagagaaauauuaccgaaaucguguauuugacaaacaccacuauugagaaggaaaucugccccaaaccugcugaguacaggaauuggaguaagccacagugugggauaacaggauucgcacccuuuagcaaagacaacuccauucgguuaucugccgguggcgauaucuggguaacccgcgagccuuaugugucgugcgacccagauaaguguuaccaauucgcgcuggggcagggaacgacucuaaauaacguccauucaaauaacaccgugcgagaccguacacccuauagaacucuccugaugaaugaacuuggcguuccuuuucaccuggguaccaaacaggugugcauggcuuggagcaguuccucuugucaugaugggaaggccugguugcacgucugcgugacaggagacgauaagaacgcaaccgccagcuucauuuacaauggcaggcucguagacuccguugugucauggaguaaagauauccugcggacgcaggagagcgaaugugucugcaucaacggcacuuguacaguggugaugaccgacgggaacgcuacuggaaaggcagauacaaaaauucuguuuauagaggaggguaagaucguccauaccucuaagcucuccggcucagcccaacacguugaagagugcagcugcuauccacgcuacccgggggugagauguguaugcagggacaauuggaaaggaaguaaccggcccauuguggauaucaauauaaaggaccacucuauugucuccagcuacguguguucgcgcuuaguuggcgacacgccucgaaaaucugauuccucaaguagcucccauugccugaacccaaauaacgaagagggugggcacggagugaagggcugggcuuucgacgauggcaaugacgucuggauggggagaaccaucaacgaaacaucuaggcuuggauaugagacuuuuaaagugguagaggguuggagcaauucaaagaguaaauugcagaucaaccggcagguuauuguggaucguggcgaccgcuccggguacagcggaaucuucucugucgaaggcaagucauguauuaauagaugcuuuuauguggagcugauaaggggucggaaggaagagaccgaaguccuauggacaaguaacagcaucgugguuuucugugggacuuccggcaccuacggaacaggcucuuggcccgauggggccgaccucaaucugaugcauauuugaggacuaguuauaagacugacuagcccgaugggccucccaacgggcccuccuccccuccuugcaccgagauuaauaaaaaaaaaaaaaaaaaaaaaaaaaaaaaaaaaaaaaaaaaaaaaaaaaaaaaaaaaaaaaaaaugcaucccccccccccccccccccccccccccccccaaaggcucuuuucagagccaccagaauu

SEQ ID NO: 14535 - RNA, 1627 nt, Artificial Sequence
  FLUAV/H3N2/A/Hong Kong/2671/2019__EPI1543099 neuraminidase mRNA human (NA)
aggagaaagcuuaccaugaaccccaaucagaagaucauuaccauaggcagcgugucccugacaaucucuacuauuugcuucuuuaugcagaucgccauucucaucacgaccgucacacuucacuucaaacaguacgaguuuaacucaccuccaaauaaccagguuaugcugugugaaccgacuauaaucgagagaaauauuaccgaaaucguguauuugacaaacaccacuauugagaaggaaaucugccccaaaccugcugaguacaggaauuggaguaagccacagugugggauaacaggauucgcacccuuuagcaaagacaacuccauucgguuaucugccgguggcgauaucuggguaacccgcgagccuuaugugucgugcgaccuggauaaguguuaccaauucgcgcuagggcagggaacgacucucaauaacguccauucaaauaacaccgugcgagaccguacaccauauagaacucugcuuaugaaugaacugggcguucccuuucacuuggguaccaaacaggugugcauugcuuggagcaguuccucuugucaugaugggaaggccuggcuccacgucugcaucacaggagacgauaagaacgcaaccgccagcuucaucuacaauggcaggcugguggacuccguaguuucauggaguaacgauauucugcggacgcaggagagcgaaugugugugcauaaacggcacuuguacagucgugaugaccgacgggaaugcuacuggaaaagcagauacaaagauccucuuuauugaggaggguaaaaucgugcauaccucuaaguuauccggcucagcccaacacgucgaagagugcagcugcuauccucgcuacccagggguuagaugugugugcagggacaacuggaagggaaguaaucggccgauaauugauaucaacaucaaagaccacucuauuguauccagcuacguguguucgggccuggucggugacacgccccgcaagucugauuccucaaguagcucccauugccuuaauccuaacaaugaagaagggggacacggcgugaaaggcugggcuuucgacgaugggaacgacguuuggaugggacgaaccaucaaugagacaucuagauuggguuaugagacuuuuaagguggucgagggcuggagcaacccaaaaucaaagcugcagauuaauaggcaagugauaguagaucguggggaccggaguggauacuccggcaucuucagcguugaagguaaaucuuguauuaaccgcugcuuuuauguggagcuaaucagagggaggaaggaagagaccgaaguccucuggacaucaaauaguaucguggucuucuguggcacuagcggaaccuacggcacaggguccuggcccgauggagccgaccugaaccuuaugcauaccugaggacuaguuauaagacugacuagcccgaugggccucccaacgggcccuccuccccuccuugcaccgagauuaauaaaaaaaaaaaaaaaaaaaaaaaaaaaaaaaaaaaaaaaaaaaaaaaaaaaaaaaaaaaaaaaaugcaucccccccccccccccccccccccccccccccaaaggcucuuuucagagccaccagaauu

SEQ ID NO: 14536 - RNA, 1627 nt, Artificial Sequence
  FLUAV/H3N2/A/Hong Kong/45/2019__EPI1691929 neuraminidase mRNA human (NA)
aggagaaagcuuaccaugaaccccaaucagaagaucauuaccauaggcagcgugucccugacaaucucuacuauuugcuucuuuaugcagaucgccauucucaucacgaccgucacacuucacuucaaacaguacgaguuuaacucacugccuaauaaccagguuauguugugugaaccaacuauaaucgagagaaauauuaccgaaaucguguauuuaacaaacaccacuauugagaaggaaaucugcccgaaacccgcugaguacaggaauuggaguaagccucagugugggauaacaggauucgcaccauuuagcaaagacaacuccauucggcugucugccgguggcgauaucuggguaacccgcgagcccuaugugucgugcgaccuagauaaguguuaccaauucgcgcucgggcagggaacgacucugaauaacguccauucaaauaacaccgugcgagaccguacaccuuauagaacucuucugaugaaugaauugggcguuccauuucaccucgguaccaaacaggugugcauugcuuggagcaguuccucuugucaugaugggaaggccuggcugcacgucugcaucacaggagacgauaagaacgcaaccgccagcuucaucuacaauggcaggcugguggacuccguaguuucauggaguaacgauauucuccggacgcaggagagcgaaugugugugcauaaacggcacuuguacagucgugaugaccgacgggaaugcuacuggaaaagcagauacaaagaucuuauuuauugaggaggguaaaaucgugcauaccucuaagcuguccggcucagcccaacacgucgaagagugcagcugcuauccccgcuacccugggguuagaugugugugcagggacaacuggaagggaaguaaucggccaauaauugauaucaacaucaaagaccacucuauuguauccagcuacguguguucgggccuugucggugacacgccgcgcaagucugauuccucaaguagcucccauugcuugaaucccaacaaugaagaagggggacacggcgugaaaggcugggcuuucgacgaugggaacgacguuuggaugggacgaaccaucaaugagacaucuagacuggguuaugagacuuuuaagguggucgagggcuggagcaacccuaaaucaaagcuacagauuaauaggcaagugauaguagaucguggggaccggaguggauacuccggcaucuucagcguugaagguaaaucuuguauuaaccgcugcuuuuauguggagcucaucagagggaggaaggaagagaccgaaguccuguggacaucaaauaguaucguggucuucuguggcacuagcggaaccuacggcacaggguccuggccagauggagccgaccuuaaccugaugcauauuugaggacuaguuauaagacugacuagcccgaugggccucccaacgggcccuccuccccuccuugcaccgagauuaauaaaaaaaaaaaaaaaaaaaaaaaaaaaaaaaaaaaaaaaaaaaaaaaaaaaaaaaaaaaaaaaaugcaucccccccccccccccccccccccccccccccaaaggcucuuuucagagccaccagaauu

SEQ ID NO: 14537 - RNA, 1627 nt, Artificial Sequence
  FLUAV/H3N2/A/South Australia/34/2019__EPI1387330 neuraminidase mRNA human (NA)
aggagaaagcuuaccaugaaccccaaucagaagaucauuaccauaggcagcgugucccugacaaucucuacuauuugcuucuuuaugcagaucgccauucucaucacgaccgucacacuucacuucaaacaguacgaguuuaacucaccuccaaauaaccagguuaugcugugugaaccgacuauaaucgagagaaauauuaccgaaaucguguauuugacaaacaccacuauugagaaggaaaucugccccaaaccugcugaguacaggaauuggaguaagccacagugugggauaacaggauucgcacccuuuagcaaagacaacuccauucgguuaucugccgguggcgauaucuggguaacccgcgagccuuaugugucgugcgaccuggauaaguguuaccaauucgcgcuagggcagggaacgacucucaauaacguccauucaaauaacaccgugcgagaccguacaccauauagaacucugcuuaugaaugaacugggcguucccuuucacuuggguaccaaacaggugugcauugcuuggagcaguuccucuugucaugaugggaaggccuggcuccacgucugcaucacaggagacgauaagaacgcaaccgccagcuucaucuacaauggcaggcugguggacuccguaguuucauggaguaacgauauucugcggacgcaggagagcgaaugugugugcauaaacggcacuuguacagucgugaugaccgacgggaaugcuacuggaaaagcagauacaaagauccucuuuauugaggaggguaaaaucgugcauaccucuaaguuauccggcucagcccaacacgucgaagagugcagcugcuauccucgcuacccagggguuagaugugugugcagggacaacuggaagggaaguaaucggccgauaauugauaucaacaucaaagaccacucuauuguaucccgcuacguguguagcggccuggucggugacacgccccgaaagucggauucuuccucaaguagccauugccuuaauccuaacaaugaaaaagggggacacggcgugaagggcugggcuuucgacgaugggaacgacguuuggaugggaagaaccaucaaugagacauccagguuggguuaugaaacuuuuaaaguggucgagggcuggucuaacccaaagagcaaacugcagauuaaucggcaagugauaguagaucguggggaccgcucaggauacaguggcaucuucuccguugaggguaagagcuguauuaacagaugcuuuuauguggaacuaaucagggggcggaaggaggaaaccgagguccucuggacaucuaauucaaucguggucuucuguggcaccaguggaacuuacggcacagggagcuggcccgauggagccgaccugaaccuuaugcauauuugaggacuaguuauaagacugacuagcccgaugggccucccaacgggcccuccuccccuccuugcaccgagauuaauaaaaaaaaaaaaaaaaaaaaaaaaaaaaaaaaaaaaaaaaaaaaaaaaaaaaaaaaaaaaaaaaugcaucccccccccccccccccccccccccccccccaaaggcucuuuucagagccaccagaauu

SEQ ID NO: 14538 - RNA, 1615 nt, Artificial Sequence
  FLUAV/H7N9/A/chicken/Zhejiang/C483/2013(H7N9)__AGN69396.1 neuraminidase mRNA human (NA)
aggagaaagcuuaccaugaaccccaaucagaagauccugugcaccagcgccacagcuauuauaaucggcgcaauugccgugcucaucgggauugcgaaccuuggacugaauaucgguuugcacuuaaaaccuggcuguaacugcucccauucucaaccagagacuacgaauaccucacagacaauaaucaacaauuacuauaacgaaacuaauauuaccaacauccagauggaggaaagaacaaguaggaauuucaacaaucugaccaaggggcuauguacuauuaacagcuggcacaucuacggaaaagacaaugcuguccggauaggcgaguccucugauguucucgugacacgcgaaccguauguaucgugcgaccccgaugagugucgauuuuacgcccugucacaggguaccacgauucgugggaagcauagcaacggaacuauccacgacagaagucaauauagggcacuuauuuccuggccucugucuagcccacccaccguguacaacucccgggucgagugcaucggcuggucaaguacaagcugucaugauggcaaaucucgcauguccaucugcauuucagggccuaauaacaaugccagcgcugugguuugguauaacagaaggccaguggcagaaauaaauacuugggcccggaacaucuugcgcacccaggagagugaaugugucugccacaauggagugugucccguaguuuucacagacgguucugcuaccggcccugccgauacgcgaauuuacuacuuuaaggaggggaagauccucaaaugggagucccugacuggaacagcgaagcacauagaagagugcagcugcuauggcgaaagaaccgguauuacuuguacaugcagggacaacuggcaggggucgaaucggccagugauccagaucgauccggucgcaaugacccauacgucucaauacauuuguucccccgugcugaccgacaacccucguccaaaugaucccaacaucggaaaaugcaaugacccuuauccaggcaacaauaacaacggcgugaagggguucucauaccucgauggagccaauacaugguuaggucgcacuauuaguaccgcuagcagauccggcuaugagaugcugaaaguccccaacgcccuuacagacgacaggucuaagccgauacaggggcagacuaucguuuugaaugcagauuggagcggauacucaggcaguuuuauggacuauugggcugaaggugauuguuaccgggccugcuucuacguggagcugauucgagggcgcccuaaggaggacaaaguaugguggaccuccaacagcaucgugucuauguguucaaguacagaauuucuaggccaguggaauuggcccgauggagcgaagaucgaguauuuccucugaggacuaguuauaagacugacuagcccgaugggccucccaacgggcccuccuccccuccuugcaccgagauuaauaaaaaaaaaaaaaaaaaaaaaaaaaaaaaaaaaaaaaaaaaaaaaaaaaaaaaaaaaaaaaaaaugcaucccccccccccccccccccccccccccccccaaaggcucuuuucagagccaccagaauu

SEQ ID NO: 14539 - RNA, 1630 nt, Artificial Sequence
  FLUAV/H10N8/A/Jiangxi/IPB13/2013(H10N8)__AHK10769.1 neuraminidase mRNA human (NA)
aggagaaagcuuaccaugaaccccaaucagaagaucauuaccauaggcagcgugucccuggggcucgucauccuuaacauucuguugcacaucguuucuauuacagugacuguauuagugcugccuggaaaugguaacaaugagucaugcaacgaaacggucaucagagaguacaaugaaaccgugaggguugagaaagugacacaauggcauaacacuaaugucauagaauauaucgagcggccagagaacgaccacuucaugaauaacaccgaagcccuaugugaugcuaagggcuuugcaccguucaguaaagacaaugggauucgcaucggaagccgaggccauguguuuguaauucgugagcccuucguuuccugcucuccuacagaauguagaaccuuuuuccucacucaggguucgcugcuuaacgauaagcacucaaaugggacagugaaagacaggagcccauaccggacccugaugagugucgagaucggacagucccccaacguguaucaggcccgcuuugaggcgguggcuuggucugccacggcaugccaugauggcaagaaguggaugacuauaggcgucaccgggccugacgccaaagcuguugcagugguacacuacggagguauuccaacagaugugaucaacagcugggccggcgacauuuugagaacucaagaauccucauguaccugcauccagggggaguguuucugggucaugacagauggacccgcuaauaggcaggcccaguaucgggcguuuaaggcaaaacaaggcaagaucgugggucaggccgaaauuaguuucaacgggggacacauagaggaaugcagcuguuacccuaaugagggcaaaguugagugcgugugucgcgacaacuggaccggcacgaaucgaccaguccucgugaucucuccggaucuguccuauagaguaggguaccugugcgcuggacuccccucagacacuccuaggggugaagauagccaguuuacaggcaguugcaccucuccaauggggaaccagggauacggcguuaaggguuucggguuucggcaaggcaaugacguguggaugggacguacuauuucccgcacaagcagaucgggcuucgagaucuuaaaggucaggaacgggugggugcaaaauucuaaagaacagauaaagcggcaggucgugguugacaaccugaauugguccggauauucagguaguuucacccuucccgccgaguugacgaaacgaaacugucuggugccuugcuuuuggguagaaaugauucgcggcaauccagaggagaagaccaucuggacaagcuccucuagcaucgucaugugugggguggaucaugaaauugcagacuggucauggcacgauggagcuauccuacccuucgacauugauaaaaugugaggacuaguuauaagacugacuagcccgaugggccucccaacgggcccuccuccccuccuugcaccgagauuaauaaaaaaaaaaaaaaaaaaaaaaaaaaaaaaaaaaaaaaaaaaaaaaaaaaaaaaaaaaaaaaaaugcaucccccccccccccccccccccccccccccccaaaggcucuuuucagagccaccagaauu

SEQ ID NO: 14540 - RNA, 1618 nt, Artificial Sequence
  FLUBV/H0N0/B/Colorado/06/2017__EPI1001930 neuraminidase mRNA human (NA)
aggagaaagcuuaccaugcugcccagcaccauccagacacucacucuuuuccugacguccggcgggguguuguuaucucuguacgucucagccagucuaagcuaucuccuguacuccgacauucuucugaaguuuucuccuaccgagauaacagcuccaacuaugccguuggauugcgcaaacgccucgaauguucaagcggugaacagaucagcuaccaaaggaguaacacuccugcugcccgaaccugaguggaccuauccaaggcucagcugucccgguaguacuuuccagaaggccuuacugaucuccccucaccgguuuggcgaaacaaaaggaaauucugcaccacuuauuauccgcgagcccuucguggccugcgggccuaacgaauguaagcauuuugcuuugacccacuacgcagcccagccaggcgguuauuacaaugggacgcgaggagaccguaacaaacugagacaucuaauuagcgucaagcucggcaagaucccgacuguggaaaauuccauauuccacauggcugccuggucaggcagugcgugccaugaugggaaagaguggaccuauaucggaguugacggucccgauaacaaugcacugcuuaaggugaaauacggcgaggccuacacagacacuuaucacagcuacgcuaacaauauucugaggacccaggagucugccuguaacugcaucgggggaaauuguuauuugaugauuacagauggcuccgcaucaggugucagcgaaugccgguuucucaagauccgcgaggggagaauaauuaaagagaucuucccuaccggaagggugaagcacacggaagaguguacuugcggcuuugcuaguaacaagacaauugaaugugccugccgggacaaucgcuacaccgcgaaacgaccauucguaaagcugaacguugagacugauacagccgaaaucagauuaaugugcaccgacacguaucuggauacccccaggccuaacgacggcucuaucacagggccaugugaguccgauggagacaaagguagcggcgggauuaagggaggcuuugugcaucaacggaugaaaucgaagauaggucguugguacucucgcacuaugucccagaccgagagaauggggaugggccucuaugucaaauacggaggcgaccccugggcagauucagacgcucuugccuucaguggggugauggugagcaugaaggaaccgggaugguacuccuuugguuucgagaucaaggauaaaaagugcgacgucccuuguauuggcaucgaaaugguucacgaugggggaaaagagacauggcauucugcugccacugcaauauauugccugaugggcagcggucaguugcuaugggacaccgugacagggguagauauggcccugugaggacuaguuauaagacugacuagcccgaugggccucccaacgggcccuccuccccuccuugcaccgagauuaauaaaaaaaaaaaaaaaaaaaaaaaaaaaaaaaaaaaaaaaaaaaaaaaaaaaaaaaaaaaaaaaaugcaucccccccccccccccccccccccccccccccaaaggcucuuuucagagccaccagaauu

SEQ ID NO: 14541 - RNA, 1618 nt, Artificial Sequence
  FLUBV/H0N0/B/Washington/02/2019__EPI1368872 neuraminidase mRNA human (NA)
aggagaaagcuuaccaugcugcccagcaccauccagacacucacucuuuuccugacguccggcgggguguuguuaucucuguacgucucagccagucuaagcuaucuccuguacuccgacauucuucugaaguuuucuccuaccgagauaacagcuccaacuaugccguuggauugcgcaaacgccucgaauguucaagcggugaacagaucagcuaccaaaggaguaacacuccugcugcccgaaccugaguggaccuauccaaggcucagcugucccgguaguacuuuccagaaggccuuacugaucuccccucaccgguuuggcgaaacaaaaggaaauucugcaccacuuauuauccgcgagcccuucguggccugcgggccuaacgaauguaagcauuuugcuuugacccacuacgcagcccagccaggcgguuauuacaaugggacgcgaggagaccguaacaaacugagacaucuaauuagcgucaagcucggcaagaucccgacuguggaaaauuccauauuccacauggcugccuggucaggcagugcgugccaugaugggaaagaguggaccuauaucggaguugacggucccgauaacaaugcacugcuuaaggugaaauacggcgaggccuacacagacacuuaucacagcuacgcuaacaauauucugaggacccaggagucugccuguaacugcaucgggggaaauuguuauuugaugauuacagauggcuccgcaucaggugucagcgaaugccgguuucucaagauccgcgaggggagaauaauuaaagagaucuucccuaccggaagggugaagcacacggaagaguguacuugcggcuuugcuaguaacaagacaauugaaugugccugccgggacaaucgcuacaccgcgaaacgaccauucguaaagcugaacguugagacugauacagccgaaaucagauuaaugugcaccgacacguaucuggauacccccaggccuaacgacggcucuaucacagggccaugugaguccgauggagacaaagguagcggcgggauuaagggaggcuuugugcaucaacggaugaaaucgaagauaggucguugguacucucgcacuauguccaaaaccgagagaauggggaugggccucuaugucaaguacggaggcgaccccugggcagauucagacgcucuuacauucaguggggugauggugagcaugaaggaaccgggaugguacuccuuugguuucgagaucaaagauaagaaaugcgacgucccuuguauuggcaucgaaaugguucacgaugggggaaaggagacuuggcauucugccgcuaccgccauauauugccugaugggcagcggucaguugcuaugggacacagugaccgggguagauauggcacugugaggacuaguuauaagacugacuagcccgaugggccucccaacgggcccuccuccccuccuugcaccgagauuaauaaaaaaaaaaaaaaaaaaaaaaaaaaaaaaaaaaaaaaaaaaaaaaaaaaaaaaaaaaaaaaaaugcaucccccccccccccccccccccccccccccccaaaggcucuuuucagagccaccagaauu

SEQ ID NO: 14542 - protein, 574 aa, Artificial Sequence
  HRSV-A/RSVA/Homo sapiens/USA/84I-215A-01/1984__AHY21375.1 fusion glycoprotein (F0)
MELPILKTNAITTILAAVTLCFASSQNITEEFYQSTCSAVSKGYLSALRTGWYTSVITIELSNIKENKCNGTDAKVKLIKQELDKYKNAVTELQLLMQSTPAANNRARRELPRFMNYTLNNTKNTNVTLSKKRKRRFLGFLLGVGSAIASGIAVSKVLHLEGEVNKIKSALLSTNKAVVSLSNGVSVLTSKVLDLKNYIDKQLLPIVNKQSCSISNIETVIEFQQKNNRLLEITREFSVNAGVTTPVSTYMLTNSELLSLINDMPITNDQKKLMSNNVQIVRQQSYSIMSIIKEEVLAYVVQLPLYGVIDTPCWKLHTSPLCTTNTKEGSNICLTRTDRGWYCDNAGSVSFFPQAETCKVQSNRVFCDTMNSLTLPSEVNLCNIDIFNPKYDCKIMTSKTDVSSSVITSLGAIVSCYGKTKCTASNKNRGIIKTFSNGCDYVSNKGVDTVSVGNTLYYVNKQEGKSLYVKGEPIINFYDPLVFPSDEFDASISQVNEKINQSLAFIRKSDELLHNVNAGKSTTNIMITTIIIVIIVILLSLIAVGLLLYCKARSTPVTLSKDQLSGINNIAFSN

SEQ ID NO: 14543 - protein, 574 aa, Artificial Sequence
  HRSV-A/A2__P03420.1 fusion glycoprotein (F0)
MELLILKANAITTILTAVTFCFASGQNITEEFYQSTCSAVSKGYLSALRTGWYTSVITIELSNIKENKCNGTDAKVKLIKQELDKYKNAVTELQLLMQSTPATNNRARRELPRFMNYTLNNAKKTNVTLSKKRKRRFLGFLLGVGSAIASGVAVSKVLHLEGEVNKIKSALLSTNKAVVSLSNGVSVLTSKVLDLKNYIDKQLLPIVNKQSCSISNIETVIEFQQKNNRLLEITREFSVNAGVTTPVSTYMLTNSELLSLINDMPITNDQKKLMSNNVQIVRQQSYSIMSIIKEEVLAYVVQLPLYGVIDTPCWKLHTSPLCTTNTKEGSNICLTRTDRGWYCDNAGSVSFFPQAETCKVQSNRVFCDTMNSLTLPSEVNLCNVDIFNPKYDCKIMTSKTDVSSSVITSLGAIVSCYGKTKCTASNKNRGIIKTFSNGCDYVSNKGVDTVSVGNTLYYVNKQEGKSLYVKGEPIINFYDPLVFPSDEFDASISQVNEKINQSLAFIRKSDELLHNVNAGKSTTNIMITTIIIVIIVILLSLIAVGLLLYCKARSTPVTLSKDQLSGINNIAFSN

SEQ ID NO: 14544 - protein, 553 aa, Artificial Sequence
  HRSV-A/A2__P03420.1 fusion glycoprotein (F-del)
MELLILKANAITTILTAVTFCFASGQNITEEFYQSTCSAVSKGYLSALRTGWYTSVITIELSNIKENKCNGTDAKVKLIKQELDKYKNAVTELQLLMQSTPATNNRARRELPRFMNYTLNNAKKTNVTLSKKRKRRFLGFLLGVGSAIASGVAVSKVLHLEGEVNKIKSALLSTNKAVVSLSNGVSVLTSKVLDLKNYIDKQLLPIVNKQSCSISNIETVIEFQQKNNRLLEITREFSVNAGVTTPVSTYMLTNSELLSLINDMPITNDQKKLMSNNVQIVRQQSYSIMSIIKEEVLAYVVQLPLYGVIDTPCWKLHTSPLCTTNTKEGSNICLTRTDRGWYCDNAGSVSFFPQAETCKVQSNRVFCDTMNSLTLPSEVNLCNVDIFNPKYDCKIMTSKTDVSSSVITSLGAIVSCYGKTKCTASNKNRGIIKTFSNGCDYVSNKGVDTVSVGNTLYYVNKQEGKSLYVKGEPIINFYDPLVFPSDEFDASISQVNEKINQSLAFIRKSDELLHNVNAGKSTTNIMITTIIIVIIVILLSLIAVGLLLYCKAR

SEQ ID NO: 14545 - protein, 574 aa, Artificial Sequence
  HRSV-A/A2__P03420.1 fusion glycoprotein (F0_DSCav1)
MELLILKANAITTILTAVTFCFASGQNITEEFYQSTCSAVSKGYLSALRTGWYTSVITIELSNIKENKCNGTDAKVKLIKQELDKYKNAVTELQLLMQSTPATNNRARRELPRFMNYTLNNAKKTNVTLSKKRKRRFLGFLLGVGSAIASGVAVCKVLHLEGEVNKIKSALLSTNKAVVSLSNGVSVLTFKVLDLKNYIDKQLLPILNKQSCSISNIETVIEFQQKNNRLLEITREFSVNAGVTTPVSTYMLTNSELLSLINDMPITNDQKKLMSNNVQIVRQQSYSIMCIIKEEVLAYVVQLPLYGVIDTPCWKLHTSPLCTTNTKEGSNICLTRTDRGWYCDNAGSVSFFPQAETCKVQSNRVFCDTMNSLTLPSEVNLCNVDIFNPKYDCKIMTSKTDVSSSVITSLGAIVSCYGKTKCTASNKNRGIIKTFSNGCDYVSNKGVDTVSVGNTLYYVNKQEGKSLYVKGEPIINFYDPLVFPSDEFDASISQVNEKINQSLAFIRKSDELLHNVNAGKSTTNIMITTIIIVIIVILLSLIAVGLLLYCKARSTPVTLSKDQLSGINNIAFSN

SEQ ID NO: 14546 - protein, 553 aa, Artificial Sequence
  HRSV-A/A2__P03420.1 fusion glycoprotein (F-del_DSCav1)
MELLILKANAITTILTAVTFCFASGQNITEEFYQSTCSAVSKGYLSALRTGWYTSVITIELSNIKENKCNGTDAKVKLIKQELDKYKNAVTELQLLMQSTPATNNRARRELPRFMNYTLNNAKKTNVTLSKKRKRRFLGFLLGVGSAIASGVAVCKVLHLEGEVNKIKSALLSTNKAVVSLSNGVSVLTFKVLDLKNYIDKQLLPILNKQSCSISNIETVIEFQQKNNRLLEITREFSVNAGVTTPVSTYMLTNSELLSLINDMPITNDQKKLMSNNVQIVRQQSYSIMCIIKEEVLAYVVQLPLYGVIDTPCWKLHTSPLCTTNTKEGSNICLTRTDRGWYCDNAGSVSFFPQAETCKVQSNRVFCDTMNSLTLPSEVNLCNVDIFNPKYDCKIMTSKTDVSSSVITSLGAIVSCYGKTKCTASNKNRGIIKTFSNGCDYVSNKGVDTVSVGNTLYYVNKQEGKSLYVKGEPIINFYDPLVFPSDEFDASISQVNEKINQSLAFIRKSDELLHNVNAGKSTTNIMITTIIIVIIVILLSLIAVGLLLYCKAR

SEQ ID NO: 14547 - protein, 535 aa, Artificial Sequence
  HRSV-A/A2__P03420.1 fusion glycoprotein (F_DSCav1_mut4)
MELLILKANAITTILTAVTFCFASGQNITEEFYQSTCSAVSKGYLSALRTGWYTSVITIELSNIKENKCNGTDAKVKLIKQELDKYKNAVTELQLLMQSTPATGSGSAICSGVAVCKVLHLEGEVNKIKSALLSTNKAVVSLSNGVSVLTFKVLDLKNYIDKQLLPILNKQSCSISNIETVIEFQQKNNRLLEITREFSVNAGVTTPVSTYMLTNSELLSLINDMPITNDQKKLMSNNVQIVRQQSYSIMCIIKEEVLAYVVQLPLYGVIDTPCWKLHTSPLCTTNTKEGSNICLTRTDRGWYCDNAGSVSFFPQAETCKVQSNRVFCDTMNSRTLPSEVNLCNVDIFNPKYDCKIMTSKTDVSSSVITSLGAIVSCYGKTKCTASNKNRGIIKTFSNGCDYVSNKGVDTVSVGNTLYCVNKQEGKSLYVKGEPIINFYDPLVFPSDEFDASISQVNEKINQSLAFIRKSDELLHNVNAGKSTTNIMITTIIIVIIVILLSLIAVGLLLYCKARSTPVTLSKDQLSGINNIAFSN

SEQ ID NO: 14548 - protein, 514 aa, Artificial Sequence
  HRSV-A/A2__P03420.1 fusion glycoprotein (F-del_DSCav1_mut4)
MELLILKANAITTILTAVTFCFASGQNITEEFYQSTCSAVSKGYLSALRTGWYTSVITIELSNIKENKCNGTDAKVKLIKQELDKYKNAVTELQLLMQSTPATGSGSAICSGVAVCKVLHLEGEVNKIKSALLSTNKAVVSLSNGVSVLTFKVLDLKNYIDKQLLPILNKQSCSISNIETVIEFQQKNNRLLEITREFSVNAGVTTPVSTYMLTNSELLSLINDMPITNDQKKLMSNNVQIVRQQSYSIMCIIKEEVLAYVVQLPLYGVIDTPCWKLHTSPLCTTNTKEGSNICLTRTDRGWYCDNAGSVSFFPQAETCKVQSNRVFCDTMNSRTLPSEVNLCNVDIFNPKYDCKIMTSKTDVSSSVITSLGAIVSCYGKTKCTASNKNRGIIKTFSNGCDYVSNKGVDTVSVGNTLYCVNKQEGKSLYVKGEPIINFYDPLVFPSDEFDASISQVNEKINQSLAFIRKSDELLHNVNAGKSTTNIMITTIIIVIIVILLSLIAVGLLLYCKAR

SEQ ID NO: 14549 - protein, 536 aa, Artificial Sequence
  HRSV-A/A2__P03420.1 fusion glycoprotein (F_DSCav1_mut5)
MELLILKANAITTILTAVTFCFASGQNITEEFYQSTCSAVSKGYLSALRTGWYTSVITIELSNIKENKCNGTDAKVKLIKQELDKYKNAVTELQLLMQSTPATGSGSAIASGVAVCKVLHLEGEVNKIKSALLSTNKAVVSLSGCGVSVLTFKVLDLKNYIDKQLLPILNKQSCSISNIETVIEFQQKNNRLLEITREFSVNAGVTTPVSTYMLTNSELLSLINDMPITNDQKKLMSNNVQIVRQQSYSIMCIIKEEVLAYVVQLPLYGVIDTPCWKLHTSPLCTTNTKEGSNICLTRTDRGWYCDNAGSVSFFPQAETCKVQSNRVFCDTMNSRTLPSEVNLCNVDIFNPKYDCKIMTSKTDVSSSVITSLGAIVSCYGKTKCTASNKCRGIIKTFSNGCDYVSNKGVDTVSVGNTLYYVNKQEGKSLYVKGEPIINFYDPLVFPSDEFDASISQVNEKINQSLAFIRKSDELLHNVNAGKSTTNIMITTIIIVIIVILLSLIAVGLLLYCKARSTPVTLSKDQLSGINNIAFSN

SEQ ID NO: 14550 - protein, 515 aa, Artificial Sequence
  HRSV-A/A2__P03420.1 fusion glycoprotein (F-del_DSCav1_mut5)
MELLILKANAITTILTAVTFCFASGQNITEEFYQSTCSAVSKGYLSALRTGWYTSVITIELSNIKENKCNGTDAKVKLIKQELDKYKNAVTELQLLMQSTPATGSGSAIASGVAVCKVLHLEGEVNKIKSALLSTNKAVVSLSGCGVSVLTFKVLDLKNYIDKQLLPILNKQSCSISNIETVIEFQQKNNRLLEITREFSVNAGVTTPVSTYMLTNSELLSLINDMPITNDQKKLMSNNVQIVRQQSYSIMCIIKEEVLAYVVQLPLYGVIDTPCWKLHTSPLCTTNTKEGSNICLTRTDRGWYCDNAGSVSFFPQAETCKVQSNRVFCDTMNSRTLPSEVNLCNVDIFNPKYDCKIMTSKTDVSSSVITSLGAIVSCYGKTKCTASNKCRGIIKTFSNGCDYVSNKGVDTVSVGNTLYYVNKQEGKSLYVKGEPIINFYDPLVFPSDEFDASISQVNEKINQSLAFIRKSDELLHNVNAGKSTTNIMITTIIIVIIVILLSLIAVGLLLYCKAR

SEQ ID NO: 14551 - protein, 194 aa, Artificial Sequence
  HRSV-A/A2__AAB86665.1 matrix protein (M2-1)
MSRRNPCKFEIRGHCLNGKRCHFSHNYFEWPPHALLVRQNFMLNRILKSMDKSIDTLSEISGAAELDRTEEYALGVVGVLESYIGSINNITKQSACVAMSKLLTELNSDDIKKLRDNEELNSPKIRVYNTVISYIESNRKNNKQTIHLLKRLPADVLKKTIKNTLDIHKSITINNPKESTVSDTNDHAKNNDTT

SEQ ID NO: 14552 - RNA, 1725 nt, Artificial Sequence
  HRSV-A/RSVA/Homo sapiens/USA/84I-215A-01/1984__AHY21375.1 fusion glycoprotein CDS gc (F0)
auggagcugcccauccucaagaccaacgccaucaccacgauccuggccgcggugacccugugcuucgccagcucccagaacaucaccgaggaguucuaccagagcacgugcuccgccgucagcaagggcuaccucuccgcccugcgcaccgggugguacaccagcgugaucaccaucgagcuguccaacaucaaggagaacaagugcaacggcaccgacgccaaggugaagcucaucaagcaggagcuggacaaguacaagaacgcggucacggagcugcagcuccugaugcagagcaccccggccgccaacaaccgggcccgccgggagcugccccgcuucaugaacuacacccucaacaacaccaagaacacgaacgugacccuguccaagaagcggaagcgccgguuccugggguuccuccugggcguggggagcgcgaucgccuccggcaucgccgucagcaaggugcugcaccucgagggcgaggugaacaagaucaaguccgcccugcugagcaccaacaaggccgucgugucccucagcaacgggguguccguccugaccagcaaggugcuggaccucaagaacuacaucgacaagcagcugcugcccaucgugaacaagcaguccugcagcaucagcaacaucgagacggucaucgaguuccagcagaagaacaaccgccuccuggagaucacccgggaguucuccgugaacgcgggcgugaccacccccgucagcacguacaugcugaccaacuccgagcuccugagccugaucaacgacaugccgaucaccaacgaccagaagaagcucauguccaacaacgugcagaucgugcgccagcagagcuacuccaucaugagcaucaucaaggaggagguccuggccuacguggugcagcugccccucuacggggucaucgacacccccugcuggaagcugcacacgagcccccugugcaccaccaacaccaaggagggcagcaacaucugccucacgcggaccgaccgcgggugguacugcgacaacgccggcuccgugagcuucuucccgcaggccgagaccugcaagguccaguccaaccggguguucugcgacaccaugaacagccugacgcugcccuccgaggugaaccucugcaacaucgacaucuucaaccccaaguacgacugcaagaucaugaccagcaagaccgacgucuccagcuccgugaucaccagccugggcgccaucgugagcugcuacgggaagacgaagugcaccgcguccaacaagaaccgcggcaucaucaagaccuucagcaacgggugcgacuacgucuccaacaagggcguggacaccgugagcgucggcaacacccuguacuacgugaacaagcaggaggggaagucccucuacgugaagggcgagcccaucaucaacuucuacgacccgcuggucuuccccagcgacgaguucgacgccuccaucagccaggugaacgagaagaucaaccagucccuggccuucauccggaaguccgacgagcugcuccacaacgugaacgccgggaaguccacgaccaacaucaugaucaccaccaucaucaucgucaucaucgugauccugcugagccucaucgccgugggccugcugcucuacugcaaggcgcgcuccacgcccgucacccugagcaaggaccagcuguccgggaucaacaacaucgccuucagcaacuga

SEQ ID NO: 14553 - RNA, 1725 nt, Artificial Sequence
  HRSV-A/A2__P03420.1 fusion glycoprotein CDS gc (F0)
auggagcugcucauccugaaggccaacgccaucaccaccauccugacggcggugaccuucugcuucgccagcggccagaacaucaccgaggaguucuaccaguccaccugcagcgccgucuccaagggguaccucagcgcccugcggacgggcugguacaccuccgugaucaccaucgagcugagcaacaucaaggagaacaagugcaacgggaccgacgccaaggugaagcucaucaagcaggagcuggacaaguacaagaacgcggucacggagcugcagcuccugaugcaguccaccccggcaaccaacaaccgcgcccggcgcgagcugccccgguucaugaacuacacccucaacaacgccaagaagacgaacgugacccugagcaagaagcgcaagcggcgcuuccugggcuuccuccugggggugggcuccgccaucgcgagcggcgucgccguguccaaggugcugcaccucgagggggaggucaacaagaucaagagcgcccugcuguccaccaacaaggccguggugagccucuccaacggcgucagcgugcugaccuccaaggugcuggaccucaagaacuacaucgacaagcagcugcugcccaucgucaacaagcagagcugcuccaucagcaacaucgagacggugaucgaguuccagcagaagaacaaccggcuccuggagaucacccgcgaguucagcgugaacgccggggucaccacccccguguccacguacaugcugaccaacagcgagcuccugucccugaucaacgacaugccgaucaccaacgaccagaagaagcucaugagcaacaacgugcagaucguccggcagcaguccuacagcaucauguccaucaucaaggaggaggugcuggcguacgugguccagcugccccucuacggcgugaucgacacccccugcuggaagcugcacacgagcccccugugcaccaccaacaccaaggagggguccaacaucugccucacgcgcaccgaccggggcugguacugcgacaacgccggcagcgucuccuucuucccgcaggccgagaccugcaaggugcagagcaaccgcguguucugcgacaccaugaacucccugacgcugcccagcgagguaaaccucugcaacgucgacaucuucaaccccaaguacgacugcaagaucaugaccuccaagaccgacgugagcuccagcgugaucaccucccugggggccaucgucagcugcuacggcaagacgaagugcaccgccagcaacaagaaccgggggaucaucaagaccuucuccaacggcugcgacuacgugagcaacaagggcguggacaccguguccgucgggaacacccuguacuacgugaacaagcaggagggcaagagccucuacgugaagggggagcccaucaucaacuucuacgacccgcuggucuuccccuccgacgaguucgacgcgagcaucucccaggugaacgagaagaucaaccagagccuggccuucauccgcaaguccgacgagcugcuccacaacgugaacgccggcaagagcacgaccaacaucaugaucaccaccaucaucaucgucaucaucgugauccugcugucccucaucgccguggggcugcugcucuacugcaaggcccggagcacgcccgucacccuguccaaggaccagcugagcggcaucaacaacaucgcguucuccaacuga

SEQ ID NO: 14554 - RNA, 1662 nt, Artificial Sequence
  HRSV-A/A2__P03420.1 fusion glycoprotein CDS gc (F-del)
auggagcugcucauccugaaggccaacgccaucaccaccauccugacggcggugaccuucugcuucgccagcggccagaacaucaccgaggaguucuaccaguccaccugcagcgccgucuccaagggguaccucagcgcccugcggacgggcugguacaccuccgugaucaccaucgagcugagcaacaucaaggagaacaagugcaacgggaccgacgccaaggugaagcucaucaagcaggagcuggacaaguacaagaacgcggucacggagcugcagcuccugaugcaguccaccccggcaaccaacaaccgcgcccggcgcgagcugccccgguucaugaacuacacccucaacaacgccaagaagacgaacgugacccugagcaagaagcgcaagcggcgcuuccugggcuuccuccugggggugggcuccgccaucgcgagcggcgucgccguguccaaggugcugcaccucgagggggaggucaacaagaucaagagcgcccugcuguccaccaacaaggccguggugagccucuccaacggcgucagcgugcugaccuccaaggugcuggaccucaagaacuacaucgacaagcagcugcugcccaucgucaacaagcagagcugcuccaucagcaacaucgagacggugaucgaguuccagcagaagaacaaccggcuccuggagaucacccgcgaguucagcgugaacgccggggucaccacccccguguccacguacaugcugaccaacagcgagcuccugucccugaucaacgacaugccgaucaccaacgaccagaagaagcucaugagcaacaacgugcagaucguccggcagcaguccuacagcaucauguccaucaucaaggaggaggugcuggcguacgugguccagcugccccucuacggcgugaucgacacccccugcuggaagcugcacacgagcccccugugcaccaccaacaccaaggagggguccaacaucugccucacgcgcaccgaccggggcugguacugcgacaacgccggcagcgucuccuucuucccgcaggccgagaccugcaaggugcagagcaaccgcguguucugcgacaccaugaacucccugacgcugcccagcgagguaaaccucugcaacgucgacaucuucaaccccaaguacgacugcaagaucaugaccuccaagaccgacgugagcuccagcgugaucaccucccugggggccaucgucagcugcuacggcaagacgaagugcaccgccagcaacaagaaccgggggaucaucaagaccuucuccaacggcugcgacuacgugagcaacaagggcguggacaccguguccgucgggaacacccuguacuacgugaacaagcaggagggcaagagccucuacgugaagggggagcccaucaucaacuucuacgacccgcuggucuuccccuccgacgaguucgacgcgagcaucucccaggugaacgagaagaucaaccagagccuggccuucauccgcaaguccgacgagcugcuccacaacgugaacgccggcaagagcacgaccaacaucaugaucaccaccaucaucaucgucaucaucgugauccugcugucccucaucgccguggggcugcugcucuacugcaaggcccgguga

SEQ ID NO: 14555 - RNA, 1725 nt, Artificial Sequence
  HRSV-A/A2__P03420.1 fusion glycoprotein CDS gc (F0_DSCav1)
auggagcugcucauccugaaggccaacgccaucaccaccauccugacggcggugaccuucugcuucgccagcggccagaacaucaccgaggaguucuaccaguccacgugcagcgccgucuccaagggguaccucagcgcccugcggaccggcugguacaccuccgugaucaccaucgagcugagcaacaucaaggagaacaagugcaacgggaccgacgccaaggugaagcucaucaagcaggagcuggacaaguacaagaacgcggucacggagcugcagcuccugaugcaguccaccccggcaaccaacaaccgcgcccggcgcgagcugccccgguucaugaacuacacccucaacaacgccaagaagacgaacgugacccugagcaagaagcgcaagcggcgcuuccugggcuuccuccugggggugggcuccgccaucgcgagcggcgucgccgugugcaaggugcugcaccucgagggggaggucaacaagaucaagagcgcccugcuguccaccaacaaggccguggugagccucuccaacggcgucagcgugcugaccuucaaggugcuggaccucaagaacuacaucgacaagcagcugcugcccauccugaacaagcagagcugcuccaucagcaacaucgagacggugaucgaguuccagcagaagaacaaccggcuccuggagaucacccgcgaguucagcgugaacgccggggucaccacccccguguccacguacaugcugaccaacagcgagcuccugucccugaucaacgacaugccgaucaccaacgaccagaagaagcucaugagcaacaacgugcagaucguccggcagcaguccuacagcaucaugugcaucaucaaggaggaggugcuggcguacgugguccagcugccccucuacggcgugaucgacacccccugcuggaagcugcacacgagcccccugugcaccaccaacaccaaggagggguccaacaucugccucacgcgcaccgaccggggcugguacugcgacaacgccggcagcgucuccuucuucccgcaggccgagaccugcaaggugcagagcaaccgcguguucugcgacaccaugaacucccugacgcugcccagcgagguaaaccucugcaacgucgacaucuucaaccccaaguacgacugcaagaucaugaccuccaagaccgacgugagcuccagcgugaucaccucccugggggccaucgucagcugcuacggcaagacgaagugcaccgccagcaacaagaaccgggggaucaucaagaccuucuccaacggcugcgacuacgugagcaacaagggcguggacaccguguccgucgggaacacccuguacuacgugaacaagcaggagggcaagagccucuacgugaagggggagcccaucaucaacuucuacgacccgcuggucuuccccuccgacgaguucgacgcgagcaucucccaggugaacgagaagaucaaccagagccuggccuucauccgcaaguccgacgagcugcuccacaacgugaacgccggcaagagcacgaccaacaucaugaucaccaccaucaucaucgucaucaucgugauccugcugucccucaucgccguggggcugcugcucuacugcaaggcccggagcacgcccgucacccuguccaaggaccagcugagcggcaucaacaacaucgcguucuccaacuga

SEQ ID NO: 14556 - RNA, 1662 nt, Artificial Sequence
  HRSV-A/A2__P03420.1 fusion glycoprotein CDS gc (F-del_DSCav1)
auggagcugcucauccugaaggccaacgccaucaccaccauccugacggcggugaccuucugcuucgccagcggccagaacaucaccgaggaguucuaccaguccacgugcagcgccgucuccaagggguaccucagcgcccugcggaccggcugguacaccuccgugaucaccaucgagcugagcaacaucaaggagaacaagugcaacgggaccgacgccaaggugaagcucaucaagcaggagcuggacaaguacaagaacgcggucacggagcugcagcuccugaugcaguccaccccggcaaccaacaaccgcgcccggcgcgagcugccccgguucaugaacuacacccucaacaacgccaagaagacgaacgugacccugagcaagaagcgcaagcggcgcuuccugggcuuccuccugggggugggcuccgccaucgcgagcggcgucgccgugugcaaggugcugcaccucgagggggaggucaacaagaucaagagcgcccugcuguccaccaacaaggccguggugagccucuccaacggcgucagcgugcugaccuucaaggugcuggaccucaagaacuacaucgacaagcagcugcugcccauccugaacaagcagagcugcuccaucagcaacaucgagacggugaucgaguuccagcagaagaacaaccggcuccuggagaucacccgcgaguucagcgugaacgccggggucaccacccccguguccacguacaugcugaccaacagcgagcuccugucccugaucaacgacaugccgaucaccaacgaccagaagaagcucaugagcaacaacgugcagaucguccggcagcaguccuacagcaucaugugcaucaucaaggaggaggugcuggcguacgugguccagcugccccucuacggcgugaucgacacccccugcuggaagcugcacacgagcccccugugcaccaccaacaccaaggagggguccaacaucugccucacgcgcaccgaccggggcugguacugcgacaacgccggcagcgucuccuucuucccgcaggccgagaccugcaaggugcagagcaaccgcguguucugcgacaccaugaacucccugacgcugcccagcgagguaaaccucugcaacgucgacaucuucaaccccaaguacgacugcaagaucaugaccuccaagaccgacgugagcuccagcgugaucaccucccugggggccaucgucagcugcuacggcaagacgaagugcaccgccagcaacaagaaccgggggaucaucaagaccuucuccaacggcugcgacuacgugagcaacaagggcguggacaccguguccgucgggaacacccuguacuacgugaacaagcaggagggcaagagccucuacgugaagggggagcccaucaucaacuucuacgacccgcuggucuuccccuccgacgaguucgacgcgagcaucucccaggugaacgagaagaucaaccagagccuggccuucauccgcaaguccgacgagcugcuccacaacgugaacgccggcaagagcacgaccaacaucaugaucaccaccaucaucaucgucaucaucgugauccugcugucccucaucgccguggggcugcugcucuacugcaaggcccgguga

SEQ ID NO: 14557 - RNA, 1608 nt, Artificial Sequence
  HRSV-A/A2__P03420.1 fusion glycoprotein CDS gc (F_DSCav1_mut4)
auggagcugcucauccugaaggccaacgccaucaccaccauccugacggcggugaccuucugcuucgccagcggccagaacaucaccgaggaguucuaccaguccacgugcagcgccgucuccaagggguaccucagcgcccugcggaccggcugguacaccuccgugaucaccaucgagcugagcaacaucaaggagaacaagugcaacgggaccgacgccaaggugaagcucaucaagcaggagcuggacaaguacaagaacgcggucacggagcugcagcuccugaugcaguccaccccggcaaccggcuccggcuccgccaucugcagcggcgucgccgugugcaaggugcugcaccucgagggggaggucaacaagaucaagagcgcccugcuguccaccaacaaggccguggugagccucuccaacggcgucagcgugcugaccuucaaggugcuggaccucaagaacuacaucgacaagcagcugcugcccauccugaacaagcagagcugcuccaucagcaacaucgagacggugaucgaguuccagcagaagaacaaccggcuccuggagaucacccgcgaguucagcgugaacgccggggucaccacccccguguccacguacaugcugaccaacagcgagcuccugucccugaucaacgacaugccgaucaccaacgaccagaagaagcucaugagcaacaacgugcagaucguccggcagcaguccuacagcaucaugugcaucaucaaggaggaggugcuggcguacgugguccagcugccccucuacggcgugaucgacacccccugcuggaagcugcacacgagcccccugugcaccaccaacaccaaggagggguccaacaucugccucacgcgcaccgaccggggcugguacugcgacaacgccggcagcgucuccuucuucccgcaggccgagaccugcaaggugcagagcaaccgcguguucugcgacaccaugaacucccggacgcugcccagcgagguaaaccucugcaacgucgacaucuucaaccccaaguacgacugcaagaucaugaccuccaagaccgacgugagcuccagcgugaucaccucccugggggccaucgucagcugcuacggcaagacgaagugcaccgccagcaacaagaaccgggggaucaucaagaccuucuccaacggcugcgacuacgugagcaacaagggcguggacaccguguccgucgggaacacccuguacugcgugaacaagcaggagggcaagagccucuacgugaagggggagcccaucaucaacuucuacgacccgcuggucuuccccuccgacgaguucgacgcgagcaucucccaggugaacgagaagaucaaccagagccuggccuucauccgcaaguccgacgagcugcuccacaacgugaacgccggcaagagcacgaccaacaucaugaucaccaccaucaucaucgucaucaucgugauccugcugucccucaucgccguggggcugcugcucuacugcaaggcccggagcacgcccgucacccuguccaaggaccagcugagcggcaucaacaacaucgcguucuccaacuga

SEQ ID NO: 14558 - RNA, 1545 nt, Artificial Sequence
  HRSV-A/A2__P03420.1 fusion glycoprotein CDS gc (F-del_DSCav1_mut4)
auggagcugcucauccugaaggccaacgccaucaccaccauccugacggcggugaccuucugcuucgccagcggccagaacaucaccgaggaguucuaccaguccacgugcagcgccgucuccaagggguaccucagcgcccugcggaccggcugguacaccuccgugaucaccaucgagcugagcaacaucaaggagaacaagugcaacgggaccgacgccaaggugaagcucaucaagcaggagcuggacaaguacaagaacgcggucacggagcugcagcuccugaugcaguccaccccggcaaccggcuccggcuccgccaucugcagcggcgucgccgugugcaaggugcugcaccucgagggggaggucaacaagaucaagagcgcccugcuguccaccaacaaggccguggugagccucuccaacggcgucagcgugcugaccuucaaggugcuggaccucaagaacuacaucgacaagcagcugcugcccauccugaacaagcagagcugcuccaucagcaacaucgagacggugaucgaguuccagcagaagaacaaccggcuccuggagaucacccgcgaguucagcgugaacgccggggucaccacccccguguccacguacaugcugaccaacagcgagcuccugucccugaucaacgacaugccgaucaccaacgaccagaagaagcucaugagcaacaacgugcagaucguccggcagcaguccuacagcaucaugugcaucaucaaggaggaggugcuggcguacgugguccagcugccccucuacggcgugaucgacacccccugcuggaagcugcacacgagcccccugugcaccaccaacaccaaggagggguccaacaucugccucacgcgcaccgaccggggcugguacugcgacaacgccggcagcgucuccuucuucccgcaggccgagaccugcaaggugcagagcaaccgcguguucugcgacaccaugaacucccggacgcugcccagcgagguaaaccucugcaacgucgacaucuucaaccccaaguacgacugcaagaucaugaccuccaagaccgacgugagcuccagcgugaucaccucccugggggccaucgucagcugcuacggcaagacgaagugcaccgccagcaacaagaaccgggggaucaucaagaccuucuccaacggcugcgacuacgugagcaacaagggcguggacaccguguccgucgggaacacccuguacugcgugaacaagcaggagggcaagagccucuacgugaagggggagcccaucaucaacuucuacgacccgcuggucuuccccuccgacgaguucgacgcgagcaucucccaggugaacgagaagaucaaccagagccuggccuucauccgcaaguccgacgagcugcuccacaacgugaacgccggcaagagcacgaccaacaucaugaucaccaccaucaucaucgucaucaucgugauccugcugucccucaucgccguggggcugcugcucuacugcaaggcccgguga

SEQ ID NO: 14559 - RNA, 1611 nt, Artificial Sequence
  HRSV-A/A2__P03420.1 fusion glycoprotein CDS gc (F_DSCav1_mut5)
auggagcugcucauccugaaggccaacgccaucaccaccauccugacggcggugaccuucugcuucgccagcggccagaacaucaccgaggaguucuaccaguccacgugcagcgccgucuccaagggguaccucagcgcccugcggaccggcugguacaccuccgugaucaccaucgagcugagcaacaucaaggagaacaagugcaacgggaccgacgccaaggugaagcucaucaagcaggagcuggacaaguacaagaacgcggucacggagcugcagcuccugaugcaguccaccccggcaaccggcuccggcuccgccaucgcgagcggcgucgccgugugcaaggugcugcaccucgagggggaggucaacaagaucaagagcgcccugcuguccaccaacaaggccguggugagccucuccggcugcggcgucagcgugcugaccuucaaggugcuggaccucaagaacuacaucgacaagcagcugcugcccauccugaacaagcagagcugcuccaucagcaacaucgagacggugaucgaguuccagcagaagaacaaccggcuccuggagaucacccgcgaguucagcgugaacgccggggucaccacccccguguccacguacaugcugaccaacagcgagcuccugucccugaucaacgacaugccgaucaccaacgaccagaagaagcucaugagcaacaacgugcagaucguccggcagcaguccuacagcaucaugugcaucaucaaggaggaggugcuggcguacgugguccagcugccccucuacggcgugaucgacacccccugcuggaagcugcacacgagcccccugugcaccaccaacaccaaggagggguccaacaucugccucacgcgcaccgaccggggcugguacugcgacaacgccggcagcgucuccuucuucccgcaggccgagaccugcaaggugcagagcaaccgcguguucugcgacaccaugaacucccggacgcugcccagcgagguaaaccucugcaacgucgacaucuucaaccccaaguacgacugcaagaucaugaccuccaagaccgacgugagcuccagcgugaucaccucccugggggccaucgucagcugcuacggcaagacgaagugcaccgccagcaacaagugccgggggaucaucaagaccuucuccaacggcugcgacuacgugagcaacaagggcguggacaccguguccgucgggaacacccuguacuacgugaacaagcaggagggcaagagccucuacgugaagggggagcccaucaucaacuucuacgacccgcuggucuuccccuccgacgaguucgacgcgagcaucucccaggugaacgagaagaucaaccagagccuggccuucauccgcaaguccgacgagcugcuccacaacgugaacgccggcaagagcacgaccaacaucaugaucaccaccaucaucaucgucaucaucgugauccugcugucccucaucgccguggggcugcugcucuacugcaaggcccggagcacgcccgucacccuguccaaggaccagcugagcggcaucaacaacaucgcguucuccaacuga

SEQ ID NO: 14560 - RNA, 1548 nt, Artificial Sequence
  HRSV-A/A2__P03420.1 fusion glycoprotein CDS gc (F-del_DSCav1_mut5)
auggagcugcucauccugaaggccaacgccaucaccaccauccugacggcggugaccuucugcuucgccagcggccagaacaucaccgaggaguucuaccaguccacgugcagcgccgucuccaagggguaccucagcgcccugcggaccggcugguacaccuccgugaucaccaucgagcugagcaacaucaaggagaacaagugcaacgggaccgacgccaaggugaagcucaucaagcaggagcuggacaaguacaagaacgcggucacggagcugcagcuccugaugcaguccaccccggcaaccggcuccggcuccgccaucgcgagcggcgucgccgugugcaaggugcugcaccucgagggggaggucaacaagaucaagagcgcccugcuguccaccaacaaggccguggugagccucuccggcugcggcgucagcgugcugaccuucaaggugcuggaccucaagaacuacaucgacaagcagcugcugcccauccugaacaagcagagcugcuccaucagcaacaucgagacggugaucgaguuccagcagaagaacaaccggcuccuggagaucacccgcgaguucagcgugaacgccggggucaccacccccguguccacguacaugcugaccaacagcgagcuccugucccugaucaacgacaugccgaucaccaacgaccagaagaagcucaugagcaacaacgugcagaucguccggcagcaguccuacagcaucaugugcaucaucaaggaggaggugcuggcguacgugguccagcugccccucuacggcgugaucgacacccccugcuggaagcugcacacgagcccccugugcaccaccaacaccaaggagggguccaacaucugccucacgcgcaccgaccggggcugguacugcgacaacgccggcagcgucuccuucuucccgcaggccgagaccugcaaggugcagagcaaccgcguguucugcgacaccaugaacucccggacgcugcccagcgagguaaaccucugcaacgucgacaucuucaaccccaaguacgacugcaagaucaugaccuccaagaccgacgugagcuccagcgugaucaccucccugggggccaucgucagcugcuacggcaagacgaagugcaccgccagcaacaagugccgggggaucaucaagaccuucuccaacggcugcgacuacgugagcaacaagggcguggacaccguguccgucgggaacacccuguacuacgugaacaagcaggagggcaagagccucuacgugaagggggagcccaucaucaacuucuacgacccgcuggucuuccccuccgacgaguucgacgcgagcaucucccaggugaacgagaagaucaaccagagccuggccuucauccgcaaguccgacgagcugcuccacaacgugaacgccggcaagagcacgaccaacaucaugaucaccaccaucaucaucgucaucaucgugauccugcugucccucaucgccguggggcugcugcucuacugcaaggcccgguga

SEQ ID NO: 14561 - RNA, 585 nt, Artificial Sequence
  HRSV-A/A2__AAB86665.1 matrix protein CDS gc (M2-1)
augagccgccggaaccccugcaaguucgagauccgcggccacugccugaacgggaagcggugccacuucucccacaacuacuucgaguggccgccccacgcccuccuggugcgccagaacuucaugcugaaccggauccucaagagcauggacaaguccaucgacacccugagcgagaucuccggcgccgcggagcuggaccgcaccgaggaguacgcccucggggucgugggcgugcuggagagcuacaucggguccaucaacaacaucacgaagcagagcgccugcgucgccauguccaagcugcucaccgagcugaacagcgacgacaucaagaagcugcgggacaacgaggagcucaacucccccaagauccgcguguacaacaccgugaucagcuacaucgaguccaaccggaagaacaacaagcagaccauccaccuccugaagcgccugcccgccgacguccugaagaagacgaucaagaacacccuggacauccacaagagcaucaccaucaacaacccgaaggaguccaccgugagcgacacgaacgaccacgcgaagaacaacgacaccaccuga

SEQ ID NO: 14562 - RNA, 1725 nt, Artificial Sequence
  HRSV-A/RSVA/Homo sapiens/USA/84I-215A-01/1984__AHY21375.1 fusion glycoprotein CDS human (F0)
auggagcugcccauccucaagaccaacgccauuacaacuauacuugcugcagugacgcugugcuucgccagcucccagaauaucaccgaagaguuuuaccaaucuacauguucagcggucaguaaaggcuauuugagcgcuuuaagaacugggugguacaccuccguuauuacaaucgaacugucuaacauuaaggagaauaaaugcaacggaaccgacgccaaggugaaacuaaucaagcaggaacucgauaaguauaaaaaugcaguaacugagcugcagcuucugaugcagucgaccccugccgcuaacaauagggcacggcgcgaguugccacgauucaugaacuacacacucaauaacacgaagaauacuaacgugacccugagcaaaaagcguaaaagaagguuucuggguuuccucuuaggcgucgggucagccauagcuaguggaaucgccguguccaagguucugcaccuugaaggcgaggugaauaagauuaaaucugcguugcugagcacaaacaaggcagucgugucccuaucaaaugguguaaguguucucacuagcaaagugcuggaccuuaagaacuauaucgauaaacaacuguugccgauugucaacaagcagucuuguuccaucucaaauauagaaaccgugauugaguuucagcagaaaaacaaucggcuccuggagaucacacgcgaguucagcgugaacgccggggucaccacgcccguuaguacuuacauguuaacaaauucugaacugcucucccuuauuaacgacaugccuaucaccaaugaucaaaagaagcugaugagcaacaaugugcagaucguaagacagcagucguauucuauuauguccauaaucaaagaagagguguuggcuuacgucgugcaacuaccacuguacggaguuauugacacucccugcuggaagcuccauacaucaccucuguguaccacgaacaccaaagaaggcaguaauaucugccuuacaaggacugaucggggcugguauugugacaacgccgggagcguguccuuuuucccacaggcagagaccugcaagguccagucuaaucgcguguuuugugauacaaugaacagccugacuuugcccucagagguaaaucucugcaacauagacauuuucaacccuaaauacgauuguaagaucaugaccaguaagacagacguuuccagcucugugaucaccucacugggagcuauugucaguugcuaugguaaaacuaagugcacggccagcaauaaaaaccgaggcaucauuaagacauuuuccaaugggugugauuacgugucuaacaaaggagucgacaccgugucgguuggcaauacuuuauauuacgugaacaagcaagaagguaagagccuguauguaaaaggggagccaauaaucaauuucuacgacccgcuagucuuucccuccgaugaguucgacgcgucaauuagucaggugaacgaaaagaucaaucagucucucgccuucaucagaaaaagcgaugaacugcuucacaacguuaaugcaggaaaguccaccacaaacauuaugauaaccacuaucauuaucgugauuaucgucauauugcugucacucaucgcugugggccugcuucuguacugcaaagccaggagcacaccuguaacguugucuaaggaccagcucuccggcauuaauaacaucgcuuuuaguaauuga

SEQ ID NO: 14563 - RNA, 1725 nt, Artificial Sequence
  HRSV-A/A2__P03420.1 fusion glycoprotein CDS human (F0)
auggagcugcucauccuuaaggccaacgcuauuaccacaauacugacugcagugacguucugcuuugccagcggccagaauaucaccgaagaguucuaccaauccacauguucugcggucucaaaaggguauuugagugcuuuaagaacuggaugguacaccagcguuauuacaaucgaacuguccaacauuaaggagaauaaaugcaacgguaccgacgccaaggugaaacuaaucaagcaggaacucgauaaguauaaaaaugcaguaacugagcugcagcuucugaugcagucuacacccgccaccaacaauagggcucggcgcgaguugccucgauuuaugaacuacacgcucaauaacgcaaagaaaacuaaugugacccugucgaagaaacguaagagaagguuccugggcuuucucuuaggggucggaucagccauagcuagcggcguggccguuaguaaggugcugcaccuugaaggugaggucaacaaaaucaaguccgcguugcugucuacaaauaaagcagugguaagccuauccaacgggguuucagugcucacuucuaagguccuggaccuuaaaaauuauauugauaagcaacuguugccaaucgugaacaaacagagcuguucuauuuccaacaucgaaaccgugauagaguuccagcagaagaauaaccggcuccuggagauuacacgcgaauuuucagucaaugccggaguuaccacgccggugagcacuuacauguuaacaaacagugagcugcucucucuuaucaaugacaugcccauuaccaacgaucaaaagaaacugauguccaauaacguacagaucgugagacagcagagcuauucgaucaugucuauuauaaaggaagaggucuuggcuuacgugguucaacuaccucuguacggcgugaucgacacuccaugcuggaaacuccauacauccccacuguguaccacgaauaccaaggaaggcucaaacauuugccuuacaaggacugaucgggggugguauugugacaaugccggaagugucagcuucuuuccucaggcagagaccugcaaagugcaguccaaccgcguauucugugauacaaugaauagucugacuuugccaagcgagguuaaccucugcaauguggacaucuuuaaccccaaguacgauuguaagauaaugaccucaaaaacagacgucaguuccagcgugauuaccucucugggugcuaucgucucaugcuauggcaagacuaaaugcacggccaguaacaagaaucgagggaucauuaaaacauucagcaacggaugugauuacguguccaauaagggcguugacaccgugucuguagguaacacuuuauauuacgucaauaagcaagaagggaaaucgcuguaugugaagggagagccuaucauuaacuuuuacgacccccuaguuuucccgagcgaugaauuugacgcguccauaucacaggugaaugagaaaaucaaccagagucucgccuucauuagaaagucugaugaacugcuucacaaugucaacgcaggcaaaagcaccacaaauaucaugaucaccacuauuauaaucgugauuaucguaauuuugcugucccucaucgcugugggccugcuucuguacugcaaggccaggucaacacccguuacguugagcaaggaccagcucucugggauaaacaauaucgcuuucuccaacuga

SEQ ID NO: 14564 - RNA, 1662 nt, Artificial Sequence
  HRSV-A/A2__P03420.1 fusion glycoprotein CDS human (F-del)
auggagcugcucauccuuaaggccaacgcuauuaccacaauacugacugcagugacguucugcuuugccagcggccagaauaucaccgaagaguucuaccaauccacauguucugcggucucaaaaggguauuugagugcuuuaagaacuggaugguacaccagcguuauuacaaucgaacuguccaacauuaaggagaauaaaugcaacgguaccgacgccaaggugaaacuaaucaagcaggaacucgauaaguauaaaaaugcaguaacugagcugcagcuucugaugcagucuacacccgccaccaacaauagggcucggcgcgaguugccucgauuuaugaacuacacgcucaauaacgcaaagaaaacuaaugugacccugucgaagaaacguaagagaagguuccugggcuuucucuuaggggucggaucagccauagcuagcggcguggccguuaguaaggugcugcaccuugaaggugaggucaacaaaaucaaguccgcguugcugucuacaaauaaagcagugguaagccuauccaacgggguuucagugcucacuucuaagguccuggaccuuaaaaauuauauugauaagcaacuguugccaaucgugaacaaacagagcuguucuauuuccaacaucgaaaccgugauagaguuccagcagaagaauaaccggcuccuggagauuacacgcgaauuuucagucaaugccggaguuaccacgccggugagcacuuacauguuaacaaacagugagcugcucucucuuaucaaugacaugcccauuaccaacgaucaaaagaaacugauguccaauaacguacagaucgugagacagcagagcuauucgaucaugucuauuauaaaggaagaggucuuggcuuacgugguucaacuaccucuguacggcgugaucgacacuccaugcuggaaacuccauacauccccacuguguaccacgaauaccaaggaaggcucaaacauuugccuuacaaggacugaucgggggugguauugugacaaugccggaagugucagcuucuuuccucaggcagagaccugcaaagugcaguccaaccgcguauucugugauacaaugaauagucugacuuugccaagcgagguuaaccucugcaauguggacaucuuuaaccccaaguacgauuguaagauaaugaccucaaaaacagacgucaguuccagcgugauuaccucucugggugcuaucgucucaugcuauggcaagacuaaaugcacggccaguaacaagaaucgagggaucauuaaaacauucagcaacggaugugauuacguguccaauaagggcguugacaccgugucuguagguaacacuuuauauuacgucaauaagcaagaagggaaaucgcuguaugugaagggagagccuaucauuaacuuuuacgacccccuaguuuucccgagcgaugaauuugacgcguccauaucacaggugaaugagaaaaucaaccagagucucgccuucauuagaaagucugaugaacugcuucacaaugucaacgcaggcaaaagcaccacaaauaucaugaucaccacuauuauaaucgugauuaucguaauuuugcugucccucaucgcugugggccugcuucuguacugcaaggccagguga

SEQ ID NO: 14565 - RNA, 1725 nt, Artificial Sequence
  HRSV-A/A2__P03420.1 fusion glycoprotein CDS human (F0_DSCav1)
auggagcugcucauccuuaaggccaacgcuauuaccacaauacugacugcagugacguucugcuuugccagcggccagaauaucaccgaagaguucuaccaauccacauguucugcggucucaaaaggguauuugagugcuuuaagaacuggaugguacaccagcguuauuacaaucgaacuguccaacauuaaggagaauaaaugcaacgguaccgacgccaaggugaaacuaaucaagcaggaacucgauaaguauaaaaaugcaguaacugagcugcagcuucugaugcagucuacacccgccaccaacaauagggcucggcgcgaguugccucgauuuaugaacuacacgcucaauaacgcaaagaaaacuaaugugacccugucgaagaaacguaagagaagguuccugggcuuucucuuaggggucggaucagccauagcuagcggcguggccguuuguaaggugcugcaccuugaaggugaggucaacaaaaucaagagugcguugcuguccacaaauaaagcagugguaucucuaagcaacgggguuuccgugcucacuuucaagguccuggaccuuaaaaauuauauugauaagcaacuguugccaauccucaacaaacagucaugcaguauuagcaacaucgaaaccgugauagaguuucagcagaagaauaaccggcuguuagagauuacacgcgaguucucugugaaugccggagucaccacgccgguuuccacuuacaugcugacaaacucagaacuccuuagccugaucaaugacaugcccauuaccaacgaucaaaagaaauugaugaguaauaacgugcagaucguaagacagcagucuuauuccaucauguguauuauaaaggaagaggugcuagcuuacgucgugcaacugccucucuacggcguuaucgacacuccaugcuggaaacugcauacaagcccccuuuguaccacgaauaccaaggaaggcucgaacauuugccugacaaggacugaucgggggugguauugugacaaugccggaucuguguccuuuuucccucaggcagagaccugcaaaguccagucaaaccgcguguuuugugauacaaugaauaguuugacucucccaagcgagguaaaccugugcaauguugacaucuucaaccccaaguacgauugcaagauaaugaccuccaaaacagacgugucuagcucagucauuaccaguuuaggugcuaucguguccuguuauggcaagacuaaaugcacggccagcaacaagaaucgagggaucauuaaaacauuuucuaacggaugugauuacgucucaaauaagggcguggacaccguuaguguggguaacacucuguauuacguaaauaagcaagaagggaaaagccuauaugucaagggagagccuaucauuaacuucuacgacccacucguguucccguccgaugaauuugacgcgucuauaucgcagguuaaugagaaaaucaaccagagccuggccuucauuagaaaguccgaugaacuuuugcacaaugugaacgcaggcaaaucaaccacaaauaucaugaucaccacuauuauaaucgucauuaucgugauucugcucagucugaucgcuguaggccuucuguuguacugcaaggccaggucuacacccgugacgcucagcaaggaccagcuguccgggauaaacaauaucgcuuuuucaaacuga

SEQ ID NO: 14566 - RNA, 1662 nt, Artificial Sequence
  HRSV-A/A2__P03420.1 fusion glycoprotein CDS human (F-del_DSCav1)
auggagcugcucauccuuaaggccaacgcuauuaccacaauacugacugcagugacguucugcuuugccagcggccagaauaucaccgaagaguucuaccaauccacauguucugcggucucaaaaggguauuugagugcuuuaagaacuggaugguacaccagcguuauuacaaucgaacuguccaacauuaaggagaauaaaugcaacgguaccgacgccaaggugaaacuaaucaagcaggaacucgauaaguauaaaaaugcaguaacugagcugcagcuucugaugcagucuacacccgccaccaacaauagggcucggcgcgaguugccucgauuuaugaacuacacgcucaauaacgcaaagaaaacuaaugugacccugucgaagaaacguaagagaagguuccugggcuuucucuuaggggucggaucagccauagcuagcggcguggccguuuguaaggugcugcaccuugaaggugaggucaacaaaaucaagagugcguugcuguccacaaauaaagcagugguaucucuaagcaacgggguuuccgugcucacuuucaagguccuggaccuuaaaaauuauauugauaagcaacuguugccaauccucaacaaacagucaugcaguauuagcaacaucgaaaccgugauagaguuucagcagaagaauaaccggcuguuagagauuacacgcgaguucucugugaaugccggagucaccacgccgguuuccacuuacaugcugacaaacucagaacuccuuagccugaucaaugacaugcccauuaccaacgaucaaaagaaauugaugaguaauaacgugcagaucguaagacagcagucuuauuccaucauguguauuauaaaggaagaggugcuagcuuacgucgugcaacugccucucuacggcguuaucgacacuccaugcuggaaacugcauacaagcccccuuuguaccacgaauaccaaggaaggcucgaacauuugccugacaaggacugaucgggggugguauugugacaaugccggaucuguguccuuuuucccucaggcagagaccugcaaaguccagucaaaccgcguguuuugugauacaaugaauaguuugacucucccaagcgagguaaaccugugcaauguugacaucuucaaccccaaguacgauugcaagauaaugaccuccaaaacagacgugucuagcucagucauuaccaguuuaggugcuaucguguccuguuauggcaagacuaaaugcacggccagcaacaagaaucgagggaucauuaaaacauuuucuaacggaugugauuacgucucaaauaagggcguggacaccguuaguguggguaacacucuguauuacguaaauaagcaagaagggaaaagccuauaugucaagggagagccuaucauuaacuucuacgacccacucguguucccguccgaugaauuugacgcgucuauaucgcagguuaaugagaaaaucaaccagagccuggccuucauuagaaaguccgaugaacuuuugcacaaugugaacgcaggcaaaucaaccacaaauaucaugaucaccacuauuauaaucgucauuaucgugauucugcucagucugaucgcuguaggccuucuguuguacugcaaggccagguga

SEQ ID NO: 14567 - RNA, 1608 nt, Artificial Sequence
  HRSV-A/A2__P03420.1 fusion glycoprotein CDS human (F_DSCav1_mut4)
auggagcugcucauccuuaaggccaacgcuauuaccacaauacugacugcagugacguucugcuuugccagcggccagaauaucaccgaagaguucuaccaauccacauguucugcggucucaaaaggguauuugagugcuuuaagaacuggaugguacaccagcguuauuacaaucgaacuguccaacauuaaggagaauaaaugcaacgguaccgacgccaaggugaaacuaaucaagcaggaacucgauaaguauaaaaaugcaguaacugagcugcagcuucugaugcagucuacacccgccaccggcucggggucagcuauauguagcggaguggcagucugcaagguguugcaccucgagggcgaaguuaacaaaaucaagagugcccugcuguccacgaauaaagcuguggucucucucagcaacgguguguccguauuaacuuuuaagguucuggaccuuaagaauuacauugauaaacaauugcugccuauccuaaacaagcagucauguaguauuagcaauaucgagaccgugauagaguuccagcagaaaaacaauaggcuccuggaaauuacacgggaguuuucugucaacgccggggugacuaccccaguguccacauauaugcuuaccaauucagaacuguugagccucaucaacgacaugccgauuacgaacgaucaaaagaaacugaugaguaauaacguccagaucguucgccagcagucuuacuccaucaugugcauuauaaaggaggaaguguuagcguauguagugcaacugccccucuacggagucaucgacacuccuuguuggaaacuucauacaagcccacugugcaccacuaauacaaaggagggcucgaacauuuguuugacccgaacggaucguggcugguacugcgacaaugcagggucuguguccuucuuuccccaggccgaaaccuguaagguucagucaaacagaguguucugcgauacaaugaauaguaggacucuaccuagcgaggucaaccugugcaauguggacaucuuuaacccaaaauaugauuguaagauaaugaccuccaaaacagacguaucuagcucaguuauuaccagucucggagcuaucguguccugcuacgguaagacuaaauguacagccagcaauaagaaccggggcaucauuaagaccuucucuaaugggugcgauuaugucucaaacaaaggaguggacacugucagugugggcaauacgcuguacuguguuaacaagcaagaggguaaaagccuuuaugugaagggggaacccaucauuaacuuuuacgacccucugguauucccauccgaugaguuugacgcaucuauaucgcaggucaaugagaaaaucaaccagagcuuggcuuucauucgcaaguccgaugaacuccugcacaaugugaacgccggaaagucaacaaccaauaucaugaucacuaccauuauaaucguuauuaucgugauuuuacugagucuaaucgcggucggccuccugcuuuauugcaaagccagaucuacaccggugaccuugagcaaggaccagcuguccggcauaaacaauaucgcauucucaaacuga

SEQ ID NO: 14568 - RNA, 1545 nt, Artificial Sequence
  HRSV-A/A2__P03420.1 fusion glycoprotein CDS human (F-del_DSCav1_mut4)
auggagcugcucauccuuaaggccaacgcuauuaccacaauacugacugcagugacguucugcuuugccagcggccagaauaucaccgaagaguucuaccaauccacauguucugcggucucaaaaggguauuugagugcuuuaagaacuggaugguacaccagcguuauuacaaucgaacuguccaacauuaaggagaauaaaugcaacgguaccgacgccaaggugaaacuaaucaagcaggaacucgauaaguauaaaaaugcaguaacugagcugcagcuucugaugcagucuacacccgccaccggcucggggucagcuauauguagcggaguggcagucugcaagguguugcaccucgagggcgaaguuaacaaaaucaagagugcccugcuguccacgaauaaagcuguggucucucucagcaacgguguguccguauuaacuuuuaagguucuggaccuuaagaauuacauugauaaacaauugcugccuauccuaaacaagcagucauguaguauuagcaauaucgagaccgugauagaguuccagcagaaaaacaauaggcuccuggaaauuacacgggaguuuucugucaacgccggggugacuaccccaguguccacauauaugcuuaccaauucagaacuguugagccucaucaacgacaugccgauuacgaacgaucaaaagaaacugaugaguaauaacguccagaucguucgccagcagucuuacuccaucaugugcauuauaaaggaggaaguguuagcguauguagugcaacugccccucuacggagucaucgacacuccuuguuggaaacuucauacaagcccacugugcaccacuaauacaaaggagggcucgaacauuuguuugacccgaacggaucguggcugguacugcgacaaugcagggucuguguccuucuuuccccaggccgaaaccuguaagguucagucaaacagaguguucugcgauacaaugaauaguaggacucuaccuagcgaggucaaccugugcaauguggacaucuuuaacccaaaauaugauuguaagauaaugaccuccaaaacagacguaucuagcucaguuauuaccagucucggagcuaucguguccugcuacgguaagacuaaauguacagccagcaauaagaaccggggcaucauuaagaccuucucuaaugggugcgauuaugucucaaacaaaggaguggacacugucagugugggcaauacgcuguacuguguuaacaagcaagaggguaaaagccuuuaugugaagggggaacccaucauuaacuuuuacgacccucugguauucccauccgaugaguuugacgcaucuauaucgcaggucaaugagaaaaucaaccagagcuuggcuuucauucgcaaguccgaugaacuccugcacaaugugaacgccggaaagucaacaaccaauaucaugaucacuaccauuauaaucguuauuaucgugauuuuacugagucuaaucgcggucggccuccugcuuuauugcaaagccagauga

SEQ ID NO: 14569 - RNA, 1611 nt, Artificial Sequence
  HRSV-A/A2__P03420.1 fusion glycoprotein CDS human (F_DSCav1_mut5)
auggagcugcucauccuuaaggccaacgcuauuaccacaauacugacugcagugacguucugcuuugccagcggccagaauaucaccgaagaguucuaccaauccacauguucugcggucucaaaaggguauuugagugcuuuaagaacuggaugguacaccagcguuauuacaaucgaacuguccaacauuaaggagaauaaaugcaacgguaccgacgccaaggugaaacuaaucaagcaggaacucgauaaguauaaaaaugcaguaacugagcugcagcuucugaugcagucuacacccgccaccggcucggggucagcuauagcaagcggaguggccgucuguaagguguugcaccucgagggcgaaguuaacaaaaucaagagugcucugcuguccacgaauaaagccguggucucucucagcgguugcgggguguccguauuaacuuuuaagguucuggaccuuaagaacuacauugauaaacaauugcugccuauccuaaauaagcagucauguaguauuagcaacaucgagaccgugauagaguuccagcagaaaaauaacaggcuccuggaaauuacacgggaguuuucugucaaugcgggagugacuaccccaguguccacauauaugcuuaccaacucagaacuguugagccucaucaaugacaugccgauuacgaacgaucaaaagaaacugaugaguaacaauguccagaucguucgccagcagucuuacuccaucaugugcauuauaaaggaggaaguguuagcauauguagugcaacugccccucuacggcgucaucgacacuccuuguuggaaacuucauacaagcccacugugcaccacuaacacaaaggagggcucgaauauuuguuugacccgaacggaucgugggugguacugcgacaacgccggaucuguguccuucuuuccccaggcugaaaccuguaagguucagucaaauagaguguucugcgauacaaugaacaguaggacucuaccuagcgaggucaaucugugcaacguggacaucuuuaauccaaaauaugauuguaagauaaugaccuccaaaacagacguaucuagcucaguuauuaccagucucggugccaucguguccugcuacggcaagacuaaauguacagcaagcaacaagugccgggggaucauuaagaccuucucuaauggaugugauuaugucucaaacaaaggcguggacacugucaguguggguaauacgcuguacuauguuaacaagcaagaggggaaaagccuuuacgugaagggagaacccaucauuaauuuuuaugacccucugguauucccauccgaugaguuugacgcuucuauaucgcaggucaacgagaaaaucaaccagagcuuggccuucauucgcaaguccgaugaacuccugcacaaugugaacgcgggcaagucaacaaccaauaucaugaucacuaccauuauaaucguuauuaucgugauuuuacugagucuaaucgccgucggccuccugcuuuacugcaaagcaagaucuacaccggugaccuugagcaaggaccagcuguccgggauaaacaauaucgcuuucucaaacuga

SEQ ID NO: 14570 - RNA, 1548 nt, Artificial Sequence
  HRSV-A/A2__P03420.1 fusion glycoprotein CDS human (F-del_DSCav1_mut5)
auggagcugcucauccuuaaggccaacgcuauuaccacaauacugacugcagugacguucugcuuugccagcggccagaauaucaccgaagaguucuaccaauccacauguucugcggucucaaaaggguauuugagugcuuuaagaacuggaugguacaccagcguuauuacaaucgaacuguccaacauuaaggagaauaaaugcaacgguaccgacgccaaggugaaacuaaucaagcaggaacucgauaaguauaaaaaugcaguaacugagcugcagcuucugaugcagucuacacccgccaccggcucggggucagcuauagcaagcggaguggccgucuguaagguguugcaccucgagggcgaaguuaacaaaaucaagagugcucugcuguccacgaauaaagccguggucucucucagcgguugcgggguguccguauuaacuuuuaagguucuggaccuuaagaacuacauugauaaacaauugcugccuauccuaaauaagcagucauguaguauuagcaacaucgagaccgugauagaguuccagcagaaaaauaacaggcuccuggaaauuacacgggaguuuucugucaaugcgggagugacuaccccaguguccacauauaugcuuaccaacucagaacuguugagccucaucaaugacaugccgauuacgaacgaucaaaagaaacugaugaguaacaauguccagaucguucgccagcagucuuacuccaucaugugcauuauaaaggaggaaguguuagcauauguagugcaacugccccucuacggcgucaucgacacuccuuguuggaaacuucauacaagcccacugugcaccacuaacacaaaggagggcucgaauauuuguuugacccgaacggaucgugggugguacugcgacaacgccggaucuguguccuucuuuccccaggcugaaaccuguaagguucagucaaauagaguguucugcgauacaaugaacaguaggacucuaccuagcgaggucaaucugugcaacguggacaucuuuaauccaaaauaugauuguaagauaaugaccuccaaaacagacguaucuagcucaguuauuaccagucucggugccaucguguccugcuacggcaagacuaaauguacagcaagcaacaagugccgggggaucauuaagaccuucucuaauggaugugauuaugucucaaacaaaggcguggacacugucaguguggguaauacgcuguacuauguuaacaagcaagaggggaaaagccuuuacgugaagggagaacccaucauuaauuuuuaugacccucugguauucccauccgaugaguuugacgcuucuauaucgcaggucaacgagaaaaucaaccagagcuuggccuucauucgcaaguccgaugaacuccugcacaaugugaacgcgggcaagucaacaaccaauaucaugaucacuaccauuauaaucguuauuaucgugauuuuacugagucuaaucgccgucggccuccugcuuuacugcaaagcaagauga

SEQ ID NO: 14571 - RNA, 585 nt, Artificial Sequence
  HRSV-A/A2__AAB86665.1 matrix protein CDS human (M2-1)
augagcagaaggaaccccugcaaguucgagauccggggccacugucugaaugggaaacgcugccauuuuucccacaacuacuucgaauggccuccacaugcacuccuugugcgacagaauuuuaugcugaaccguauuuugaagucuauggacaaaucaauagauaccuuaagugagaucagcggagcugcagaacuggacagaacagaggaauaugcccuaggugucguuggcgugcucgaguccuacauugggucuaucaauaacauuacuaagcaaucggcguguguagcuaugucaaaacugcuuacggagcugaauagcgaugacaucaagaaguugagggauaacgaagaguuaaauaguccgaaaauacggguguauaacaccgucaucuccuacauugaaucuaaucgcaagaacaauaaacagacaauccaucugcugaagagacuccccgccgacgugcucaaaaagacuauuaagaacacccuggauauccacaaaagcauaacaauuaauaacccuaaggaguccaccguuucagacacuaacgaucacgccaaaaauaacgacacaaccuga

SEQ ID NO: 14572 - RNA, 1997 nt, Artificial Sequence
  HRSV-A/RSVA/Homo sapiens/USA/84I-215A-01/1984__AHY21375.1 fusion glycoprotein mRNA gc (F0)
aggagagucccgcagucggcguccagcggcucugcuuguucgugugugugucguugcaggccuuauucaagcuuaccauggagcugcccauccucaagaccaacgccaucaccacgauccuggccgcggugacccugugcuucgccagcucccagaacaucaccgaggaguucuaccagagcacgugcuccgccgucagcaagggcuaccucuccgcccugcgcaccgggugguacaccagcgugaucaccaucgagcuguccaacaucaaggagaacaagugcaacggcaccgacgccaaggugaagcucaucaagcaggagcuggacaaguacaagaacgcggucacggagcugcagcuccugaugcagagcaccccggccgccaacaaccgggcccgccgggagcugccccgcuucaugaacuacacccucaacaacaccaagaacacgaacgugacccuguccaagaagcggaagcgccgguuccugggguuccuccugggcguggggagcgcgaucgccuccggcaucgccgucagcaaggugcugcaccucgagggcgaggugaacaagaucaaguccgcccugcugagcaccaacaaggccgucgugucccucagcaacgggguguccguccugaccagcaaggugcuggaccucaagaacuacaucgacaagcagcugcugcccaucgugaacaagcaguccugcagcaucagcaacaucgagacggucaucgaguuccagcagaagaacaaccgccuccuggagaucacccgggaguucuccgugaacgcgggcgugaccacccccgucagcacguacaugcugaccaacuccgagcuccugagccugaucaacgacaugccgaucaccaacgaccagaagaagcucauguccaacaacgugcagaucgugcgccagcagagcuacuccaucaugagcaucaucaaggaggagguccuggccuacguggugcagcugccccucuacggggucaucgacacccccugcuggaagcugcacacgagcccccugugcaccaccaacaccaaggagggcagcaacaucugccucacgcggaccgaccgcgggugguacugcgacaacgccggcuccgugagcuucuucccgcaggccgagaccugcaagguccaguccaaccggguguucugcgacaccaugaacagccugacgcugcccuccgaggugaaccucugcaacaucgacaucuucaaccccaaguacgacugcaagaucaugaccagcaagaccgacgucuccagcuccgugaucaccagccugggcgccaucgugagcugcuacgggaagacgaagugcaccgcguccaacaagaaccgcggcaucaucaagaccuucagcaacgggugcgacuacgucuccaacaagggcguggacaccgugagcgucggcaacacccuguacuacgugaacaagcaggaggggaagucccucuacgugaagggcgagcccaucaucaacuucuacgacccgcuggucuuccccagcgacgaguucgacgccuccaucagccaggugaacgagaagaucaaccagucccuggccuucauccggaaguccgacgagcugcuccacaacgugaacgccgggaaguccacgaccaacaucaugaucaccaccaucaucaucgucaucaucgugauccugcugagccucaucgccgugggccugcugcucuacugcaaggcgcgcuccacgcccgucacccugagcaaggaccagcuguccgggaucaacaacaucgccuucagcaacugaggacuagucccuguucccagagcccacuuuuuuuucuuuuuuugaaauaaaauagccugucuuucagaucucaaaggcucuuuucagagccaccaaaaaaaaaaaaaaaaaaaaaaaaaaaaaaaaaaaaaaaaaaaaaaaaaaaaaaaaaaaaaaaaaaaaaaaaaaaaaaaaaaaaaaaaaaaaaaaaaaaaa

SEQ ID NO: 14573 - RNA, 1997 nt, Artificial Sequence
  HRSV-A/A2__P03420.1 fusion glycoprotein mRNA gc (F0)
aggagagucccgcagucggcguccagcggcucugcuuguucgugugugugucguugcaggccuuauucaagcuuaccauggagcugcucauccugaaggccaacgccaucaccaccauccugacggcggugaccuucugcuucgccagcggccagaacaucaccgaggaguucuaccaguccaccugcagcgccgucuccaagggguaccucagcgcccugcggacgggcugguacaccuccgugaucaccaucgagcugagcaacaucaaggagaacaagugcaacgggaccgacgccaaggugaagcucaucaagcaggagcuggacaaguacaagaacgcggucacggagcugcagcuccugaugcaguccaccccggcaaccaacaaccgcgcccggcgcgagcugccccgguucaugaacuacacccucaacaacgccaagaagacgaacgugacccugagcaagaagcgcaagcggcgcuuccugggcuuccuccugggggugggcuccgccaucgcgagcggcgucgccguguccaaggugcugcaccucgagggggaggucaacaagaucaagagcgcccugcuguccaccaacaaggccguggugagccucuccaacggcgucagcgugcugaccuccaaggugcuggaccucaagaacuacaucgacaagcagcugcugcccaucgucaacaagcagagcugcuccaucagcaacaucgagacggugaucgaguuccagcagaagaacaaccggcuccuggagaucacccgcgaguucagcgugaacgccggggucaccacccccguguccacguacaugcugaccaacagcgagcuccugucccugaucaacgacaugccgaucaccaacgaccagaagaagcucaugagcaacaacgugcagaucguccggcagcaguccuacagcaucauguccaucaucaaggaggaggugcuggcguacgugguccagcugccccucuacggcgugaucgacacccccugcuggaagcugcacacgagcccccugugcaccaccaacaccaaggagggguccaacaucugccucacgcgcaccgaccggggcugguacugcgacaacgccggcagcgucuccuucuucccgcaggccgagaccugcaaggugcagagcaaccgcguguucugcgacaccaugaacucccugacgcugcccagcgagguaaaccucugcaacgucgacaucuucaaccccaaguacgacugcaagaucaugaccuccaagaccgacgugagcuccagcgugaucaccucccugggggccaucgucagcugcuacggcaagacgaagugcaccgccagcaacaagaaccgggggaucaucaagaccuucuccaacggcugcgacuacgugagcaacaagggcguggacaccguguccgucgggaacacccuguacuacgugaacaagcaggagggcaagagccucuacgugaagggggagcccaucaucaacuucuacgacccgcuggucuuccccuccgacgaguucgacgcgagcaucucccaggugaacgagaagaucaaccagagccuggccuucauccgcaaguccgacgagcugcuccacaacgugaacgccggcaagagcacgaccaacaucaugaucaccaccaucaucaucgucaucaucgugauccugcugucccucaucgccguggggcugcugcucuacugcaaggcccggagcacgcccgucacccuguccaaggaccagcugagcggcaucaacaacaucgcguucuccaacugaggacuagucccuguucccagagcccacuuuuuuuucuuuuuuugaaauaaaauagccugucuuucagaucucaaaggcucuuuucagagccaccaaaaaaaaaaaaaaaaaaaaaaaaaaaaaaaaaaaaaaaaaaaaaaaaaaaaaaaaaaaaaaaaaaaaaaaaaaaaaaaaaaaaaaaaaaaaaaaaaaaaa

SEQ ID NO: 14574 - RNA, 1934 nt, Artificial Sequence
  HRSV-A/A2__P03420.1 fusion glycoprotein mRNA gc (F-del)
aggagagucccgcagucggcguccagcggcucugcuuguucgugugugugucguugcaggccuuauucaagcuuaccauggagcugcucauccugaaggccaacgccaucaccaccauccugacggcggugaccuucugcuucgccagcggccagaacaucaccgaggaguucuaccaguccaccugcagcgccgucuccaagggguaccucagcgcccugcggacgggcugguacaccuccgugaucaccaucgagcugagcaacaucaaggagaacaagugcaacgggaccgacgccaaggugaagcucaucaagcaggagcuggacaaguacaagaacgcggucacggagcugcagcuccugaugcaguccaccccggcaaccaacaaccgcgcccggcgcgagcugccccgguucaugaacuacacccucaacaacgccaagaagacgaacgugacccugagcaagaagcgcaagcggcgcuuccugggcuuccuccugggggugggcuccgccaucgcgagcggcgucgccguguccaaggugcugcaccucgagggggaggucaacaagaucaagagcgcccugcuguccaccaacaaggccguggugagccucuccaacggcgucagcgugcugaccuccaaggugcuggaccucaagaacuacaucgacaagcagcugcugcccaucgucaacaagcagagcugcuccaucagcaacaucgagacggugaucgaguuccagcagaagaacaaccggcuccuggagaucacccgcgaguucagcgugaacgccggggucaccacccccguguccacguacaugcugaccaacagcgagcuccugucccugaucaacgacaugccgaucaccaacgaccagaagaagcucaugagcaacaacgugcagaucguccggcagcaguccuacagcaucauguccaucaucaaggaggaggugcuggcguacgugguccagcugccccucuacggcgugaucgacacccccugcuggaagcugcacacgagcccccugugcaccaccaacaccaaggagggguccaacaucugccucacgcgcaccgaccggggcugguacugcgacaacgccggcagcgucuccuucuucccgcaggccgagaccugcaaggugcagagcaaccgcguguucugcgacaccaugaacucccugacgcugcccagcgagguaaaccucugcaacgucgacaucuucaaccccaaguacgacugcaagaucaugaccuccaagaccgacgugagcuccagcgugaucaccucccugggggccaucgucagcugcuacggcaagacgaagugcaccgccagcaacaagaaccgggggaucaucaagaccuucuccaacggcugcgacuacgugagcaacaagggcguggacaccguguccgucgggaacacccuguacuacgugaacaagcaggagggcaagagccucuacgugaagggggagcccaucaucaacuucuacgacccgcuggucuuccccuccgacgaguucgacgcgagcaucucccaggugaacgagaagaucaaccagagccuggccuucauccgcaaguccgacgagcugcuccacaacgugaacgccggcaagagcacgaccaacaucaugaucaccaccaucaucaucgucaucaucgugauccugcugucccucaucgccguggggcugcugcucuacugcaaggcccggugaggacuagucccuguucccagagcccacuuuuuuuucuuuuuuugaaauaaaauagccugucuuucagaucucaaaggcucuuuucagagccaccaaaaaaaaaaaaaaaaaaaaaaaaaaaaaaaaaaaaaaaaaaaaaaaaaaaaaaaaaaaaaaaaaaaaaaaaaaaaaaaaaaaaaaaaaaaaaaaaaaaaa

SEQ ID NO: 14575 - RNA, 1997 nt, Artificial Sequence
  HRSV-A/A2__P03420.1 fusion glycoprotein mRNA gc (F0_DSCav1)
aggagagucccgcagucggcguccagcggcucugcuuguucgugugugugucguugcaggccuuauucaagcuuaccauggagcugcucauccugaaggccaacgccaucaccaccauccugacggcggugaccuucugcuucgccagcggccagaacaucaccgaggaguucuaccaguccacgugcagcgccgucuccaagggguaccucagcgcccugcggaccggcugguacaccuccgugaucaccaucgagcugagcaacaucaaggagaacaagugcaacgggaccgacgccaaggugaagcucaucaagcaggagcuggacaaguacaagaacgcggucacggagcugcagcuccugaugcaguccaccccggcaaccaacaaccgcgcccggcgcgagcugccccgguucaugaacuacacccucaacaacgccaagaagacgaacgugacccugagcaagaagcgcaagcggcgcuuccugggcuuccuccugggggugggcuccgccaucgcgagcggcgucgccgugugcaaggugcugcaccucgagggggaggucaacaagaucaagagcgcccugcuguccaccaacaaggccguggugagccucuccaacggcgucagcgugcugaccuucaaggugcuggaccucaagaacuacaucgacaagcagcugcugcccauccugaacaagcagagcugcuccaucagcaacaucgagacggugaucgaguuccagcagaagaacaaccggcuccuggagaucacccgcgaguucagcgugaacgccggggucaccacccccguguccacguacaugcugaccaacagcgagcuccugucccugaucaacgacaugccgaucaccaacgaccagaagaagcucaugagcaacaacgugcagaucguccggcagcaguccuacagcaucaugugcaucaucaaggaggaggugcuggcguacgugguccagcugccccucuacggcgugaucgacacccccugcuggaagcugcacacgagcccccugugcaccaccaacaccaaggagggguccaacaucugccucacgcgcaccgaccggggcugguacugcgacaacgccggcagcgucuccuucuucccgcaggccgagaccugcaaggugcagagcaaccgcguguucugcgacaccaugaacucccugacgcugcccagcgagguaaaccucugcaacgucgacaucuucaaccccaaguacgacugcaagaucaugaccuccaagaccgacgugagcuccagcgugaucaccucccugggggccaucgucagcugcuacggcaagacgaagugcaccgccagcaacaagaaccgggggaucaucaagaccuucuccaacggcugcgacuacgugagcaacaagggcguggacaccguguccgucgggaacacccuguacuacgugaacaagcaggagggcaagagccucuacgugaagggggagcccaucaucaacuucuacgacccgcuggucuuccccuccgacgaguucgacgcgagcaucucccaggugaacgagaagaucaaccagagccuggccuucauccgcaaguccgacgagcugcuccacaacgugaacgccggcaagagcacgaccaacaucaugaucaccaccaucaucaucgucaucaucgugauccugcugucccucaucgccguggggcugcugcucuacugcaaggcccggagcacgcccgucacccuguccaaggaccagcugagcggcaucaacaacaucgcguucuccaacugaggacuagucccuguucccagagcccacuuuuuuuucuuuuuuugaaauaaaauagccugucuuucagaucucaaaggcucuuuucagagccaccaaaaaaaaaaaaaaaaaaaaaaaaaaaaaaaaaaaaaaaaaaaaaaaaaaaaaaaaaaaaaaaaaaaaaaaaaaaaaaaaaaaaaaaaaaaaaaaaaaaaa

SEQ ID NO: 14576 - RNA, 1934 nt, Artificial Sequence
  HRSV-A/A2__P03420.1 fusion glycoprotein mRNA gc (F-del_DSCav1)
aggagagucccgcagucggcguccagcggcucugcuuguucgugugugugucguugcaggccuuauucaagcuuaccauggagcugcucauccugaaggccaacgccaucaccaccauccugacggcggugaccuucugcuucgccagcggccagaacaucaccgaggaguucuaccaguccacgugcagcgccgucuccaagggguaccucagcgcccugcggaccggcugguacaccuccgugaucaccaucgagcugagcaacaucaaggagaacaagugcaacgggaccgacgccaaggugaagcucaucaagcaggagcuggacaaguacaagaacgcggucacggagcugcagcuccugaugcaguccaccccggcaaccaacaaccgcgcccggcgcgagcugccccgguucaugaacuacacccucaacaacgccaagaagacgaacgugacccugagcaagaagcgcaagcggcgcuuccugggcuuccuccugggggugggcuccgccaucgcgagcggcgucgccgugugcaaggugcugcaccucgagggggaggucaacaagaucaagagcgcccugcuguccaccaacaaggccguggugagccucuccaacggcgucagcgugcugaccuucaaggugcuggaccucaagaacuacaucgacaagcagcugcugcccauccugaacaagcagagcugcuccaucagcaacaucgagacggugaucgaguuccagcagaagaacaaccggcuccuggagaucacccgcgaguucagcgugaacgccggggucaccacccccguguccacguacaugcugaccaacagcgagcuccugucccugaucaacgacaugccgaucaccaacgaccagaagaagcucaugagcaacaacgugcagaucguccggcagcaguccuacagcaucaugugcaucaucaaggaggaggugcuggcguacgugguccagcugccccucuacggcgugaucgacacccccugcuggaagcugcacacgagcccccugugcaccaccaacaccaaggagggguccaacaucugccucacgcgcaccgaccggggcugguacugcgacaacgccggcagcgucuccuucuucccgcaggccgagaccugcaaggugcagagcaaccgcguguucugcgacaccaugaacucccugacgcugcccagcgagguaaaccucugcaacgucgacaucuucaaccccaaguacgacugcaagaucaugaccuccaagaccgacgugagcuccagcgugaucaccucccugggggccaucgucagcugcuacggcaagacgaagugcaccgccagcaacaagaaccgggggaucaucaagaccuucuccaacggcugcgacuacgugagcaacaagggcguggacaccguguccgucgggaacacccuguacuacgugaacaagcaggagggcaagagccucuacgugaagggggagcccaucaucaacuucuacgacccgcuggucuuccccuccgacgaguucgacgcgagcaucucccaggugaacgagaagaucaaccagagccuggccuucauccgcaaguccgacgagcugcuccacaacgugaacgccggcaagagcacgaccaacaucaugaucaccaccaucaucaucgucaucaucgugauccugcugucccucaucgccguggggcugcugcucuacugcaaggcccggugaggacuagucccuguucccagagcccacuuuuuuuucuuuuuuugaaauaaaauagccugucuuucagaucucaaaggcucuuuucagagccaccaaaaaaaaaaaaaaaaaaaaaaaaaaaaaaaaaaaaaaaaaaaaaaaaaaaaaaaaaaaaaaaaaaaaaaaaaaaaaaaaaaaaaaaaaaaaaaaaaaaaa

SEQ ID NO: 14577 - RNA, 1880 nt, Artificial Sequence
  HRSV-A/A2__P03420.1 fusion glycoprotein mRNA gc (F_DSCav1_mut4)
aggagagucccgcagucggcguccagcggcucugcuuguucgugugugugucguugcaggccuuauucaagcuuaccauggagcugcucauccugaaggccaacgccaucaccaccauccugacggcggugaccuucugcuucgccagcggccagaacaucaccgaggaguucuaccaguccacgugcagcgccgucuccaagggguaccucagcgcccugcggaccggcugguacaccuccgugaucaccaucgagcugagcaacaucaaggagaacaagugcaacgggaccgacgccaaggugaagcucaucaagcaggagcuggacaaguacaagaacgcggucacggagcugcagcuccugaugcaguccaccccggcaaccggcuccggcuccgccaucugcagcggcgucgccgugugcaaggugcugcaccucgagggggaggucaacaagaucaagagcgcccugcuguccaccaacaaggccguggugagccucuccaacggcgucagcgugcugaccuucaaggugcuggaccucaagaacuacaucgacaagcagcugcugcccauccugaacaagcagagcugcuccaucagcaacaucgagacggugaucgaguuccagcagaagaacaaccggcuccuggagaucacccgcgaguucagcgugaacgccggggucaccacccccguguccacguacaugcugaccaacagcgagcuccugucccugaucaacgacaugccgaucaccaacgaccagaagaagcucaugagcaacaacgugcagaucguccggcagcaguccuacagcaucaugugcaucaucaaggaggaggugcuggcguacgugguccagcugccccucuacggcgugaucgacacccccugcuggaagcugcacacgagcccccugugcaccaccaacaccaaggagggguccaacaucugccucacgcgcaccgaccggggcugguacugcgacaacgccggcagcgucuccuucuucccgcaggccgagaccugcaaggugcagagcaaccgcguguucugcgacaccaugaacucccggacgcugcccagcgagguaaaccucugcaacgucgacaucuucaaccccaaguacgacugcaagaucaugaccuccaagaccgacgugagcuccagcgugaucaccucccugggggccaucgucagcugcuacggcaagacgaagugcaccgccagcaacaagaaccgggggaucaucaagaccuucuccaacggcugcgacuacgugagcaacaagggcguggacaccguguccgucgggaacacccuguacugcgugaacaagcaggagggcaagagccucuacgugaagggggagcccaucaucaacuucuacgacccgcuggucuuccccuccgacgaguucgacgcgagcaucucccaggugaacgagaagaucaaccagagccuggccuucauccgcaaguccgacgagcugcuccacaacgugaacgccggcaagagcacgaccaacaucaugaucaccaccaucaucaucgucaucaucgugauccugcugucccucaucgccguggggcugcugcucuacugcaaggcccggagcacgcccgucacccuguccaaggaccagcugagcggcaucaacaacaucgcguucuccaacugaggacuagucccuguucccagagcccacuuuuuuuucuuuuuuugaaauaaaauagccugucuuucagaucucaaaggcucuuuucagagccaccaaaaaaaaaaaaaaaaaaaaaaaaaaaaaaaaaaaaaaaaaaaaaaaaaaaaaaaaaaaaaaaaaaaaaaaaaaaaaaaaaaaaaaaaaaaaaaaaaaaaa

SEQ ID NO: 14578 - RNA, 1817 nt, Artificial Sequence
  HRSV-A/A2__P03420.1 fusion glycoprotein mRNA gc (F-del_DSCav1_mut4)
aggagagucccgcagucggcguccagcggcucugcuuguucgugugugugucguugcaggccuuauucaagcuuaccauggagcugcucauccugaaggccaacgccaucaccaccauccugacggcggugaccuucugcuucgccagcggccagaacaucaccgaggaguucuaccaguccacgugcagcgccgucuccaagggguaccucagcgcccugcggaccggcugguacaccuccgugaucaccaucgagcugagcaacaucaaggagaacaagugcaacgggaccgacgccaaggugaagcucaucaagcaggagcuggacaaguacaagaacgcggucacggagcugcagcuccugaugcaguccaccccggcaaccggcuccggcuccgccaucugcagcggcgucgccgugugcaaggugcugcaccucgagggggaggucaacaagaucaagagcgcccugcuguccaccaacaaggccguggugagccucuccaacggcgucagcgugcugaccuucaaggugcuggaccucaagaacuacaucgacaagcagcugcugcccauccugaacaagcagagcugcuccaucagcaacaucgagacggugaucgaguuccagcagaagaacaaccggcuccuggagaucacccgcgaguucagcgugaacgccggggucaccacccccguguccacguacaugcugaccaacagcgagcuccugucccugaucaacgacaugccgaucaccaacgaccagaagaagcucaugagcaacaacgugcagaucguccggcagcaguccuacagcaucaugugcaucaucaaggaggaggugcuggcguacgugguccagcugccccucuacggcgugaucgacacccccugcuggaagcugcacacgagcccccugugcaccaccaacaccaaggagggguccaacaucugccucacgcgcaccgaccggggcugguacugcgacaacgccggcagcgucuccuucuucccgcaggccgagaccugcaaggugcagagcaaccgcguguucugcgacaccaugaacucccggacgcugcccagcgagguaaaccucugcaacgucgacaucuucaaccccaaguacgacugcaagaucaugaccuccaagaccgacgugagcuccagcgugaucaccucccugggggccaucgucagcugcuacggcaagacgaagugcaccgccagcaacaagaaccgggggaucaucaagaccuucuccaacggcugcgacuacgugagcaacaagggcguggacaccguguccgucgggaacacccuguacugcgugaacaagcaggagggcaagagccucuacgugaagggggagcccaucaucaacuucuacgacccgcuggucuuccccuccgacgaguucgacgcgagcaucucccaggugaacgagaagaucaaccagagccuggccuucauccgcaaguccgacgagcugcuccacaacgugaacgccggcaagagcacgaccaacaucaugaucaccaccaucaucaucgucaucaucgugauccugcugucccucaucgccguggggcugcugcucuacugcaaggcccggugaggacuagucccuguucccagagcccacuuuuuuuucuuuuuuugaaauaaaauagccugucuuucagaucucaaaggcucuuuucagagccaccaaaaaaaaaaaaaaaaaaaaaaaaaaaaaaaaaaaaaaaaaaaaaaaaaaaaaaaaaaaaaaaaaaaaaaaaaaaaaaaaaaaaaaaaaaaaaaaaaaaaa

SEQ ID NO: 14579 - RNA, 1883 nt, Artificial Sequence
  HRSV-A/A2__P03420.1 fusion glycoprotein mRNA gc (F_DSCav1_mut5)
aggagagucccgcagucggcguccagcggcucugcuuguucgugugugugucguugcaggccuuauucaagcuuaccauggagcugcucauccugaaggccaacgccaucaccaccauccugacggcggugaccuucugcuucgccagcggccagaacaucaccgaggaguucuaccaguccacgugcagcgccgucuccaagggguaccucagcgcccugcggaccggcugguacaccuccgugaucaccaucgagcugagcaacaucaaggagaacaagugcaacgggaccgacgccaaggugaagcucaucaagcaggagcuggacaaguacaagaacgcggucacggagcugcagcuccugaugcaguccaccccggcaaccggcuccggcuccgccaucgcgagcggcgucgccgugugcaaggugcugcaccucgagggggaggucaacaagaucaagagcgcccugcuguccaccaacaaggccguggugagccucuccggcugcggcgucagcgugcugaccuucaaggugcuggaccucaagaacuacaucgacaagcagcugcugcccauccugaacaagcagagcugcuccaucagcaacaucgagacggugaucgaguuccagcagaagaacaaccggcuccuggagaucacccgcgaguucagcgugaacgccggggucaccacccccguguccacguacaugcugaccaacagcgagcuccugucccugaucaacgacaugccgaucaccaacgaccagaagaagcucaugagcaacaacgugcagaucguccggcagcaguccuacagcaucaugugcaucaucaaggaggaggugcuggcguacgugguccagcugccccucuacggcgugaucgacacccccugcuggaagcugcacacgagcccccugugcaccaccaacaccaaggagggguccaacaucugccucacgcgcaccgaccggggcugguacugcgacaacgccggcagcgucuccuucuucccgcaggccgagaccugcaaggugcagagcaaccgcguguucugcgacaccaugaacucccggacgcugcccagcgagguaaaccucugcaacgucgacaucuucaaccccaaguacgacugcaagaucaugaccuccaagaccgacgugagcuccagcgugaucaccucccugggggccaucgucagcugcuacggcaagacgaagugcaccgccagcaacaagugccgggggaucaucaagaccuucuccaacggcugcgacuacgugagcaacaagggcguggacaccguguccgucgggaacacccuguacuacgugaacaagcaggagggcaagagccucuacgugaagggggagcccaucaucaacuucuacgacccgcuggucuuccccuccgacgaguucgacgcgagcaucucccaggugaacgagaagaucaaccagagccuggccuucauccgcaaguccgacgagcugcuccacaacgugaacgccggcaagagcacgaccaacaucaugaucaccaccaucaucaucgucaucaucgugauccugcugucccucaucgccguggggcugcugcucuacugcaaggcccggagcacgcccgucacccuguccaaggaccagcugagcggcaucaacaacaucgcguucuccaacugaggacuagucccuguucccagagcccacuuuuuuuucuuuuuuugaaauaaaauagccugucuuucagaucucaaaggcucuuuucagagccaccaaaaaaaaaaaaaaaaaaaaaaaaaaaaaaaaaaaaaaaaaaaaaaaaaaaaaaaaaaaaaaaaaaaaaaaaaaaaaaaaaaaaaaaaaaaaaaaaaaaaa

SEQ ID NO: 14580 - RNA, 1820 nt, Artificial Sequence
  HRSV-A/A2__P03420.1 fusion glycoprotein mRNA gc (F-del_DSCav1_mut5) R8898
aggagagucccgcagucggcguccagcggcucugcuuguucgugugugugucguugcaggccuuauucaagcuuaccauggagcugcucauccugaaggccaacgccaucaccaccauccugacggcggugaccuucugcuucgccagcggccagaacaucaccgaggaguucuaccaguccacgugcagcgccgucuccaagggguaccucagcgcccugcggaccggcugguacaccuccgugaucaccaucgagcugagcaacaucaaggagaacaagugcaacgggaccgacgccaaggugaagcucaucaagcaggagcuggacaaguacaagaacgcggucacggagcugcagcuccugaugcaguccaccccggcaaccggcuccggcuccgccaucgcgagcggcgucgccgugugcaaggugcugcaccucgagggggaggucaacaagaucaagagcgcccugcuguccaccaacaaggccguggugagccucuccggcugcggcgucagcgugcugaccuucaaggugcuggaccucaagaacuacaucgacaagcagcugcugcccauccugaacaagcagagcugcuccaucagcaacaucgagacggugaucgaguuccagcagaagaacaaccggcuccuggagaucacccgcgaguucagcgugaacgccggggucaccacccccguguccacguacaugcugaccaacagcgagcuccugucccugaucaacgacaugccgaucaccaacgaccagaagaagcucaugagcaacaacgugcagaucguccggcagcaguccuacagcaucaugugcaucaucaaggaggaggugcuggcguacgugguccagcugccccucuacggcgugaucgacacccccugcuggaagcugcacacgagcccccugugcaccaccaacaccaaggagggguccaacaucugccucacgcgcaccgaccggggcugguacugcgacaacgccggcagcgucuccuucuucccgcaggccgagaccugcaaggugcagagcaaccgcguguucugcgacaccaugaacucccggacgcugcccagcgagguaaaccucugcaacgucgacaucuucaaccccaaguacgacugcaagaucaugaccuccaagaccgacgugagcuccagcgugaucaccucccugggggccaucgucagcugcuacggcaagacgaagugcaccgccagcaacaagugccgggggaucaucaagaccuucuccaacggcugcgacuacgugagcaacaagggcguggacaccguguccgucgggaacacccuguacuacgugaacaagcaggagggcaagagccucuacgugaagggggagcccaucaucaacuucuacgacccgcuggucuuccccuccgacgaguucgacgcgagcaucucccaggugaacgagaagaucaaccagagccuggccuucauccgcaaguccgacgagcugcuccacaacgugaacgccggcaagagcacgaccaacaucaugaucaccaccaucaucaucgucaucaucgugauccugcugucccucaucgccguggggcugcugcucuacugcaaggcccggugaggacuagucccuguucccagagcccacuuuuuuuucuuuuuuugaaauaaaauagccugucuuucagaucucaaaggcucuuuucagagccaccaaaaaaaaaaaaaaaaaaaaaaaaaaaaaaaaaaaaaaaaaaaaaaaaaaaaaaaaaaaaaaaaaaaaaaaaaaaaaaaaaaaaaaaaaaaaaaaaaaaaa

SEQ ID NO: 14581 - RNA, 857 nt, Artificial Sequence
  HRSV-A/A2__AAB86665.1 matrix protein mRNA gc (M2-1)
aggagagucccgcagucggcguccagcggcucugcuuguucgugugugugucguugcaggccuuauucaagcuuaccaugagccgccggaaccccugcaaguucgagauccgcggccacugccugaacgggaagcggugccacuucucccacaacuacuucgaguggccgccccacgcccuccuggugcgccagaacuucaugcugaaccggauccucaagagcauggacaaguccaucgacacccugagcgagaucuccggcgccgcggagcuggaccgcaccgaggaguacgcccucggggucgugggcgugcuggagagcuacaucggguccaucaacaacaucacgaagcagagcgccugcgucgccauguccaagcugcucaccgagcugaacagcgacgacaucaagaagcugcgggacaacgaggagcucaacucccccaagauccgcguguacaacaccgugaucagcuacaucgaguccaaccggaagaacaacaagcagaccauccaccuccugaagcgccugcccgccgacguccugaagaagacgaucaagaacacccuggacauccacaagagcaucaccaucaacaacccgaaggaguccaccgugagcgacacgaacgaccacgcgaagaacaacgacaccaccugaggacuagucccuguucccagagcccacuuuuuuuucuuuuuuugaaauaaaauagccugucuuucagaucucaaaggcucuuuucagagccaccaaaaaaaaaaaaaaaaaaaaaaaaaaaaaaaaaaaaaaaaaaaaaaaaaaaaaaaaaaaaaaaaaaaaaaaaaaaaaaaaaaaaaaaaaaaaaaaaaaaaa

SEQ ID NO: 14582 - RNA, 1997 nt, Artificial Sequence
  HRSV-A/RSVA/Homo sapiens/USA/84I-215A-01/1984__AHY21375.1 fusion glycoprotein mRNA human (F0)
aggagagucccgcagucggcguccagcggcucugcuuguucgugugugugucguugcaggccuuauucaagcuuaccauggagcugcccauccucaagaccaacgccauuacaacuauacuugcugcagugacgcugugcuucgccagcucccagaauaucaccgaagaguuuuaccaaucuacauguucagcggucaguaaaggcuauuugagcgcuuuaagaacugggugguacaccuccguuauuacaaucgaacugucuaacauuaaggagaauaaaugcaacggaaccgacgccaaggugaaacuaaucaagcaggaacucgauaaguauaaaaaugcaguaacugagcugcagcuucugaugcagucgaccccugccgcuaacaauagggcacggcgcgaguugccacgauucaugaacuacacacucaauaacacgaagaauacuaacgugacccugagcaaaaagcguaaaagaagguuucuggguuuccucuuaggcgucgggucagccauagcuaguggaaucgccguguccaagguucugcaccuugaaggcgaggugaauaagauuaaaucugcguugcugagcacaaacaaggcagucgugucccuaucaaaugguguaaguguucucacuagcaaagugcuggaccuuaagaacuauaucgauaaacaacuguugccgauugucaacaagcagucuuguuccaucucaaauauagaaaccgugauugaguuucagcagaaaaacaaucggcuccuggagaucacacgcgaguucagcgugaacgccggggucaccacgcccguuaguacuuacauguuaacaaauucugaacugcucucccuuauuaacgacaugccuaucaccaaugaucaaaagaagcugaugagcaacaaugugcagaucguaagacagcagucguauucuauuauguccauaaucaaagaagagguguuggcuuacgucgugcaacuaccacuguacggaguuauugacacucccugcuggaagcuccauacaucaccucuguguaccacgaacaccaaagaaggcaguaauaucugccuuacaaggacugaucggggcugguauugugacaacgccgggagcguguccuuuuucccacaggcagagaccugcaagguccagucuaaucgcguguuuugugauacaaugaacagccugacuuugcccucagagguaaaucucugcaacauagacauuuucaacccuaaauacgauuguaagaucaugaccaguaagacagacguuuccagcucugugaucaccucacugggagcuauugucaguugcuaugguaaaacuaagugcacggccagcaauaaaaaccgaggcaucauuaagacauuuuccaaugggugugauuacgugucuaacaaaggagucgacaccgugucgguuggcaauacuuuauauuacgugaacaagcaagaagguaagagccuguauguaaaaggggagccaauaaucaauuucuacgacccgcuagucuuucccuccgaugaguucgacgcgucaauuagucaggugaacgaaaagaucaaucagucucucgccuucaucagaaaaagcgaugaacugcuucacaacguuaaugcaggaaaguccaccacaaacauuaugauaaccacuaucauuaucgugauuaucgucauauugcugucacucaucgcugugggccugcuucuguacugcaaagccaggagcacaccuguaacguugucuaaggaccagcucuccggcauuaauaacaucgcuuuuaguaauugaggacuagucccuguucccagagcccacuuuuuuuucuuuuuuugaaauaaaauagccugucuuucagaucucaaaggcucuuuucagagccaccaaaaaaaaaaaaaaaaaaaaaaaaaaaaaaaaaaaaaaaaaaaaaaaaaaaaaaaaaaaaaaaaaaaaaaaaaaaaaaaaaaaaaaaaaaaaaaaaaaaaa

SEQ ID NO: 14583 - RNA, 1997 nt, Artificial Sequence
  HRSV-A/A2__P03420.1 fusion glycoprotein mRNA human (F0)
aggagagucccgcagucggcguccagcggcucugcuuguucgugugugugucguugcaggccuuauucaagcuuaccauggagcugcucauccuuaaggccaacgcuauuaccacaauacugacugcagugacguucugcuuugccagcggccagaauaucaccgaagaguucuaccaauccacauguucugcggucucaaaaggguauuugagugcuuuaagaacuggaugguacaccagcguuauuacaaucgaacuguccaacauuaaggagaauaaaugcaacgguaccgacgccaaggugaaacuaaucaagcaggaacucgauaaguauaaaaaugcaguaacugagcugcagcuucugaugcagucuacacccgccaccaacaauagggcucggcgcgaguugccucgauuuaugaacuacacgcucaauaacgcaaagaaaacuaaugugacccugucgaagaaacguaagagaagguuccugggcuuucucuuaggggucggaucagccauagcuagcggcguggccguuaguaaggugcugcaccuugaaggugaggucaacaaaaucaaguccgcguugcugucuacaaauaaagcagugguaagccuauccaacgggguuucagugcucacuucuaagguccuggaccuuaaaaauuauauugauaagcaacuguugccaaucgugaacaaacagagcuguucuauuuccaacaucgaaaccgugauagaguuccagcagaagaauaaccggcuccuggagauuacacgcgaauuuucagucaaugccggaguuaccacgccggugagcacuuacauguuaacaaacagugagcugcucucucuuaucaaugacaugcccauuaccaacgaucaaaagaaacugauguccaauaacguacagaucgugagacagcagagcuauucgaucaugucuauuauaaaggaagaggucuuggcuuacgugguucaacuaccucuguacggcgugaucgacacuccaugcuggaaacuccauacauccccacuguguaccacgaauaccaaggaaggcucaaacauuugccuuacaaggacugaucgggggugguauugugacaaugccggaagugucagcuucuuuccucaggcagagaccugcaaagugcaguccaaccgcguauucugugauacaaugaauagucugacuuugccaagcgagguuaaccucugcaauguggacaucuuuaaccccaaguacgauuguaagauaaugaccucaaaaacagacgucaguuccagcgugauuaccucucugggugcuaucgucucaugcuauggcaagacuaaaugcacggccaguaacaagaaucgagggaucauuaaaacauucagcaacggaugugauuacguguccaauaagggcguugacaccgugucuguagguaacacuuuauauuacgucaauaagcaagaagggaaaucgcuguaugugaagggagagccuaucauuaacuuuuacgacccccuaguuuucccgagcgaugaauuugacgcguccauaucacaggugaaugagaaaaucaaccagagucucgccuucauuagaaagucugaugaacugcuucacaaugucaacgcaggcaaaagcaccacaaauaucaugaucaccacuauuauaaucgugauuaucguaauuuugcugucccucaucgcugugggccugcuucuguacugcaaggccaggucaacacccguuacguugagcaaggaccagcucucugggauaaacaauaucgcuuucuccaacugaggacuagucccuguucccagagcccacuuuuuuuucuuuuuuugaaauaaaauagccugucuuucagaucucaaaggcucuuuucagagccaccaaaaaaaaaaaaaaaaaaaaaaaaaaaaaaaaaaaaaaaaaaaaaaaaaaaaaaaaaaaaaaaaaaaaaaaaaaaaaaaaaaaaaaaaaaaaaaaaaaaaa

SEQ ID NO: 14584 - RNA, 1934 nt, Artificial Sequence
  HRSV-A/A2__P03420.1 fusion glycoprotein mRNA human (F-del)
aggagagucccgcagucggcguccagcggcucugcuuguucgugugugugucguugcaggccuuauucaagcuuaccauggagcugcucauccuuaaggccaacgcuauuaccacaauacugacugcagugacguucugcuuugccagcggccagaauaucaccgaagaguucuaccaauccacauguucugcggucucaaaaggguauuugagugcuuuaagaacuggaugguacaccagcguuauuacaaucgaacuguccaacauuaaggagaauaaaugcaacgguaccgacgccaaggugaaacuaaucaagcaggaacucgauaaguauaaaaaugcaguaacugagcugcagcuucugaugcagucuacacccgccaccaacaauagggcucggcgcgaguugccucgauuuaugaacuacacgcucaauaacgcaaagaaaacuaaugugacccugucgaagaaacguaagagaagguuccugggcuuucucuuaggggucggaucagccauagcuagcggcguggccguuaguaaggugcugcaccuugaaggugaggucaacaaaaucaaguccgcguugcugucuacaaauaaagcagugguaagccuauccaacgggguuucagugcucacuucuaagguccuggaccuuaaaaauuauauugauaagcaacuguugccaaucgugaacaaacagagcuguucuauuuccaacaucgaaaccgugauagaguuccagcagaagaauaaccggcuccuggagauuacacgcgaauuuucagucaaugccggaguuaccacgccggugagcacuuacauguuaacaaacagugagcugcucucucuuaucaaugacaugcccauuaccaacgaucaaaagaaacugauguccaauaacguacagaucgugagacagcagagcuauucgaucaugucuauuauaaaggaagaggucuuggcuuacgugguucaacuaccucuguacggcgugaucgacacuccaugcuggaaacuccauacauccccacuguguaccacgaauaccaaggaaggcucaaacauuugccuuacaaggacugaucgggggugguauugugacaaugccggaagugucagcuucuuuccucaggcagagaccugcaaagugcaguccaaccgcguauucugugauacaaugaauagucugacuuugccaagcgagguuaaccucugcaauguggacaucuuuaaccccaaguacgauuguaagauaaugaccucaaaaacagacgucaguuccagcgugauuaccucucugggugcuaucgucucaugcuauggcaagacuaaaugcacggccaguaacaagaaucgagggaucauuaaaacauucagcaacggaugugauuacguguccaauaagggcguugacaccgugucuguagguaacacuuuauauuacgucaauaagcaagaagggaaaucgcuguaugugaagggagagccuaucauuaacuuuuacgacccccuaguuuucccgagcgaugaauuugacgcguccauaucacaggugaaugagaaaaucaaccagagucucgccuucauuagaaagucugaugaacugcuucacaaugucaacgcaggcaaaagcaccacaaauaucaugaucaccacuauuauaaucgugauuaucguaauuuugcugucccucaucgcugugggccugcuucuguacugcaaggccaggugaggacuagucccuguucccagagcccacuuuuuuuucuuuuuuugaaauaaaauagccugucuuucagaucucaaaggcucuuuucagagccaccaaaaaaaaaaaaaaaaaaaaaaaaaaaaaaaaaaaaaaaaaaaaaaaaaaaaaaaaaaaaaaaaaaaaaaaaaaaaaaaaaaaaaaaaaaaaaaaaaaaaa

SEQ ID NO: 14585 - RNA, 1997 nt, Artificial Sequence
  HRSV-A/A2__P03420.1 fusion glycoprotein mRNA human (F0_DSCav1)
aggagagucccgcagucggcguccagcggcucugcuuguucgugugugugucguugcaggccuuauucaagcuuaccauggagcugcucauccuuaaggccaacgcuauuaccacaauacugacugcagugacguucugcuuugccagcggccagaauaucaccgaagaguucuaccaauccacauguucugcggucucaaaaggguauuugagugcuuuaagaacuggaugguacaccagcguuauuacaaucgaacuguccaacauuaaggagaauaaaugcaacgguaccgacgccaaggugaaacuaaucaagcaggaacucgauaaguauaaaaaugcaguaacugagcugcagcuucugaugcagucuacacccgccaccaacaauagggcucggcgcgaguugccucgauuuaugaacuacacgcucaauaacgcaaagaaaacuaaugugacccugucgaagaaacguaagagaagguuccugggcuuucucuuaggggucggaucagccauagcuagcggcguggccguuuguaaggugcugcaccuugaaggugaggucaacaaaaucaagagugcguugcuguccacaaauaaagcagugguaucucuaagcaacgggguuuccgugcucacuuucaagguccuggaccuuaaaaauuauauugauaagcaacuguugccaauccucaacaaacagucaugcaguauuagcaacaucgaaaccgugauagaguuucagcagaagaauaaccggcuguuagagauuacacgcgaguucucugugaaugccggagucaccacgccgguuuccacuuacaugcugacaaacucagaacuccuuagccugaucaaugacaugcccauuaccaacgaucaaaagaaauugaugaguaauaacgugcagaucguaagacagcagucuuauuccaucauguguauuauaaaggaagaggugcuagcuuacgucgugcaacugccucucuacggcguuaucgacacuccaugcuggaaacugcauacaagcccccuuuguaccacgaauaccaaggaaggcucgaacauuugccugacaaggacugaucgggggugguauugugacaaugccggaucuguguccuuuuucccucaggcagagaccugcaaaguccagucaaaccgcguguuuugugauacaaugaauaguuugacucucccaagcgagguaaaccugugcaauguugacaucuucaaccccaaguacgauugcaagauaaugaccuccaaaacagacgugucuagcucagucauuaccaguuuaggugcuaucguguccuguuauggcaagacuaaaugcacggccagcaacaagaaucgagggaucauuaaaacauuuucuaacggaugugauuacgucucaaauaagggcguggacaccguuaguguggguaacacucuguauuacguaaauaagcaagaagggaaaagccuauaugucaagggagagccuaucauuaacuucuacgacccacucguguucccguccgaugaauuugacgcgucuauaucgcagguuaaugagaaaaucaaccagagccuggccuucauuagaaaguccgaugaacuuuugcacaaugugaacgcaggcaaaucaaccacaaauaucaugaucaccacuauuauaaucgucauuaucgugauucugcucagucugaucgcuguaggccuucuguuguacugcaaggccaggucuacacccgugacgcucagcaaggaccagcuguccgggauaaacaauaucgcuuuuucaaacugaggacuagucccuguucccagagcccacuuuuuuuucuuuuuuugaaauaaaauagccugucuuucagaucucaaaggcucuuuucagagccaccaaaaaaaaaaaaaaaaaaaaaaaaaaaaaaaaaaaaaaaaaaaaaaaaaaaaaaaaaaaaaaaaaaaaaaaaaaaaaaaaaaaaaaaaaaaaaaaaaaaaa

SEQ ID NO: 14586 - RNA, 1934 nt, Artificial Sequence
  HRSV-A/A2__P03420.1 fusion glycoprotein mRNA human (F-del_DSCav1)
aggagagucccgcagucggcguccagcggcucugcuuguucgugugugugucguugcaggccuuauucaagcuuaccauggagcugcucauccuuaaggccaacgcuauuaccacaauacugacugcagugacguucugcuuugccagcggccagaauaucaccgaagaguucuaccaauccacauguucugcggucucaaaaggguauuugagugcuuuaagaacuggaugguacaccagcguuauuacaaucgaacuguccaacauuaaggagaauaaaugcaacgguaccgacgccaaggugaaacuaaucaagcaggaacucgauaaguauaaaaaugcaguaacugagcugcagcuucugaugcagucuacacccgccaccaacaauagggcucggcgcgaguugccucgauuuaugaacuacacgcucaauaacgcaaagaaaacuaaugugacccugucgaagaaacguaagagaagguuccugggcuuucucuuaggggucggaucagccauagcuagcggcguggccguuuguaaggugcugcaccuugaaggugaggucaacaaaaucaagagugcguugcuguccacaaauaaagcagugguaucucuaagcaacgggguuuccgugcucacuuucaagguccuggaccuuaaaaauuauauugauaagcaacuguugccaauccucaacaaacagucaugcaguauuagcaacaucgaaaccgugauagaguuucagcagaagaauaaccggcuguuagagauuacacgcgaguucucugugaaugccggagucaccacgccgguuuccacuuacaugcugacaaacucagaacuccuuagccugaucaaugacaugcccauuaccaacgaucaaaagaaauugaugaguaauaacgugcagaucguaagacagcagucuuauuccaucauguguauuauaaaggaagaggugcuagcuuacgucgugcaacugccucucuacggcguuaucgacacuccaugcuggaaacugcauacaagcccccuuuguaccacgaauaccaaggaaggcucgaacauuugccugacaaggacugaucgggggugguauugugacaaugccggaucuguguccuuuuucccucaggcagagaccugcaaaguccagucaaaccgcguguuuugugauacaaugaauaguuugacucucccaagcgagguaaaccugugcaauguugacaucuucaaccccaaguacgauugcaagauaaugaccuccaaaacagacgugucuagcucagucauuaccaguuuaggugcuaucguguccuguuauggcaagacuaaaugcacggccagcaacaagaaucgagggaucauuaaaacauuuucuaacggaugugauuacgucucaaauaagggcguggacaccguuaguguggguaacacucuguauuacguaaauaagcaagaagggaaaagccuauaugucaagggagagccuaucauuaacuucuacgacccacucguguucccguccgaugaauuugacgcgucuauaucgcagguuaaugagaaaaucaaccagagccuggccuucauuagaaaguccgaugaacuuuugcacaaugugaacgcaggcaaaucaaccacaaauaucaugaucaccacuauuauaaucgucauuaucgugauucugcucagucugaucgcuguaggccuucuguuguacugcaaggccaggugaggacuagucccuguucccagagcccacuuuuuuuucuuuuuuugaaauaaaauagccugucuuucagaucucaaaggcucuuuucagagccaccaaaaaaaaaaaaaaaaaaaaaaaaaaaaaaaaaaaaaaaaaaaaaaaaaaaaaaaaaaaaaaaaaaaaaaaaaaaaaaaaaaaaaaaaaaaaaaaaaaaaa

SEQ ID NO: 14587 - RNA, 1880 nt, Artificial Sequence
  HRSV-A/A2__P03420.1 fusion glycoprotein mRNA human (F_DSCav1_mut4)
aggagagucccgcagucggcguccagcggcucugcuuguucgugugugugucguugcaggccuuauucaagcuuaccauggagcugcucauccuuaaggccaacgcuauuaccacaauacugacugcagugacguucugcuuugccagcggccagaauaucaccgaagaguucuaccaauccacauguucugcggucucaaaaggguauuugagugcuuuaagaacuggaugguacaccagcguuauuacaaucgaacuguccaacauuaaggagaauaaaugcaacgguaccgacgccaaggugaaacuaaucaagcaggaacucgauaaguauaaaaaugcaguaacugagcugcagcuucugaugcagucuacacccgccaccggcucggggucagcuauauguagcggaguggcagucugcaagguguugcaccucgagggcgaaguuaacaaaaucaagagugcccugcuguccacgaauaaagcuguggucucucucagcaacgguguguccguauuaacuuuuaagguucuggaccuuaagaauuacauugauaaacaauugcugccuauccuaaacaagcagucauguaguauuagcaauaucgagaccgugauagaguuccagcagaaaaacaauaggcuccuggaaauuacacgggaguuuucugucaacgccggggugacuaccccaguguccacauauaugcuuaccaauucagaacuguugagccucaucaacgacaugccgauuacgaacgaucaaaagaaacugaugaguaauaacguccagaucguucgccagcagucuuacuccaucaugugcauuauaaaggaggaaguguuagcguauguagugcaacugccccucuacggagucaucgacacuccuuguuggaaacuucauacaagcccacugugcaccacuaauacaaaggagggcucgaacauuuguuugacccgaacggaucguggcugguacugcgacaaugcagggucuguguccuucuuuccccaggccgaaaccuguaagguucagucaaacagaguguucugcgauacaaugaauaguaggacucuaccuagcgaggucaaccugugcaauguggacaucuuuaacccaaaauaugauuguaagauaaugaccuccaaaacagacguaucuagcucaguuauuaccagucucggagcuaucguguccugcuacgguaagacuaaauguacagccagcaauaagaaccggggcaucauuaagaccuucucuaaugggugcgauuaugucucaaacaaaggaguggacacugucagugugggcaauacgcuguacuguguuaacaagcaagaggguaaaagccuuuaugugaagggggaacccaucauuaacuuuuacgacccucugguauucccauccgaugaguuugacgcaucuauaucgcaggucaaugagaaaaucaaccagagcuuggcuuucauucgcaaguccgaugaacuccugcacaaugugaacgccggaaagucaacaaccaauaucaugaucacuaccauuauaaucguuauuaucgugauuuuacugagucuaaucgcggucggccuccugcuuuauugcaaagccagaucuacaccggugaccuugagcaaggaccagcuguccggcauaaacaauaucgcauucucaaacugaggacuagucccuguucccagagcccacuuuuuuuucuuuuuuugaaauaaaauagccugucuuucagaucucaaaggcucuuuucagagccaccaaaaaaaaaaaaaaaaaaaaaaaaaaaaaaaaaaaaaaaaaaaaaaaaaaaaaaaaaaaaaaaaaaaaaaaaaaaaaaaaaaaaaaaaaaaaaaaaaaaaa

SEQ ID NO: 14588 - RNA, 1817 nt, Artificial Sequence
  HRSV-A/A2__P03420.1 fusion glycoprotein mRNA human (F-del_DSCav1_mut4)
aggagagucccgcagucggcguccagcggcucugcuuguucgugugugugucguugcaggccuuauucaagcuuaccauggagcugcucauccuuaaggccaacgcuauuaccacaauacugacugcagugacguucugcuuugccagcggccagaauaucaccgaagaguucuaccaauccacauguucugcggucucaaaaggguauuugagugcuuuaagaacuggaugguacaccagcguuauuacaaucgaacuguccaacauuaaggagaauaaaugcaacgguaccgacgccaaggugaaacuaaucaagcaggaacucgauaaguauaaaaaugcaguaacugagcugcagcuucugaugcagucuacacccgccaccggcucggggucagcuauauguagcggaguggcagucugcaagguguugcaccucgagggcgaaguuaacaaaaucaagagugcccugcuguccacgaauaaagcuguggucucucucagcaacgguguguccguauuaacuuuuaagguucuggaccuuaagaauuacauugauaaacaauugcugccuauccuaaacaagcagucauguaguauuagcaauaucgagaccgugauagaguuccagcagaaaaacaauaggcuccuggaaauuacacgggaguuuucugucaacgccggggugacuaccccaguguccacauauaugcuuaccaauucagaacuguugagccucaucaacgacaugccgauuacgaacgaucaaaagaaacugaugaguaauaacguccagaucguucgccagcagucuuacuccaucaugugcauuauaaaggaggaaguguuagcguauguagugcaacugccccucuacggagucaucgacacuccuuguuggaaacuucauacaagcccacugugcaccacuaauacaaaggagggcucgaacauuuguuugacccgaacggaucguggcugguacugcgacaaugcagggucuguguccuucuuuccccaggccgaaaccuguaagguucagucaaacagaguguucugcgauacaaugaauaguaggacucuaccuagcgaggucaaccugugcaauguggacaucuuuaacccaaaauaugauuguaagauaaugaccuccaaaacagacguaucuagcucaguuauuaccagucucggagcuaucguguccugcuacgguaagacuaaauguacagccagcaauaagaaccggggcaucauuaagaccuucucuaaugggugcgauuaugucucaaacaaaggaguggacacugucagugugggcaauacgcuguacuguguuaacaagcaagaggguaaaagccuuuaugugaagggggaacccaucauuaacuuuuacgacccucugguauucccauccgaugaguuugacgcaucuauaucgcaggucaaugagaaaaucaaccagagcuuggcuuucauucgcaaguccgaugaacuccugcacaaugugaacgccggaaagucaacaaccaauaucaugaucacuaccauuauaaucguuauuaucgugauuuuacugagucuaaucgcggucggccuccugcuuuauugcaaagccagaugaggacuagucccuguucccagagcccacuuuuuuuucuuuuuuugaaauaaaauagccugucuuucagaucucaaaggcucuuuucagagccaccaaaaaaaaaaaaaaaaaaaaaaaaaaaaaaaaaaaaaaaaaaaaaaaaaaaaaaaaaaaaaaaaaaaaaaaaaaaaaaaaaaaaaaaaaaaaaaaaaaaaa

SEQ ID NO: 14589 - RNA, 1883 nt, Artificial Sequence
  HRSV-A/A2__P03420.1 fusion glycoprotein mRNA human (F_DSCav1_mut5)
aggagagucccgcagucggcguccagcggcucugcuuguucgugugugugucguugcaggccuuauucaagcuuaccauggagcugcucauccuuaaggccaacgcuauuaccacaauacugacugcagugacguucugcuuugccagcggccagaauaucaccgaagaguucuaccaauccacauguucugcggucucaaaaggguauuugagugcuuuaagaacuggaugguacaccagcguuauuacaaucgaacuguccaacauuaaggagaauaaaugcaacgguaccgacgccaaggugaaacuaaucaagcaggaacucgauaaguauaaaaaugcaguaacugagcugcagcuucugaugcagucuacacccgccaccggcucggggucagcuauagcaagcggaguggccgucuguaagguguugcaccucgagggcgaaguuaacaaaaucaagagugcucugcuguccacgaauaaagccguggucucucucagcgguugcgggguguccguauuaacuuuuaagguucuggaccuuaagaacuacauugauaaacaauugcugccuauccuaaauaagcagucauguaguauuagcaacaucgagaccgugauagaguuccagcagaaaaauaacaggcuccuggaaauuacacgggaguuuucugucaaugcgggagugacuaccccaguguccacauauaugcuuaccaacucagaacuguugagccucaucaaugacaugccgauuacgaacgaucaaaagaaacugaugaguaacaauguccagaucguucgccagcagucuuacuccaucaugugcauuauaaaggaggaaguguuagcauauguagugcaacugccccucuacggcgucaucgacacuccuuguuggaaacuucauacaagcccacugugcaccacuaacacaaaggagggcucgaauauuuguuugacccgaacggaucgugggugguacugcgacaacgccggaucuguguccuucuuuccccaggcugaaaccuguaagguucagucaaauagaguguucugcgauacaaugaacaguaggacucuaccuagcgaggucaaucugugcaacguggacaucuuuaauccaaaauaugauuguaagauaaugaccuccaaaacagacguaucuagcucaguuauuaccagucucggugccaucguguccugcuacggcaagacuaaauguacagcaagcaacaagugccgggggaucauuaagaccuucucuaauggaugugauuaugucucaaacaaaggcguggacacugucaguguggguaauacgcuguacuauguuaacaagcaagaggggaaaagccuuuacgugaagggagaacccaucauuaauuuuuaugacccucugguauucccauccgaugaguuugacgcuucuauaucgcaggucaacgagaaaaucaaccagagcuuggccuucauucgcaaguccgaugaacuccugcacaaugugaacgcgggcaagucaacaaccaauaucaugaucacuaccauuauaaucguuauuaucgugauuuuacugagucuaaucgccgucggccuccugcuuuacugcaaagcaagaucuacaccggugaccuugagcaaggaccagcuguccgggauaaacaauaucgcuuucucaaacugaggacuagucccuguucccagagcccacuuuuuuuucuuuuuuugaaauaaaauagccugucuuucagaucucaaaggcucuuuucagagccaccaaaaaaaaaaaaaaaaaaaaaaaaaaaaaaaaaaaaaaaaaaaaaaaaaaaaaaaaaaaaaaaaaaaaaaaaaaaaaaaaaaaaaaaaaaaaaaaaaaaaa

SEQ ID NO: 14590 - RNA, 1820 nt, Artificial Sequence
  HRSV-A/A2__P03420.1 fusion glycoprotein mRNA human (F-del_DSCav1_mut5)
aggagagucccgcagucggcguccagcggcucugcuuguucgugugugugucguugcaggccuuauucaagcuuaccauggagcugcucauccuuaaggccaacgcuauuaccacaauacugacugcagugacguucugcuuugccagcggccagaauaucaccgaagaguucuaccaauccacauguucugcggucucaaaaggguauuugagugcuuuaagaacuggaugguacaccagcguuauuacaaucgaacuguccaacauuaaggagaauaaaugcaacgguaccgacgccaaggugaaacuaaucaagcaggaacucgauaaguauaaaaaugcaguaacugagcugcagcuucugaugcagucuacacccgccaccggcucggggucagcuauagcaagcggaguggccgucuguaagguguugcaccucgagggcgaaguuaacaaaaucaagagugcucugcuguccacgaauaaagccguggucucucucagcgguugcgggguguccguauuaacuuuuaagguucuggaccuuaagaacuacauugauaaacaauugcugccuauccuaaauaagcagucauguaguauuagcaacaucgagaccgugauagaguuccagcagaaaaauaacaggcuccuggaaauuacacgggaguuuucugucaaugcgggagugacuaccccaguguccacauauaugcuuaccaacucagaacuguugagccucaucaaugacaugccgauuacgaacgaucaaaagaaacugaugaguaacaauguccagaucguucgccagcagucuuacuccaucaugugcauuauaaaggaggaaguguuagcauauguagugcaacugccccucuacggcgucaucgacacuccuuguuggaaacuucauacaagcccacugugcaccacuaacacaaaggagggcucgaauauuuguuugacccgaacggaucgugggugguacugcgacaacgccggaucuguguccuucuuuccccaggcugaaaccuguaagguucagucaaauagaguguucugcgauacaaugaacaguaggacucuaccuagcgaggucaaucugugcaacguggacaucuuuaauccaaaauaugauuguaagauaaugaccuccaaaacagacguaucuagcucaguuauuaccagucucggugccaucguguccugcuacggcaagacuaaauguacagcaagcaacaagugccgggggaucauuaagaccuucucuaauggaugugauuaugucucaaacaaaggcguggacacugucaguguggguaauacgcuguacuauguuaacaagcaagaggggaaaagccuuuacgugaagggagaacccaucauuaauuuuuaugacccucugguauucccauccgaugaguuugacgcuucuauaucgcaggucaacgagaaaaucaaccagagcuuggccuucauucgcaaguccgaugaacuccugcacaaugugaacgcgggcaagucaacaaccaauaucaugaucacuaccauuauaaucguuauuaucgugauuuuacugagucuaaucgccgucggccuccugcuuuacugcaaagcaagaugaggacuagucccuguucccagagcccacuuuuuuuucuuuuuuugaaauaaaauagccugucuuucagaucucaaaggcucuuuucagagccaccaaaaaaaaaaaaaaaaaaaaaaaaaaaaaaaaaaaaaaaaaaaaaaaaaaaaaaaaaaaaaaaaaaaaaaaaaaaaaaaaaaaaaaaaaaaaaaaaaaaaa

SEQ ID NO: 14591 - RNA, 857 nt, Artificial Sequence
  HRSV-A/A2__AAB86665.1 matrix protein mRNA human (M2-1)
aggagagucccgcagucggcguccagcggcucugcuuguucgugugugugucguugcaggccuuauucaagcuuaccaugagcagaaggaaccccugcaaguucgagauccggggccacugucugaaugggaaacgcugccauuuuucccacaacuacuucgaauggccuccacaugcacuccuugugcgacagaauuuuaugcugaaccguauuuugaagucuauggacaaaucaauagauaccuuaagugagaucagcggagcugcagaacuggacagaacagaggaauaugcccuaggugucguuggcgugcucgaguccuacauugggucuaucaauaacauuacuaagcaaucggcguguguagcuaugucaaaacugcuuacggagcugaauagcgaugacaucaagaaguugagggauaacgaagaguuaaauaguccgaaaauacggguguauaacaccgucaucuccuacauugaaucuaaucgcaagaacaauaaacagacaauccaucugcugaagagacuccccgccgacgugcucaaaaagacuauuaagaacacccuggauauccacaaaagcauaacaauuaauaacccuaaggaguccaccguuucagacacuaacgaucacgccaaaaauaacgacacaaccugaggacuagucccuguucccagagcccacuuuuuuuucuuuuuuugaaauaaaauagccugucuuucagaucucaaaggcucuuuucagagccaccaaaaaaaaaaaaaaaaaaaaaaaaaaaaaaaaaaaaaaaaaaaaaaaaaaaaaaaaaaaaaaaaaaaaaaaaaaaaaaaaaaaaaaaaaaaaaaaaaaaaa

SEQ ID NO: 14592 - RNA, 1942 nt, Artificial Sequence
  HRSV-A/RSVA/Homo sapiens/USA/84I-215A-01/1984__AHY21375.1 fusion glycoprotein mRNA gc (F0)
aggagaaagcuuaccauggagcugcccauccucaagaccaacgccaucaccacgauccuggccgcggugacccugugcuucgccagcucccagaacaucaccgaggaguucuaccagagcacgugcuccgccgucagcaagggcuaccucuccgcccugcgcaccgggugguacaccagcgugaucaccaucgagcuguccaacaucaaggagaacaagugcaacggcaccgacgccaaggugaagcucaucaagcaggagcuggacaaguacaagaacgcggucacggagcugcagcuccugaugcagagcaccccggccgccaacaaccgggcccgccgggagcugccccgcuucaugaacuacacccucaacaacaccaagaacacgaacgugacccuguccaagaagcggaagcgccgguuccugggguuccuccugggcguggggagcgcgaucgccuccggcaucgccgucagcaaggugcugcaccucgagggcgaggugaacaagaucaaguccgcccugcugagcaccaacaaggccgucgugucccucagcaacgggguguccguccugaccagcaaggugcuggaccucaagaacuacaucgacaagcagcugcugcccaucgugaacaagcaguccugcagcaucagcaacaucgagacggucaucgaguuccagcagaagaacaaccgccuccuggagaucacccgggaguucuccgugaacgcgggcgugaccacccccgucagcacguacaugcugaccaacuccgagcuccugagccugaucaacgacaugccgaucaccaacgaccagaagaagcucauguccaacaacgugcagaucgugcgccagcagagcuacuccaucaugagcaucaucaaggaggagguccuggccuacguggugcagcugccccucuacggggucaucgacacccccugcuggaagcugcacacgagcccccugugcaccaccaacaccaaggagggcagcaacaucugccucacgcggaccgaccgcgggugguacugcgacaacgccggcuccgugagcuucuucccgcaggccgagaccugcaagguccaguccaaccggguguucugcgacaccaugaacagccugacgcugcccuccgaggugaaccucugcaacaucgacaucuucaaccccaaguacgacugcaagaucaugaccagcaagaccgacgucuccagcuccgugaucaccagccugggcgccaucgugagcugcuacgggaagacgaagugcaccgcguccaacaagaaccgcggcaucaucaagaccuucagcaacgggugcgacuacgucuccaacaagggcguggacaccgugagcgucggcaacacccuguacuacgugaacaagcaggaggggaagucccucuacgugaagggcgagcccaucaucaacuucuacgacccgcuggucuuccccagcgacgaguucgacgccuccaucagccaggugaacgagaagaucaaccagucccuggccuucauccggaaguccgacgagcugcuccacaacgugaacgccgggaaguccacgaccaacaucaugaucaccaccaucaucaucgucaucaucgugauccugcugagccucaucgccgugggccugcugcucuacugcaaggcgcgcuccacgcccgucacccugagcaaggaccagcuguccgggaucaacaacaucgccuucagcaacugaggacuaguuauaagacugacuagcccgaugggccucccaacgggcccuccuccccuccuugcaccgagauuaauaaaaaaaaaaaaaaaaaaaaaaaaaaaaaaaaaaaaaaaaaaaaaaaaaaaaaaaaaaaaaaaaugcaucccccccccccccccccccccccccccccccaaaggcucuuuucagagccaccagaauu

SEQ ID NO: 14593 - RNA, 1942 nt, Artificial Sequence
  HRSV-A/A2__P03420.1 fusion glycoprotein mRNA gc (F0)
aggagaaagcuuaccauggagcugcucauccugaaggccaacgccaucaccaccauccugacggcggugaccuucugcuucgccagcggccagaacaucaccgaggaguucuaccaguccaccugcagcgccgucuccaagggguaccucagcgcccugcggacgggcugguacaccuccgugaucaccaucgagcugagcaacaucaaggagaacaagugcaacgggaccgacgccaaggugaagcucaucaagcaggagcuggacaaguacaagaacgcggucacggagcugcagcuccugaugcaguccaccccggcaaccaacaaccgcgcccggcgcgagcugccccgguucaugaacuacacccucaacaacgccaagaagacgaacgugacccugagcaagaagcgcaagcggcgcuuccugggcuuccuccugggggugggcuccgccaucgcgagcggcgucgccguguccaaggugcugcaccucgagggggaggucaacaagaucaagagcgcccugcuguccaccaacaaggccguggugagccucuccaacggcgucagcgugcugaccuccaaggugcuggaccucaagaacuacaucgacaagcagcugcugcccaucgucaacaagcagagcugcuccaucagcaacaucgagacggugaucgaguuccagcagaagaacaaccggcuccuggagaucacccgcgaguucagcgugaacgccggggucaccacccccguguccacguacaugcugaccaacagcgagcuccugucccugaucaacgacaugccgaucaccaacgaccagaagaagcucaugagcaacaacgugcagaucguccggcagcaguccuacagcaucauguccaucaucaaggaggaggugcuggcguacgugguccagcugccccucuacggcgugaucgacacccccugcuggaagcugcacacgagcccccugugcaccaccaacaccaaggagggguccaacaucugccucacgcgcaccgaccggggcugguacugcgacaacgccggcagcgucuccuucuucccgcaggccgagaccugcaaggugcagagcaaccgcguguucugcgacaccaugaacucccugacgcugcccagcgagguaaaccucugcaacgucgacaucuucaaccccaaguacgacugcaagaucaugaccuccaagaccgacgugagcuccagcgugaucaccucccugggggccaucgucagcugcuacggcaagacgaagugcaccgccagcaacaagaaccgggggaucaucaagaccuucuccaacggcugcgacuacgugagcaacaagggcguggacaccguguccgucgggaacacccuguacuacgugaacaagcaggagggcaagagccucuacgugaagggggagcccaucaucaacuucuacgacccgcuggucuuccccuccgacgaguucgacgcgagcaucucccaggugaacgagaagaucaaccagagccuggccuucauccgcaaguccgacgagcugcuccacaacgugaacgccggcaagagcacgaccaacaucaugaucaccaccaucaucaucgucaucaucgugauccugcugucccucaucgccguggggcugcugcucuacugcaaggcccggagcacgcccgucacccuguccaaggaccagcugagcggcaucaacaacaucgcguucuccaacugaggacuaguuauaagacugacuagcccgaugggccucccaacgggcccuccuccccuccuugcaccgagauuaauaaaaaaaaaaaaaaaaaaaaaaaaaaaaaaaaaaaaaaaaaaaaaaaaaaaaaaaaaaaaaaaaugcaucccccccccccccccccccccccccccccccaaaggcucuuuucagagccaccagaauu

SEQ ID NO: 14594 - RNA, 1879 nt, Artificial Sequence
  HRSV-A/A2__P03420.1 fusion glycoprotein mRNA gc (F-del)
aggagaaagcuuaccauggagcugcucauccugaaggccaacgccaucaccaccauccugacggcggugaccuucugcuucgccagcggccagaacaucaccgaggaguucuaccaguccaccugcagcgccgucuccaagggguaccucagcgcccugcggacgggcugguacaccuccgugaucaccaucgagcugagcaacaucaaggagaacaagugcaacgggaccgacgccaaggugaagcucaucaagcaggagcuggacaaguacaagaacgcggucacggagcugcagcuccugaugcaguccaccccggcaaccaacaaccgcgcccggcgcgagcugccccgguucaugaacuacacccucaacaacgccaagaagacgaacgugacccugagcaagaagcgcaagcggcgcuuccugggcuuccuccugggggugggcuccgccaucgcgagcggcgucgccguguccaaggugcugcaccucgagggggaggucaacaagaucaagagcgcccugcuguccaccaacaaggccguggugagccucuccaacggcgucagcgugcugaccuccaaggugcuggaccucaagaacuacaucgacaagcagcugcugcccaucgucaacaagcagagcugcuccaucagcaacaucgagacggugaucgaguuccagcagaagaacaaccggcuccuggagaucacccgcgaguucagcgugaacgccggggucaccacccccguguccacguacaugcugaccaacagcgagcuccugucccugaucaacgacaugccgaucaccaacgaccagaagaagcucaugagcaacaacgugcagaucguccggcagcaguccuacagcaucauguccaucaucaaggaggaggugcuggcguacgugguccagcugccccucuacggcgugaucgacacccccugcuggaagcugcacacgagcccccugugcaccaccaacaccaaggagggguccaacaucugccucacgcgcaccgaccggggcugguacugcgacaacgccggcagcgucuccuucuucccgcaggccgagaccugcaaggugcagagcaaccgcguguucugcgacaccaugaacucccugacgcugcccagcgagguaaaccucugcaacgucgacaucuucaaccccaaguacgacugcaagaucaugaccuccaagaccgacgugagcuccagcgugaucaccucccugggggccaucgucagcugcuacggcaagacgaagugcaccgccagcaacaagaaccgggggaucaucaagaccuucuccaacggcugcgacuacgugagcaacaagggcguggacaccguguccgucgggaacacccuguacuacgugaacaagcaggagggcaagagccucuacgugaagggggagcccaucaucaacuucuacgacccgcuggucuuccccuccgacgaguucgacgcgagcaucucccaggugaacgagaagaucaaccagagccuggccuucauccgcaaguccgacgagcugcuccacaacgugaacgccggcaagagcacgaccaacaucaugaucaccaccaucaucaucgucaucaucgugauccugcugucccucaucgccguggggcugcugcucuacugcaaggcccggugaggacuaguuauaagacugacuagcccgaugggccucccaacgggcccuccuccccuccuugcaccgagauuaauaaaaaaaaaaaaaaaaaaaaaaaaaaaaaaaaaaaaaaaaaaaaaaaaaaaaaaaaaaaaaaaaugcaucccccccccccccccccccccccccccccccaaaggcucuuuucagagccaccagaauu

SEQ ID NO: 14595 - RNA, 1942 nt, Artificial Sequence
  HRSV-A/A2__P03420.1 fusion glycoprotein mRNA gc (F0_DSCav1)
aggagaaagcuuaccauggagcugcucauccugaaggccaacgccaucaccaccauccugacggcggugaccuucugcuucgccagcggccagaacaucaccgaggaguucuaccaguccacgugcagcgccgucuccaagggguaccucagcgcccugcggaccggcugguacaccuccgugaucaccaucgagcugagcaacaucaaggagaacaagugcaacgggaccgacgccaaggugaagcucaucaagcaggagcuggacaaguacaagaacgcggucacggagcugcagcuccugaugcaguccaccccggcaaccaacaaccgcgcccggcgcgagcugccccgguucaugaacuacacccucaacaacgccaagaagacgaacgugacccugagcaagaagcgcaagcggcgcuuccugggcuuccuccugggggugggcuccgccaucgcgagcggcgucgccgugugcaaggugcugcaccucgagggggaggucaacaagaucaagagcgcccugcuguccaccaacaaggccguggugagccucuccaacggcgucagcgugcugaccuucaaggugcuggaccucaagaacuacaucgacaagcagcugcugcccauccugaacaagcagagcugcuccaucagcaacaucgagacggugaucgaguuccagcagaagaacaaccggcuccuggagaucacccgcgaguucagcgugaacgccggggucaccacccccguguccacguacaugcugaccaacagcgagcuccugucccugaucaacgacaugccgaucaccaacgaccagaagaagcucaugagcaacaacgugcagaucguccggcagcaguccuacagcaucaugugcaucaucaaggaggaggugcuggcguacgugguccagcugccccucuacggcgugaucgacacccccugcuggaagcugcacacgagcccccugugcaccaccaacaccaaggagggguccaacaucugccucacgcgcaccgaccggggcugguacugcgacaacgccggcagcgucuccuucuucccgcaggccgagaccugcaaggugcagagcaaccgcguguucugcgacaccaugaacucccugacgcugcccagcgagguaaaccucugcaacgucgacaucuucaaccccaaguacgacugcaagaucaugaccuccaagaccgacgugagcuccagcgugaucaccucccugggggccaucgucagcugcuacggcaagacgaagugcaccgccagcaacaagaaccgggggaucaucaagaccuucuccaacggcugcgacuacgugagcaacaagggcguggacaccguguccgucgggaacacccuguacuacgugaacaagcaggagggcaagagccucuacgugaagggggagcccaucaucaacuucuacgacccgcuggucuuccccuccgacgaguucgacgcgagcaucucccaggugaacgagaagaucaaccagagccuggccuucauccgcaaguccgacgagcugcuccacaacgugaacgccggcaagagcacgaccaacaucaugaucaccaccaucaucaucgucaucaucgugauccugcugucccucaucgccguggggcugcugcucuacugcaaggcccggagcacgcccgucacccuguccaaggaccagcugagcggcaucaacaacaucgcguucuccaacugaggacuaguuauaagacugacuagcccgaugggccucccaacgggcccuccuccccuccuugcaccgagauuaauaaaaaaaaaaaaaaaaaaaaaaaaaaaaaaaaaaaaaaaaaaaaaaaaaaaaaaaaaaaaaaaaugcaucccccccccccccccccccccccccccccccaaaggcucuuuucagagccaccagaauu

SEQ ID NO: 14596 - RNA, 1879 nt, Artificial Sequence
  HRSV-A/A2__P03420.1 fusion glycoprotein mRNA gc (F-del_DSCav1)
aggagaaagcuuaccauggagcugcucauccugaaggccaacgccaucaccaccauccugacggcggugaccuucugcuucgccagcggccagaacaucaccgaggaguucuaccaguccacgugcagcgccgucuccaagggguaccucagcgcccugcggaccggcugguacaccuccgugaucaccaucgagcugagcaacaucaaggagaacaagugcaacgggaccgacgccaaggugaagcucaucaagcaggagcuggacaaguacaagaacgcggucacggagcugcagcuccugaugcaguccaccccggcaaccaacaaccgcgcccggcgcgagcugccccgguucaugaacuacacccucaacaacgccaagaagacgaacgugacccugagcaagaagcgcaagcggcgcuuccugggcuuccuccugggggugggcuccgccaucgcgagcggcgucgccgugugcaaggugcugcaccucgagggggaggucaacaagaucaagagcgcccugcuguccaccaacaaggccguggugagccucuccaacggcgucagcgugcugaccuucaaggugcuggaccucaagaacuacaucgacaagcagcugcugcccauccugaacaagcagagcugcuccaucagcaacaucgagacggugaucgaguuccagcagaagaacaaccggcuccuggagaucacccgcgaguucagcgugaacgccggggucaccacccccguguccacguacaugcugaccaacagcgagcuccugucccugaucaacgacaugccgaucaccaacgaccagaagaagcucaugagcaacaacgugcagaucguccggcagcaguccuacagcaucaugugcaucaucaaggaggaggugcuggcguacgugguccagcugccccucuacggcgugaucgacacccccugcuggaagcugcacacgagcccccugugcaccaccaacaccaaggagggguccaacaucugccucacgcgcaccgaccggggcugguacugcgacaacgccggcagcgucuccuucuucccgcaggccgagaccugcaaggugcagagcaaccgcguguucugcgacaccaugaacucccugacgcugcccagcgagguaaaccucugcaacgucgacaucuucaaccccaaguacgacugcaagaucaugaccuccaagaccgacgugagcuccagcgugaucaccucccugggggccaucgucagcugcuacggcaagacgaagugcaccgccagcaacaagaaccgggggaucaucaagaccuucuccaacggcugcgacuacgugagcaacaagggcguggacaccguguccgucgggaacacccuguacuacgugaacaagcaggagggcaagagccucuacgugaagggggagcccaucaucaacuucuacgacccgcuggucuuccccuccgacgaguucgacgcgagcaucucccaggugaacgagaagaucaaccagagccuggccuucauccgcaaguccgacgagcugcuccacaacgugaacgccggcaagagcacgaccaacaucaugaucaccaccaucaucaucgucaucaucgugauccugcugucccucaucgccguggggcugcugcucuacugcaaggcccggugaggacuaguuauaagacugacuagcccgaugggccucccaacgggcccuccuccccuccuugcaccgagauuaauaaaaaaaaaaaaaaaaaaaaaaaaaaaaaaaaaaaaaaaaaaaaaaaaaaaaaaaaaaaaaaaaugcaucccccccccccccccccccccccccccccccaaaggcucuuuucagagccaccagaauu

SEQ ID NO: 14597 - RNA, 1825 nt, Artificial Sequence
  HRSV-A/A2__P03420.1 fusion glycoprotein mRNA gc (F_DSCav1_mut4)
aggagaaagcuuaccauggagcugcucauccugaaggccaacgccaucaccaccauccugacggcggugaccuucugcuucgccagcggccagaacaucaccgaggaguucuaccaguccacgugcagcgccgucuccaagggguaccucagcgcccugcggaccggcugguacaccuccgugaucaccaucgagcugagcaacaucaaggagaacaagugcaacgggaccgacgccaaggugaagcucaucaagcaggagcuggacaaguacaagaacgcggucacggagcugcagcuccugaugcaguccaccccggcaaccggcuccggcuccgccaucugcagcggcgucgccgugugcaaggugcugcaccucgagggggaggucaacaagaucaagagcgcccugcuguccaccaacaaggccguggugagccucuccaacggcgucagcgugcugaccuucaaggugcuggaccucaagaacuacaucgacaagcagcugcugcccauccugaacaagcagagcugcuccaucagcaacaucgagacggugaucgaguuccagcagaagaacaaccggcuccuggagaucacccgcgaguucagcgugaacgccggggucaccacccccguguccacguacaugcugaccaacagcgagcuccugucccugaucaacgacaugccgaucaccaacgaccagaagaagcucaugagcaacaacgugcagaucguccggcagcaguccuacagcaucaugugcaucaucaaggaggaggugcuggcguacgugguccagcugccccucuacggcgugaucgacacccccugcuggaagcugcacacgagcccccugugcaccaccaacaccaaggagggguccaacaucugccucacgcgcaccgaccggggcugguacugcgacaacgccggcagcgucuccuucuucccgcaggccgagaccugcaaggugcagagcaaccgcguguucugcgacaccaugaacucccggacgcugcccagcgagguaaaccucugcaacgucgacaucuucaaccccaaguacgacugcaagaucaugaccuccaagaccgacgugagcuccagcgugaucaccucccugggggccaucgucagcugcuacggcaagacgaagugcaccgccagcaacaagaaccgggggaucaucaagaccuucuccaacggcugcgacuacgugagcaacaagggcguggacaccguguccgucgggaacacccuguacugcgugaacaagcaggagggcaagagccucuacgugaagggggagcccaucaucaacuucuacgacccgcuggucuuccccuccgacgaguucgacgcgagcaucucccaggugaacgagaagaucaaccagagccuggccuucauccgcaaguccgacgagcugcuccacaacgugaacgccggcaagagcacgaccaacaucaugaucaccaccaucaucaucgucaucaucgugauccugcugucccucaucgccguggggcugcugcucuacugcaaggcccggagcacgcccgucacccuguccaaggaccagcugagcggcaucaacaacaucgcguucuccaacugaggacuaguuauaagacugacuagcccgaugggccucccaacgggcccuccuccccuccuugcaccgagauuaauaaaaaaaaaaaaaaaaaaaaaaaaaaaaaaaaaaaaaaaaaaaaaaaaaaaaaaaaaaaaaaaaugcaucccccccccccccccccccccccccccccccaaaggcucuuuucagagccaccagaauu

SEQ ID NO: 14598 - RNA, 1762 nt, Artificial Sequence
  HRSV-A/A2__P03420.1 fusion glycoprotein mRNA gc (F-del_DSCav1_mut4)
aggagaaagcuuaccauggagcugcucauccugaaggccaacgccaucaccaccauccugacggcggugaccuucugcuucgccagcggccagaacaucaccgaggaguucuaccaguccacgugcagcgccgucuccaagggguaccucagcgcccugcggaccggcugguacaccuccgugaucaccaucgagcugagcaacaucaaggagaacaagugcaacgggaccgacgccaaggugaagcucaucaagcaggagcuggacaaguacaagaacgcggucacggagcugcagcuccugaugcaguccaccccggcaaccggcuccggcuccgccaucugcagcggcgucgccgugugcaaggugcugcaccucgagggggaggucaacaagaucaagagcgcccugcuguccaccaacaaggccguggugagccucuccaacggcgucagcgugcugaccuucaaggugcuggaccucaagaacuacaucgacaagcagcugcugcccauccugaacaagcagagcugcuccaucagcaacaucgagacggugaucgaguuccagcagaagaacaaccggcuccuggagaucacccgcgaguucagcgugaacgccggggucaccacccccguguccacguacaugcugaccaacagcgagcuccugucccugaucaacgacaugccgaucaccaacgaccagaagaagcucaugagcaacaacgugcagaucguccggcagcaguccuacagcaucaugugcaucaucaaggaggaggugcuggcguacgugguccagcugccccucuacggcgugaucgacacccccugcuggaagcugcacacgagcccccugugcaccaccaacaccaaggagggguccaacaucugccucacgcgcaccgaccggggcugguacugcgacaacgccggcagcgucuccuucuucccgcaggccgagaccugcaaggugcagagcaaccgcguguucugcgacaccaugaacucccggacgcugcccagcgagguaaaccucugcaacgucgacaucuucaaccccaaguacgacugcaagaucaugaccuccaagaccgacgugagcuccagcgugaucaccucccugggggccaucgucagcugcuacggcaagacgaagugcaccgccagcaacaagaaccgggggaucaucaagaccuucuccaacggcugcgacuacgugagcaacaagggcguggacaccguguccgucgggaacacccuguacugcgugaacaagcaggagggcaagagccucuacgugaagggggagcccaucaucaacuucuacgacccgcuggucuuccccuccgacgaguucgacgcgagcaucucccaggugaacgagaagaucaaccagagccuggccuucauccgcaaguccgacgagcugcuccacaacgugaacgccggcaagagcacgaccaacaucaugaucaccaccaucaucaucgucaucaucgugauccugcugucccucaucgccguggggcugcugcucuacugcaaggcccggugaggacuaguuauaagacugacuagcccgaugggccucccaacgggcccuccuccccuccuugcaccgagauuaauaaaaaaaaaaaaaaaaaaaaaaaaaaaaaaaaaaaaaaaaaaaaaaaaaaaaaaaaaaaaaaaaugcaucccccccccccccccccccccccccccccccaaaggcucuuuucagagccaccagaauu

SEQ ID NO: 14599 - RNA, 1828 nt, Artificial Sequence
  HRSV-A/A2__P03420.1 fusion glycoprotein mRNA gc (F_DSCav1_mut5)
aggagaaagcuuaccauggagcugcucauccugaaggccaacgccaucaccaccauccugacggcggugaccuucugcuucgccagcggccagaacaucaccgaggaguucuaccaguccacgugcagcgccgucuccaagggguaccucagcgcccugcggaccggcugguacaccuccgugaucaccaucgagcugagcaacaucaaggagaacaagugcaacgggaccgacgccaaggugaagcucaucaagcaggagcuggacaaguacaagaacgcggucacggagcugcagcuccugaugcaguccaccccggcaaccggcuccggcuccgccaucgcgagcggcgucgccgugugcaaggugcugcaccucgagggggaggucaacaagaucaagagcgcccugcuguccaccaacaaggccguggugagccucuccggcugcggcgucagcgugcugaccuucaaggugcuggaccucaagaacuacaucgacaagcagcugcugcccauccugaacaagcagagcugcuccaucagcaacaucgagacggugaucgaguuccagcagaagaacaaccggcuccuggagaucacccgcgaguucagcgugaacgccggggucaccacccccguguccacguacaugcugaccaacagcgagcuccugucccugaucaacgacaugccgaucaccaacgaccagaagaagcucaugagcaacaacgugcagaucguccggcagcaguccuacagcaucaugugcaucaucaaggaggaggugcuggcguacgugguccagcugccccucuacggcgugaucgacacccccugcuggaagcugcacacgagcccccugugcaccaccaacaccaaggagggguccaacaucugccucacgcgcaccgaccggggcugguacugcgacaacgccggcagcgucuccuucuucccgcaggccgagaccugcaaggugcagagcaaccgcguguucugcgacaccaugaacucccggacgcugcccagcgagguaaaccucugcaacgucgacaucuucaaccccaaguacgacugcaagaucaugaccuccaagaccgacgugagcuccagcgugaucaccucccugggggccaucgucagcugcuacggcaagacgaagugcaccgccagcaacaagugccgggggaucaucaagaccuucuccaacggcugcgacuacgugagcaacaagggcguggacaccguguccgucgggaacacccuguacuacgugaacaagcaggagggcaagagccucuacgugaagggggagcccaucaucaacuucuacgacccgcuggucuuccccuccgacgaguucgacgcgagcaucucccaggugaacgagaagaucaaccagagccuggccuucauccgcaaguccgacgagcugcuccacaacgugaacgccggcaagagcacgaccaacaucaugaucaccaccaucaucaucgucaucaucgugauccugcugucccucaucgccguggggcugcugcucuacugcaaggcccggagcacgcccgucacccuguccaaggaccagcugagcggcaucaacaacaucgcguucuccaacugaggacuaguuauaagacugacuagcccgaugggccucccaacgggcccuccuccccuccuugcaccgagauuaauaaaaaaaaaaaaaaaaaaaaaaaaaaaaaaaaaaaaaaaaaaaaaaaaaaaaaaaaaaaaaaaaugcaucccccccccccccccccccccccccccccccaaaggcucuuuucagagccaccagaauu

SEQ ID NO: 14600 - RNA, 1765 nt, Artificial Sequence
  HRSV-A/A2__P03420.1 fusion glycoprotein mRNA gc (F-del_DSCav1_mut5)
aggagaaagcuuaccauggagcugcucauccugaaggccaacgccaucaccaccauccugacggcggugaccuucugcuucgccagcggccagaacaucaccgaggaguucuaccaguccacgugcagcgccgucuccaagggguaccucagcgcccugcggaccggcugguacaccuccgugaucaccaucgagcugagcaacaucaaggagaacaagugcaacgggaccgacgccaaggugaagcucaucaagcaggagcuggacaaguacaagaacgcggucacggagcugcagcuccugaugcaguccaccccggcaaccggcuccggcuccgccaucgcgagcggcgucgccgugugcaaggugcugcaccucgagggggaggucaacaagaucaagagcgcccugcuguccaccaacaaggccguggugagccucuccggcugcggcgucagcgugcugaccuucaaggugcuggaccucaagaacuacaucgacaagcagcugcugcccauccugaacaagcagagcugcuccaucagcaacaucgagacggugaucgaguuccagcagaagaacaaccggcuccuggagaucacccgcgaguucagcgugaacgccggggucaccacccccguguccacguacaugcugaccaacagcgagcuccugucccugaucaacgacaugccgaucaccaacgaccagaagaagcucaugagcaacaacgugcagaucguccggcagcaguccuacagcaucaugugcaucaucaaggaggaggugcuggcguacgugguccagcugccccucuacggcgugaucgacacccccugcuggaagcugcacacgagcccccugugcaccaccaacaccaaggagggguccaacaucugccucacgcgcaccgaccggggcugguacugcgacaacgccggcagcgucuccuucuucccgcaggccgagaccugcaaggugcagagcaaccgcguguucugcgacaccaugaacucccggacgcugcccagcgagguaaaccucugcaacgucgacaucuucaaccccaaguacgacugcaagaucaugaccuccaagaccgacgugagcuccagcgugaucaccucccugggggccaucgucagcugcuacggcaagacgaagugcaccgccagcaacaagugccgggggaucaucaagaccuucuccaacggcugcgacuacgugagcaacaagggcguggacaccguguccgucgggaacacccuguacuacgugaacaagcaggagggcaagagccucuacgugaagggggagcccaucaucaacuucuacgacccgcuggucuuccccuccgacgaguucgacgcgagcaucucccaggugaacgagaagaucaaccagagccuggccuucauccgcaaguccgacgagcugcuccacaacgugaacgccggcaagagcacgaccaacaucaugaucaccaccaucaucaucgucaucaucgugauccugcugucccucaucgccguggggcugcugcucuacugcaaggcccggugaggacuaguuauaagacugacuagcccgaugggccucccaacgggcccuccuccccuccuugcaccgagauuaauaaaaaaaaaaaaaaaaaaaaaaaaaaaaaaaaaaaaaaaaaaaaaaaaaaaaaaaaaaaaaaaaugcaucccccccccccccccccccccccccccccccaaaggcucuuuucagagccaccagaauu

SEQ ID NO: 14601 - RNA, 802 nt, Artificial Sequence
  HRSV-A/A2__AAB86665.1 matrix protein mRNA gc (M2-1)
aggagaaagcuuaccaugagccgccggaaccccugcaaguucgagauccgcggccacugccugaacgggaagcggugccacuucucccacaacuacuucgaguggccgccccacgcccuccuggugcgccagaacuucaugcugaaccggauccucaagagcauggacaaguccaucgacacccugagcgagaucuccggcgccgcggagcuggaccgcaccgaggaguacgcccucggggucgugggcgugcuggagagcuacaucggguccaucaacaacaucacgaagcagagcgccugcgucgccauguccaagcugcucaccgagcugaacagcgacgacaucaagaagcugcgggacaacgaggagcucaacucccccaagauccgcguguacaacaccgugaucagcuacaucgaguccaaccggaagaacaacaagcagaccauccaccuccugaagcgccugcccgccgacguccugaagaagacgaucaagaacacccuggacauccacaagagcaucaccaucaacaacccgaaggaguccaccgugagcgacacgaacgaccacgcgaagaacaacgacaccaccugaggacuaguuauaagacugacuagcccgaugggccucccaacgggcccuccuccccuccuugcaccgagauuaauaaaaaaaaaaaaaaaaaaaaaaaaaaaaaaaaaaaaaaaaaaaaaaaaaaaaaaaaaaaaaaaaugcaucccccccccccccccccccccccccccccccaaaggcucuuuucagagccaccagaauu

SEQ ID NO: 14602 - RNA, 1942 nt, Artificial Sequence
  HRSV-A/RSVA/Homo sapiens/USA/84I-215A-01/1984__AHY21375.1 fusion glycoprotein mRNA human (F0)
aggagaaagcuuaccauggagcugcccauccucaagaccaacgccauuacaacuauacuugcugcagugacgcugugcuucgccagcucccagaauaucaccgaagaguuuuaccaaucuacauguucagcggucaguaaaggcuauuugagcgcuuuaagaacugggugguacaccuccguuauuacaaucgaacugucuaacauuaaggagaauaaaugcaacggaaccgacgccaaggugaaacuaaucaagcaggaacucgauaaguauaaaaaugcaguaacugagcugcagcuucugaugcagucgaccccugccgcuaacaauagggcacggcgcgaguugccacgauucaugaacuacacacucaauaacacgaagaauacuaacgugacccugagcaaaaagcguaaaagaagguuucuggguuuccucuuaggcgucgggucagccauagcuaguggaaucgccguguccaagguucugcaccuugaaggcgaggugaauaagauuaaaucugcguugcugagcacaaacaaggcagucgugucccuaucaaaugguguaaguguucucacuagcaaagugcuggaccuuaagaacuauaucgauaaacaacuguugccgauugucaacaagcagucuuguuccaucucaaauauagaaaccgugauugaguuucagcagaaaaacaaucggcuccuggagaucacacgcgaguucagcgugaacgccggggucaccacgcccguuaguacuuacauguuaacaaauucugaacugcucucccuuauuaacgacaugccuaucaccaaugaucaaaagaagcugaugagcaacaaugugcagaucguaagacagcagucguauucuauuauguccauaaucaaagaagagguguuggcuuacgucgugcaacuaccacuguacggaguuauugacacucccugcuggaagcuccauacaucaccucuguguaccacgaacaccaaagaaggcaguaauaucugccuuacaaggacugaucggggcugguauugugacaacgccgggagcguguccuuuuucccacaggcagagaccugcaagguccagucuaaucgcguguuuugugauacaaugaacagccugacuuugcccucagagguaaaucucugcaacauagacauuuucaacccuaaauacgauuguaagaucaugaccaguaagacagacguuuccagcucugugaucaccucacugggagcuauugucaguugcuaugguaaaacuaagugcacggccagcaauaaaaaccgaggcaucauuaagacauuuuccaaugggugugauuacgugucuaacaaaggagucgacaccgugucgguuggcaauacuuuauauuacgugaacaagcaagaagguaagagccuguauguaaaaggggagccaauaaucaauuucuacgacccgcuagucuuucccuccgaugaguucgacgcgucaauuagucaggugaacgaaaagaucaaucagucucucgccuucaucagaaaaagcgaugaacugcuucacaacguuaaugcaggaaaguccaccacaaacauuaugauaaccacuaucauuaucgugauuaucgucauauugcugucacucaucgcugugggccugcuucuguacugcaaagccaggagcacaccuguaacguugucuaaggaccagcucuccggcauuaauaacaucgcuuuuaguaauugaggacuaguuauaagacugacuagcccgaugggccucccaacgggcccuccuccccuccuugcaccgagauuaauaaaaaaaaaaaaaaaaaaaaaaaaaaaaaaaaaaaaaaaaaaaaaaaaaaaaaaaaaaaaaaaaugcaucccccccccccccccccccccccccccccccaaaggcucuuuucagagccaccagaauu

SEQ ID NO: 14603 - RNA, 1942 nt, Artificial Sequence
  HRSV-A/A2__P03420.1 fusion glycoprotein mRNA human (F0)
aggagaaagcuuaccauggagcugcucauccuuaaggccaacgcuauuaccacaauacugacugcagugacguucugcuuugccagcggccagaauaucaccgaagaguucuaccaauccacauguucugcggucucaaaaggguauuugagugcuuuaagaacuggaugguacaccagcguuauuacaaucgaacuguccaacauuaaggagaauaaaugcaacgguaccgacgccaaggugaaacuaaucaagcaggaacucgauaaguauaaaaaugcaguaacugagcugcagcuucugaugcagucuacacccgccaccaacaauagggcucggcgcgaguugccucgauuuaugaacuacacgcucaauaacgcaaagaaaacuaaugugacccugucgaagaaacguaagagaagguuccugggcuuucucuuaggggucggaucagccauagcuagcggcguggccguuaguaaggugcugcaccuugaaggugaggucaacaaaaucaaguccgcguugcugucuacaaauaaagcagugguaagccuauccaacgggguuucagugcucacuucuaagguccuggaccuuaaaaauuauauugauaagcaacuguugccaaucgugaacaaacagagcuguucuauuuccaacaucgaaaccgugauagaguuccagcagaagaauaaccggcuccuggagauuacacgcgaauuuucagucaaugccggaguuaccacgccggugagcacuuacauguuaacaaacagugagcugcucucucuuaucaaugacaugcccauuaccaacgaucaaaagaaacugauguccaauaacguacagaucgugagacagcagagcuauucgaucaugucuauuauaaaggaagaggucuuggcuuacgugguucaacuaccucuguacggcgugaucgacacuccaugcuggaaacuccauacauccccacuguguaccacgaauaccaaggaaggcucaaacauuugccuuacaaggacugaucgggggugguauugugacaaugccggaagugucagcuucuuuccucaggcagagaccugcaaagugcaguccaaccgcguauucugugauacaaugaauagucugacuuugccaagcgagguuaaccucugcaauguggacaucuuuaaccccaaguacgauuguaagauaaugaccucaaaaacagacgucaguuccagcgugauuaccucucugggugcuaucgucucaugcuauggcaagacuaaaugcacggccaguaacaagaaucgagggaucauuaaaacauucagcaacggaugugauuacguguccaauaagggcguugacaccgugucuguagguaacacuuuauauuacgucaauaagcaagaagggaaaucgcuguaugugaagggagagccuaucauuaacuuuuacgacccccuaguuuucccgagcgaugaauuugacgcguccauaucacaggugaaugagaaaaucaaccagagucucgccuucauuagaaagucugaugaacugcuucacaaugucaacgcaggcaaaagcaccacaaauaucaugaucaccacuauuauaaucgugauuaucguaauuuugcugucccucaucgcugugggccugcuucuguacugcaaggccaggucaacacccguuacguugagcaaggaccagcucucugggauaaacaauaucgcuuucuccaacugaggacuaguuauaagacugacuagcccgaugggccucccaacgggcccuccuccccuccuugcaccgagauuaauaaaaaaaaaaaaaaaaaaaaaaaaaaaaaaaaaaaaaaaaaaaaaaaaaaaaaaaaaaaaaaaaugcaucccccccccccccccccccccccccccccccaaaggcucuuuucagagccaccagaauu

SEQ ID NO: 14604 - RNA, 1879 nt, Artificial Sequence
  HRSV-A/A2__P03420.1 fusion glycoprotein mRNA human (F-del)
aggagaaagcuuaccauggagcugcucauccuuaaggccaacgcuauuaccacaauacugacugcagugacguucugcuuugccagcggccagaauaucaccgaagaguucuaccaauccacauguucugcggucucaaaaggguauuugagugcuuuaagaacuggaugguacaccagcguuauuacaaucgaacuguccaacauuaaggagaauaaaugcaacgguaccgacgccaaggugaaacuaaucaagcaggaacucgauaaguauaaaaaugcaguaacugagcugcagcuucugaugcagucuacacccgccaccaacaauagggcucggcgcgaguugccucgauuuaugaacuacacgcucaauaacgcaaagaaaacuaaugugacccugucgaagaaacguaagagaagguuccugggcuuucucuuaggggucggaucagccauagcuagcggcguggccguuaguaaggugcugcaccuugaaggugaggucaacaaaaucaaguccgcguugcugucuacaaauaaagcagugguaagccuauccaacgggguuucagugcucacuucuaagguccuggaccuuaaaaauuauauugauaagcaacuguugccaaucgugaacaaacagagcuguucuauuuccaacaucgaaaccgugauagaguuccagcagaagaauaaccggcuccuggagauuacacgcgaauuuucagucaaugccggaguuaccacgccggugagcacuuacauguuaacaaacagugagcugcucucucuuaucaaugacaugcccauuaccaacgaucaaaagaaacugauguccaauaacguacagaucgugagacagcagagcuauucgaucaugucuauuauaaaggaagaggucuuggcuuacgugguucaacuaccucuguacggcgugaucgacacuccaugcuggaaacuccauacauccccacuguguaccacgaauaccaaggaaggcucaaacauuugccuuacaaggacugaucgggggugguauugugacaaugccggaagugucagcuucuuuccucaggcagagaccugcaaagugcaguccaaccgcguauucugugauacaaugaauagucugacuuugccaagcgagguuaaccucugcaauguggacaucuuuaaccccaaguacgauuguaagauaaugaccucaaaaacagacgucaguuccagcgugauuaccucucugggugcuaucgucucaugcuauggcaagacuaaaugcacggccaguaacaagaaucgagggaucauuaaaacauucagcaacggaugugauuacguguccaauaagggcguugacaccgugucuguagguaacacuuuauauuacgucaauaagcaagaagggaaaucgcuguaugugaagggagagccuaucauuaacuuuuacgacccccuaguuuucccgagcgaugaauuugacgcguccauaucacaggugaaugagaaaaucaaccagagucucgccuucauuagaaagucugaugaacugcuucacaaugucaacgcaggcaaaagcaccacaaauaucaugaucaccacuauuauaaucgugauuaucguaauuuugcugucccucaucgcugugggccugcuucuguacugcaaggccaggugaggacuaguuauaagacugacuagcccgaugggccucccaacgggcccuccuccccuccuugcaccgagauuaauaaaaaaaaaaaaaaaaaaaaaaaaaaaaaaaaaaaaaaaaaaaaaaaaaaaaaaaaaaaaaaaaugcaucccccccccccccccccccccccccccccccaaaggcucuuuucagagccaccagaauu

SEQ ID NO: 14605 - RNA, 1942 nt, Artificial Sequence
  HRSV-A/A2__P03420.1 fusion glycoprotein mRNA human (F0_DSCav1)
aggagaaagcuuaccauggagcugcucauccuuaaggccaacgcuauuaccacaauacugacugcagugacguucugcuuugccagcggccagaauaucaccgaagaguucuaccaauccacauguucugcggucucaaaaggguauuugagugcuuuaagaacuggaugguacaccagcguuauuacaaucgaacuguccaacauuaaggagaauaaaugcaacgguaccgacgccaaggugaaacuaaucaagcaggaacucgauaaguauaaaaaugcaguaacugagcugcagcuucugaugcagucuacacccgccaccaacaauagggcucggcgcgaguugccucgauuuaugaacuacacgcucaauaacgcaaagaaaacuaaugugacccugucgaagaaacguaagagaagguuccugggcuuucucuuaggggucggaucagccauagcuagcggcguggccguuuguaaggugcugcaccuugaaggugaggucaacaaaaucaagagugcguugcuguccacaaauaaagcagugguaucucuaagcaacgggguuuccgugcucacuuucaagguccuggaccuuaaaaauuauauugauaagcaacuguugccaauccucaacaaacagucaugcaguauuagcaacaucgaaaccgugauagaguuucagcagaagaauaaccggcuguuagagauuacacgcgaguucucugugaaugccggagucaccacgccgguuuccacuuacaugcugacaaacucagaacuccuuagccugaucaaugacaugcccauuaccaacgaucaaaagaaauugaugaguaauaacgugcagaucguaagacagcagucuuauuccaucauguguauuauaaaggaagaggugcuagcuuacgucgugcaacugccucucuacggcguuaucgacacuccaugcuggaaacugcauacaagcccccuuuguaccacgaauaccaaggaaggcucgaacauuugccugacaaggacugaucgggggugguauugugacaaugccggaucuguguccuuuuucccucaggcagagaccugcaaaguccagucaaaccgcguguuuugugauacaaugaauaguuugacucucccaagcgagguaaaccugugcaauguugacaucuucaaccccaaguacgauugcaagauaaugaccuccaaaacagacgugucuagcucagucauuaccaguuuaggugcuaucguguccuguuauggcaagacuaaaugcacggccagcaacaagaaucgagggaucauuaaaacauuuucuaacggaugugauuacgucucaaauaagggcguggacaccguuaguguggguaacacucuguauuacguaaauaagcaagaagggaaaagccuauaugucaagggagagccuaucauuaacuucuacgacccacucguguucccguccgaugaauuugacgcgucuauaucgcagguuaaugagaaaaucaaccagagccuggccuucauuagaaaguccgaugaacuuuugcacaaugugaacgcaggcaaaucaaccacaaauaucaugaucaccacuauuauaaucgucauuaucgugauucugcucagucugaucgcuguaggccuucuguuguacugcaaggccaggucuacacccgugacgcucagcaaggaccagcuguccgggauaaacaauaucgcuuuuucaaacugaggacuaguuauaagacugacuagcccgaugggccucccaacgggcccuccuccccuccuugcaccgagauuaauaaaaaaaaaaaaaaaaaaaaaaaaaaaaaaaaaaaaaaaaaaaaaaaaaaaaaaaaaaaaaaaaugcaucccccccccccccccccccccccccccccccaaaggcucuuuucagagccaccagaauu

SEQ ID NO: 14606 - RNA, 1879 nt, Artificial Sequence
  HRSV-A/A2__P03420.1 fusion glycoprotein mRNA human (F-del_DSCav1)
aggagaaagcuuaccauggagcugcucauccuuaaggccaacgcuauuaccacaauacugacugcagugacguucugcuuugccagcggccagaauaucaccgaagaguucuaccaauccacauguucugcggucucaaaaggguauuugagugcuuuaagaacuggaugguacaccagcguuauuacaaucgaacuguccaacauuaaggagaauaaaugcaacgguaccgacgccaaggugaaacuaaucaagcaggaacucgauaaguauaaaaaugcaguaacugagcugcagcuucugaugcagucuacacccgccaccaacaauagggcucggcgcgaguugccucgauuuaugaacuacacgcucaauaacgcaaagaaaacuaaugugacccugucgaagaaacguaagagaagguuccugggcuuucucuuaggggucggaucagccauagcuagcggcguggccguuuguaaggugcugcaccuugaaggugaggucaacaaaaucaagagugcguugcuguccacaaauaaagcagugguaucucuaagcaacgggguuuccgugcucacuuucaagguccuggaccuuaaaaauuauauugauaagcaacuguugccaauccucaacaaacagucaugcaguauuagcaacaucgaaaccgugauagaguuucagcagaagaauaaccggcuguuagagauuacacgcgaguucucugugaaugccggagucaccacgccgguuuccacuuacaugcugacaaacucagaacuccuuagccugaucaaugacaugcccauuaccaacgaucaaaagaaauugaugaguaauaacgugcagaucguaagacagcagucuuauuccaucauguguauuauaaaggaagaggugcuagcuuacgucgugcaacugccucucuacggcguuaucgacacuccaugcuggaaacugcauacaagcccccuuuguaccacgaauaccaaggaaggcucgaacauuugccugacaaggacugaucgggggugguauugugacaaugccggaucuguguccuuuuucccucaggcagagaccugcaaaguccagucaaaccgcguguuuugugauacaaugaauaguuugacucucccaagcgagguaaaccugugcaauguugacaucuucaaccccaaguacgauugcaagauaaugaccuccaaaacagacgugucuagcucagucauuaccaguuuaggugcuaucguguccuguuauggcaagacuaaaugcacggccagcaacaagaaucgagggaucauuaaaacauuuucuaacggaugugauuacgucucaaauaagggcguggacaccguuaguguggguaacacucuguauuacguaaauaagcaagaagggaaaagccuauaugucaagggagagccuaucauuaacuucuacgacccacucguguucccguccgaugaauuugacgcgucuauaucgcagguuaaugagaaaaucaaccagagccuggccuucauuagaaaguccgaugaacuuuugcacaaugugaacgcaggcaaaucaaccacaaauaucaugaucaccacuauuauaaucgucauuaucgugauucugcucagucugaucgcuguaggccuucuguuguacugcaaggccaggugaggacuaguuauaagacugacuagcccgaugggccucccaacgggcccuccuccccuccuugcaccgagauuaauaaaaaaaaaaaaaaaaaaaaaaaaaaaaaaaaaaaaaaaaaaaaaaaaaaaaaaaaaaaaaaaaugcaucccccccccccccccccccccccccccccccaaaggcucuuuucagagccaccagaauu

SEQ ID NO: 14607 - RNA, 1825 nt, Artificial Sequence
  HRSV-A/A2__P03420.1 fusion glycoprotein mRNA human (F_DSCav1_mut4)
aggagaaagcuuaccauggagcugcucauccuuaaggccaacgcuauuaccacaauacugacugcagugacguucugcuuugccagcggccagaauaucaccgaagaguucuaccaauccacauguucugcggucucaaaaggguauuugagugcuuuaagaacuggaugguacaccagcguuauuacaaucgaacuguccaacauuaaggagaauaaaugcaacgguaccgacgccaaggugaaacuaaucaagcaggaacucgauaaguauaaaaaugcaguaacugagcugcagcuucugaugcagucuacacccgccaccggcucggggucagcuauauguagcggaguggcagucugcaagguguugcaccucgagggcgaaguuaacaaaaucaagagugcccugcuguccacgaauaaagcuguggucucucucagcaacgguguguccguauuaacuuuuaagguucuggaccuuaagaauuacauugauaaacaauugcugccuauccuaaacaagcagucauguaguauuagcaauaucgagaccgugauagaguuccagcagaaaaacaauaggcuccuggaaauuacacgggaguuuucugucaacgccggggugacuaccccaguguccacauauaugcuuaccaauucagaacuguugagccucaucaacgacaugccgauuacgaacgaucaaaagaaacugaugaguaauaacguccagaucguucgccagcagucuuacuccaucaugugcauuauaaaggaggaaguguuagcguauguagugcaacugccccucuacggagucaucgacacuccuuguuggaaacuucauacaagcccacugugcaccacuaauacaaaggagggcucgaacauuuguuugacccgaacggaucguggcugguacugcgacaaugcagggucuguguccuucuuuccccaggccgaaaccuguaagguucagucaaacagaguguucugcgauacaaugaauaguaggacucuaccuagcgaggucaaccugugcaauguggacaucuuuaacccaaaauaugauuguaagauaaugaccuccaaaacagacguaucuagcucaguuauuaccagucucggagcuaucguguccugcuacgguaagacuaaauguacagccagcaauaagaaccggggcaucauuaagaccuucucuaaugggugcgauuaugucucaaacaaaggaguggacacugucagugugggcaauacgcuguacuguguuaacaagcaagaggguaaaagccuuuaugugaagggggaacccaucauuaacuuuuacgacccucugguauucccauccgaugaguuugacgcaucuauaucgcaggucaaugagaaaaucaaccagagcuuggcuuucauucgcaaguccgaugaacuccugcacaaugugaacgccggaaagucaacaaccaauaucaugaucacuaccauuauaaucguuauuaucgugauuuuacugagucuaaucgcggucggccuccugcuuuauugcaaagccagaucuacaccggugaccuugagcaaggaccagcuguccggcauaaacaauaucgcauucucaaacugaggacuaguuauaagacugacuagcccgaugggccucccaacgggcccuccuccccuccuugcaccgagauuaauaaaaaaaaaaaaaaaaaaaaaaaaaaaaaaaaaaaaaaaaaaaaaaaaaaaaaaaaaaaaaaaaugcaucccccccccccccccccccccccccccccccaaaggcucuuuucagagccaccagaauu

SEQ ID NO: 14608 - RNA, 1762 nt, Artificial Sequence
  HRSV-A/A2__P03420.1 fusion glycoprotein mRNA human (F-del_DSCav1_mut4)
aggagaaagcuuaccauggagcugcucauccuuaaggccaacgcuauuaccacaauacugacugcagugacguucugcuuugccagcggccagaauaucaccgaagaguucuaccaauccacauguucugcggucucaaaaggguauuugagugcuuuaagaacuggaugguacaccagcguuauuacaaucgaacuguccaacauuaaggagaauaaaugcaacgguaccgacgccaaggugaaacuaaucaagcaggaacucgauaaguauaaaaaugcaguaacugagcugcagcuucugaugcagucuacacccgccaccggcucggggucagcuauauguagcggaguggcagucugcaagguguugcaccucgagggcgaaguuaacaaaaucaagagugcccugcuguccacgaauaaagcuguggucucucucagcaacgguguguccguauuaacuuuuaagguucuggaccuuaagaauuacauugauaaacaauugcugccuauccuaaacaagcagucauguaguauuagcaauaucgagaccgugauagaguuccagcagaaaaacaauaggcuccuggaaauuacacgggaguuuucugucaacgccggggugacuaccccaguguccacauauaugcuuaccaauucagaacuguugagccucaucaacgacaugccgauuacgaacgaucaaaagaaacugaugaguaauaacguccagaucguucgccagcagucuuacuccaucaugugcauuauaaaggaggaaguguuagcguauguagugcaacugccccucuacggagucaucgacacuccuuguuggaaacuucauacaagcccacugugcaccacuaauacaaaggagggcucgaacauuuguuugacccgaacggaucguggcugguacugcgacaaugcagggucuguguccuucuuuccccaggccgaaaccuguaagguucagucaaacagaguguucugcgauacaaugaauaguaggacucuaccuagcgaggucaaccugugcaauguggacaucuuuaacccaaaauaugauuguaagauaaugaccuccaaaacagacguaucuagcucaguuauuaccagucucggagcuaucguguccugcuacgguaagacuaaauguacagccagcaauaagaaccggggcaucauuaagaccuucucuaaugggugcgauuaugucucaaacaaaggaguggacacugucagugugggcaauacgcuguacuguguuaacaagcaagaggguaaaagccuuuaugugaagggggaacccaucauuaacuuuuacgacccucugguauucccauccgaugaguuugacgcaucuauaucgcaggucaaugagaaaaucaaccagagcuuggcuuucauucgcaaguccgaugaacuccugcacaaugugaacgccggaaagucaacaaccaauaucaugaucacuaccauuauaaucguuauuaucgugauuuuacugagucuaaucgcggucggccuccugcuuuauugcaaagccagaugaggacuaguuauaagacugacuagcccgaugggccucccaacgggcccuccuccccuccuugcaccgagauuaauaaaaaaaaaaaaaaaaaaaaaaaaaaaaaaaaaaaaaaaaaaaaaaaaaaaaaaaaaaaaaaaaugcaucccccccccccccccccccccccccccccccaaaggcucuuuucagagccaccagaauu

SEQ ID NO: 14609 - RNA, 1828 nt, Artificial Sequence
  HRSV-A/A2__P03420.1 fusion glycoprotein mRNA human (F_DSCav1_mut5)
aggagaaagcuuaccauggagcugcucauccuuaaggccaacgcuauuaccacaauacugacugcagugacguucugcuuugccagcggccagaauaucaccgaagaguucuaccaauccacauguucugcggucucaaaaggguauuugagugcuuuaagaacuggaugguacaccagcguuauuacaaucgaacuguccaacauuaaggagaauaaaugcaacgguaccgacgccaaggugaaacuaaucaagcaggaacucgauaaguauaaaaaugcaguaacugagcugcagcuucugaugcagucuacacccgccaccggcucggggucagcuauagcaagcggaguggccgucuguaagguguugcaccucgagggcgaaguuaacaaaaucaagagugcucugcuguccacgaauaaagccguggucucucucagcgguugcgggguguccguauuaacuuuuaagguucuggaccuuaagaacuacauugauaaacaauugcugccuauccuaaauaagcagucauguaguauuagcaacaucgagaccgugauagaguuccagcagaaaaauaacaggcuccuggaaauuacacgggaguuuucugucaaugcgggagugacuaccccaguguccacauauaugcuuaccaacucagaacuguugagccucaucaaugacaugccgauuacgaacgaucaaaagaaacugaugaguaacaauguccagaucguucgccagcagucuuacuccaucaugugcauuauaaaggaggaaguguuagcauauguagugcaacugccccucuacggcgucaucgacacuccuuguuggaaacuucauacaagcccacugugcaccacuaacacaaaggagggcucgaauauuuguuugacccgaacggaucgugggugguacugcgacaacgccggaucuguguccuucuuuccccaggcugaaaccuguaagguucagucaaauagaguguucugcgauacaaugaacaguaggacucuaccuagcgaggucaaucugugcaacguggacaucuuuaauccaaaauaugauuguaagauaaugaccuccaaaacagacguaucuagcucaguuauuaccagucucggugccaucguguccugcuacggcaagacuaaauguacagcaagcaacaagugccgggggaucauuaagaccuucucuaauggaugugauuaugucucaaacaaaggcguggacacugucaguguggguaauacgcuguacuauguuaacaagcaagaggggaaaagccuuuacgugaagggagaacccaucauuaauuuuuaugacccucugguauucccauccgaugaguuugacgcuucuauaucgcaggucaacgagaaaaucaaccagagcuuggccuucauucgcaaguccgaugaacuccugcacaaugugaacgcgggcaagucaacaaccaauaucaugaucacuaccauuauaaucguuauuaucgugauuuuacugagucuaaucgccgucggccuccugcuuuacugcaaagcaagaucuacaccggugaccuugagcaaggaccagcuguccgggauaaacaauaucgcuuucucaaacugaggacuaguuauaagacugacuagcccgaugggccucccaacgggcccuccuccccuccuugcaccgagauuaauaaaaaaaaaaaaaaaaaaaaaaaaaaaaaaaaaaaaaaaaaaaaaaaaaaaaaaaaaaaaaaaaugcaucccccccccccccccccccccccccccccccaaaggcucuuuucagagccaccagaauu

SEQ ID NO: 14610 - RNA, 1765 nt, Artificial Sequence
  HRSV-A/A2__P03420.1 fusion glycoprotein mRNA human (F-del_DSCav1_mut5)
aggagaaagcuuaccauggagcugcucauccuuaaggccaacgcuauuaccacaauacugacugcagugacguucugcuuugccagcggccagaauaucaccgaagaguucuaccaauccacauguucugcggucucaaaaggguauuugagugcuuuaagaacuggaugguacaccagcguuauuacaaucgaacuguccaacauuaaggagaauaaaugcaacgguaccgacgccaaggugaaacuaaucaagcaggaacucgauaaguauaaaaaugcaguaacugagcugcagcuucugaugcagucuacacccgccaccggcucggggucagcuauagcaagcggaguggccgucuguaagguguugcaccucgagggcgaaguuaacaaaaucaagagugcucugcuguccacgaauaaagccguggucucucucagcgguugcgggguguccguauuaacuuuuaagguucuggaccuuaagaacuacauugauaaacaauugcugccuauccuaaauaagcagucauguaguauuagcaacaucgagaccgugauagaguuccagcagaaaaauaacaggcuccuggaaauuacacgggaguuuucugucaaugcgggagugacuaccccaguguccacauauaugcuuaccaacucagaacuguugagccucaucaaugacaugccgauuacgaacgaucaaaagaaacugaugaguaacaauguccagaucguucgccagcagucuuacuccaucaugugcauuauaaaggaggaaguguuagcauauguagugcaacugccccucuacggcgucaucgacacuccuuguuggaaacuucauacaagcccacugugcaccacuaacacaaaggagggcucgaauauuuguuugacccgaacggaucgugggugguacugcgacaacgccggaucuguguccuucuuuccccaggcugaaaccuguaagguucagucaaauagaguguucugcgauacaaugaacaguaggacucuaccuagcgaggucaaucugugcaacguggacaucuuuaauccaaaauaugauuguaagauaaugaccuccaaaacagacguaucuagcucaguuauuaccagucucggugccaucguguccugcuacggcaagacuaaauguacagcaagcaacaagugccgggggaucauuaagaccuucucuaauggaugugauuaugucucaaacaaaggcguggacacugucaguguggguaauacgcuguacuauguuaacaagcaagaggggaaaagccuuuacgugaagggagaacccaucauuaauuuuuaugacccucugguauucccauccgaugaguuugacgcuucuauaucgcaggucaacgagaaaaucaaccagagcuuggccuucauucgcaaguccgaugaacuccugcacaaugugaacgcgggcaagucaacaaccaauaucaugaucacuaccauuauaaucguuauuaucgugauuuuacugagucuaaucgccgucggccuccugcuuuacugcaaagcaagaugaggacuaguuauaagacugacuagcccgaugggccucccaacgggcccuccuccccuccuugcaccgagauuaauaaaaaaaaaaaaaaaaaaaaaaaaaaaaaaaaaaaaaaaaaaaaaaaaaaaaaaaaaaaaaaaaugcaucccccccccccccccccccccccccccccccaaaggcucuuuucagagccaccagaauu

SEQ ID NO: 14611 - RNA, 802 nt, Artificial Sequence
  HRSV-A/A2__AAB86665.1 matrix protein mRNA human (M2-1)
aggagaaagcuuaccaugagcagaaggaaccccugcaaguucgagauccggggccacugucugaaugggaaacgcugccauuuuucccacaacuacuucgaauggccuccacaugcacuccuugugcgacagaauuuuaugcugaaccguauuuugaagucuauggacaaaucaauagauaccuuaagugagaucagcggagcugcagaacuggacagaacagaggaauaugcccuaggugucguuggcgugcucgaguccuacauugggucuaucaauaacauuacuaagcaaucggcguguguagcuaugucaaaacugcuuacggagcugaauagcgaugacaucaagaaguugagggauaacgaagaguuaaauaguccgaaaauacggguguauaacaccgucaucuccuacauugaaucuaaucgcaagaacaauaaacagacaauccaucugcugaagagacuccccgccgacgugcucaaaaagacuauuaagaacacccuggauauccacaaaagcauaacaauuaauaacccuaaggaguccaccguuucagacacuaacgaucacgccaaaaauaacgacacaaccugaggacuaguuauaagacugacuagcccgaugggccucccaacgggcccuccuccccuccuugcaccgagauuaauaaaaaaaaaaaaaaaaaaaaaaaaaaaaaaaaaaaaaaaaaaaaaaaaaaaaaaaaaaaaaaaaugcaucccccccccccccccccccccccccccccccaaaggcucuuuucagagccaccagaauu

SEQ ID NO: 14612 - protein, 539 aa, Artificial Sequence
  HPIV3/Homo sapiens/PER/FLA4571/2008__AHX22069.1 fusion glycoprotein (F0)
MPISILLIITTMIMASHCQIDITKLQHVGVLVNSPKGMKISQNFETRYLILSLIPKIEDSNSCGDQQIKQYKRLLDRLIIPLYDGLRLQKDVIVTNQESNENTDPRTERFFGGVIGTIALGVATSAQITAAVALVEAKQARSDIEKLKEAIRDTNKAVQSVQSSVGNLIVAIKSVQDYVNKEIVPSIARLGCEAAGLQLGIALTQHYSELTNIFGDNIGSLQEKGIKLQGIASLYRTNITEIFTTSTVDKYDIYDLLFTESIKVRVIDVDLNDYSITLQVRLPLLTRLLNTQIYKVDSISYNIQNREWYIPLPSHIMTKGAFLGGADVKECIEAFSSYICPSDPGFVLNHEMESCLSGNISQCPRTTVTSDIVPRYAFVNGGVVANCITTTCTCNGIGNRINQPPDQGVKIITHKECNTIGINGMLFNTNKEGTLAFYTPDDITLNNSVALDPIDISIELNKAKSDLEESKEWIRRSNQKLDSIGSWHQSSTTIIVILIMMIILFIINITIITIAIKYYRIQKRNRVDQNDKPYVLTNK

SEQ ID NO: 14613 - protein, 572 aa, Artificial Sequence
  HPIV3/BJ/001/08__ADX01268.1 hemagglutinin-neuraminidase (HN)
MEYWKHTNHGKDAGNELETSTATHGNKLTNKITYILWTITLVLLSIVFIIVLTNSIKSEKARESLLQDINNEFMEVTEKIQVASDNTNDLIQSGVNTRLLTIQSHVQNYIPISLTQQISDLRKFISEITIRNDNQEVPPQRITHDVGIKPLNPDDFWRCTSGLPSLMKTPKIRLMPGPGLLAMPTTVDGCVRTPSLVINDLIYAYTSNLITRGCQDIGKSYQVLQIGIITVNSDLVPDLNPRISHTFNINDNRKSCSLALLNTDVYQLCSTPKVDERSDYASSGIEDIVLDIVNYDGSISTTRFKNNNISFDQPYAALYPSVGPGIYYKGKIIFLGYGGLEHPINENAICNTTGCPGKTQRDCNQASHSPWFSDRRMVNSIIVVDKGLNSVPKLKVWTISMRQNYWGSEGRLLLLGNKIYIYTRSTSWHSKLQLGIIDITDYSDIRIKWTWHNVLSRPGNNECPWGHSCPDGCITGVYTDAYPLNPTGSIVSSVILDSQKSRVNPVITYSTATERVNELAIRNKTLSAGYTTTSCITHYNKGYCFHIVEINHKSLNTFQPMLFKTEIPKSCS

SEQ ID NO: 14614 - RNA, 1620 nt, Artificial Sequence
  HPIV3/Homo sapiens/PER/FLA4571/2008__AHX22069.1 fusion glycoprotein CDS gc (F0)
augcccaucagcauccugcucaucaucaccaccaugaucauggccucccacugccagaucgacaucacgaagcugcagcacgugggcguccuggugaacagcccgaaggggaugaagaucucccagaacuucgagacccgcuaccucauccugagccugauccccaagaucgaggacuccaacagcugcggcgaccagcagaucaagcaguacaagcggcuccuggaccgccugaucaucccccucuacgacgggcugcggcugcagaaggacgugaucgucaccaaccaggaguccaacgagaacaccgacccccgcacggagcgguucuucggcggggugaucggcaccaucgcccucggcguggcgaccagcgcccagaucaccgccgccgucgcccugguggaggcgaagcaggcccgcuccgacaucgagaagcugaaggaggccauccgggacacgaacaaggccgugcagagcguccaguccagcguggggaaccucaucguggcgaucaaguccguccaggacuacgugaacaaggagaucgugccgagcaucgcccgccugggcugcgaggccgccgggcugcagcucggcaucgcccugacccagcacuacuccgagcugaccaacaucuucggggacaacaucggcagccuccaggagaagggcaucaagcugcaggggaucgcgucccuguaccggaccaacaucacggagaucuucaccaccagcaccgucgacaaguacgacaucuacgaccuccuguucacggaguccaucaaggugcgcgugaucgacgucgaccugaacgacuacagcaucacccuccaggugcggcugccccugcucacccgccugcugaacacccagaucuacaagguggacagcaucuccuacaacauccagaaccgggagugguacaucccccuccccagccacaucaugacgaagggcgccuuccucgggggcgccgacgucaaggagugcaucgaggccuucuccagcuacaucugcccguccgaccccggcuucgugcugaaccacgagauggagagcugccuguccgggaacaucagccagugcccccgcaccaccgugaccuccgacaucgucccccgguacgccuucgugaacggcggggucguggcgaacugcaucacgacgaccugcacgugcaacggcaucgggaaccgcaucaaccagccgcccgaccagggcgugaagaucaucacccacaaggagugcaacaccaucggcaucaacgggaugcuguucaacaccaacaaggagggcacccuggccuucuacacccccgacgacaucacccucaacaacagcgucgcccuggaccccaucgacaucuccaucgagcugaacaaggccaagagcgaccucgaggaguccaaggaguggauccggcgcagcaaccagaagcuggacuccaucgggagcuggcaccaguccagcaccaccaucaucgugauccugaucaugaugaucauccucuucaucaucaacaucacgaucaucaccaucgccaucaaguacuaccggauccagaagcgcaaccggguggaccagaacgacaagccguacguccugaccaacaaguga

SEQ ID NO: 14615 - RNA, 1719 nt, Artificial Sequence
  HPIV3/BJ/001/08__ADX01268.1 hemagglutinin-neuraminidase (HN)
auggaguacuggaagcacaccaaccacggcaaggacgccgggaacgagcuggagaccagcacggccacccacggcaacaagcucaccaacaagaucaccuacauccuguggacgaucacccuggugcuccuguccaucgucuucaucaucgugcugaccaacagcaucaaguccgagaaggcgcgcgagagccuccugcaggacaucaacaacgaguucauggaggugaccgagaagauccaggucgccuccgacaacacgaacgaccugauccagagcggggugaacacccggcuccugaccauccagucccacgugcagaacuacauccccaucagccugacccagcagaucuccgaccuccgcaaguucaucagcgagaucacgauccggaacgacaaccaggaggucccgccccagcgcaucacccacgacgugggcaucaagccccugaaccccgacgacuucuggcggugcaccuccgggcugccgagccucaugaagacccccaagauccgccugaugcccggccccggccugcucgccaugccgacgaccguggacgggugcguccggacccccucccuggugaucaacgaccugaucuacgccuacaccagcaaccucaucacgcgcggcugccaggacaucgggaaguccuaccaggugcugcagaucggcaucaucaccgucaacagcgaccuggugcccgaccucaacccccggaucucccacaccuucaacaucaacgacaaccgcaagagcugcucccuggcccugcucaacaccgacguguaccagcugugcagcacgccgaaggucgacgagcggagcgacuacgcguccagcgggaucgaggacaucgugcuggacaucgugaacuacgacggcuccaucagcaccacccgcuucaagaacaacaacaucuccuucgaccagcccuacgccgcccucuaccccagcgucggccccgggaucuacuacaagggcaagaucaucuuccugggguacggcggccuggagcacccgaucaacgagaacgccaucugcaacaccacggggugccccggcaagacccagcgggacugcaaccaggcgucccacagccccugguucuccgaccgccggauggugaacagcaucaucguggucgacaaggggcucaacuccgugcccaagcugaagguguggaccaucagcaugcgccagaacuacuggggcuccgaggggcggcugcuccugcugggcaacaagaucuacaucuacacccgcagcacguccuggcacagcaagcuccagcugggcaucaucgacaucaccgacuacuccgacauccggaucaaguggaccuggcacaacguccugagccgcccggggaacaacgagugccccuggggccacuccugccccgacgggugcaucaccggcguguacacggacgccuacccccucaacccgaccgggagcaucgucagcuccgugauccuggacagccagaagucccgggugaaccccgucaucaccuacagcaccgccaccgagcgcgugaacgagcuggccauccgcaacaagacgcucuccgccggcuacaccaccaccagcugcaucacgcacuacaacaagggcuacugcuuccacaucguggagaucaaccacaagucccugaacaccuuccagcccaugcuguucaagaccgagauccccaagagcugcuccuga

SEQ ID NO: 14616 - RNA, 1620 nt, Artificial Sequence
  HPIV3/Homo sapiens/PER/FLA4571/2008__AHX22069.1 fusion glycoprotein CDS human (F0)
augcccaucagcauucugcucauaaucaccacaaugauuauggccucccacugccagaucgacauuacuaaguugcaacaugugggcguccugguuaacucuccuaaagggaugaagaucucacagaauuucgagacgagauacuugauauuaagucugaucccaaaaauugaagauagcaacuccuguggagaccagcagaucaagcaauauaaaaggcuacucgaucggcugauuaucccgcuuuacgacggucugcgcuugcagaaggaugugauaguaaccaaucaggagucuaacgaaaauacagacccccgaacugagcguuucuucggcggggugauuggaaccaucgcucucggcgucgcaacaucggcccagauuaccgcggcuguggcccugguugaagcaaagcaagccagaucagauaucgagaaacugaaggaggcuaucagggacacuaacaaagcagugcagagcguccagaguuccguggguaaucucauuguagccauaaagucuguucaggauuaugugaacaaagaaaucgucccuagcauugcucgguuagggugcgaggccgcgggacugcaacuuggcaucgcauugacacagcacuacuccgaacugaccaauauauuuggcgacaacauugggucacuacaggagaagggaaucaagcuccaagguaucgccagucuguaucgcacgaauauuacugagaucuucaccacaagcacuguggauaaauacgacauuuaugaucuucuguuuaccgaaucuauaaaggugagagucaucgacguugacuugaacgauuacuccauuacacuccaggugaggcugccauuacugacccggcuccuuaauacgcagaucuacaaaguagacucaaucagcuauaacauucagaaucgcgagugguacauaccccugccuagucauaucaugacuaagggcgcuuuccuugggggagccgaugugaaagaauguauugaggcauuuucuuccuauaucugcccaagcgaccccggcuucguccuaaaccacgaaauggagucgugucugucugguaacauuucccaaugcccucgaacaaccgugacuucagauaucguuccaagauacgcuuuugugaaugggggagucguggccaacuguauaacaaccacgugcaccuguaauggcaucggcaacaggauuaaucagccgcccgaccaggggguaaagaucauuacacauaaagagugcaacacuaucggaauaaaugguaugcucuuuaacaccaauaaggaaggcacacuggcguuuuauacuccugaugacauuacccuuaacaauaguguugcccuggauccaaucgacauuagcaucgaguugaacaaggcaaaauccgaucucgaagagucuaaggaauggauacggcguagcaaucagaaacuggacucaaucgggaguuggcaccaauccagcacaaccauuaucgugauuuuaaucaugaugauaauucuguucaucaucaacauuacuaucauuacgauagcuaucaaguacuaucgcauucagaaaagaaauagggucgaccagaacgauaagcccuacgugcuaacaaacaaguga

SEQ ID NO: 14617 - RNA, 1719 nt, Artificial Sequence
  HPIV3/BJ/001/08__ADX01268.1 hemagglutinin-neuraminidase (HN)
auggaguacuggaagcacaccaaccauggcaaagacgccgggaaugaacuggagacaagcacugcuacgcacggaaacaagcucaccaauaaaaucacauauauucuuuggacuauaacccugguguuguuauccaucgucuucauuaucguucugacaaacucuauuaagucagaaaaagcaagagagagucuacuccaggauaucaauaacgaauuuauggaggugaccgagaagauacaaguagccagcgacaauacuaacgaucugauccaguccggugugaauacaaggcuucugaccauucagucucauguccagaacuacauccccauuucguugacgcaacagaucucagaccuccggaaguucauaagcgaaauuacuauccgcaaugauaaccaggaggugccuccacagcgaauuacccacgacguuggcaucaaaccgcugaaucccgaugacuuuuggcguugcacaagugggcugccuucccucaugaagacuccaaaaaucagauuaaugcccggaccuggccugcuugcgaugccaaccacaguggaugguugugucaggacccccucuuuggugauuaacgaccugauauaugcuuacacgagcaaucuaaucacucgggggugccaagauauuggaaaguccuaucagguacuccagaucggcauaauuacaguuaacucagaccuggugccugaucuuaacccacgcaucagucauaccuucaauaucaacgacaauagaaaaagcuguucucuggccuugcucaacacugacgucuaccagcugugcuccacaccgaagguggaugaaaggucagacuaugcaagcaguggcauugaggauaucguguuagacauugucaauuacgaugggucuauauccaccacgcgguuuaagaacaauaacaucagcuucgaccaacccuacgccgcucuguauccuucgguuggaccagguauuuacuauaaaggcaagaucaucuuucucggguacggaggccuugagcaccccauuaaugaaaacgcaauauguaauaccacagguugcccugggaaaacucagcgcgauuguaaccaggccucucacuccccaugguucucagaccgaagaauggugaauaguaucauuguaguggauaagggacugaacagcguccccaaauugaagguguggaccaucuccaugaggcaaaauuauuggggcucugagggccggcuacugcuccuggggaacaaaauuuacaucuauacacguagcacuucauggcauaguaaacuucagcugggaauaaucgacauuaccgauuacuccgacauccgcauuaaguggacauggcacaacguuuugagcagaccggguaauaacgaaugcccuuggggccauucuugucccgacgggugcaucaccggaguguacacugaugcuuauccacucaauccuacgggcucaauagucaguagcgugauucuggacucccagaagucuaggguaaaccccguuaucacauacucgaccgccacugagcgggugaaugaauuagcgauucgaaacaagacccugagcgcagguuauacaaccacuuccuguaucacacacuacaauaaaggguauugcuuucacauagucgagaucaaccauaagucacuaaauacguuccagccaaugcucuuuaaaaccgagauucccaagaguugcucuuga

SEQ ID NO: 14618 - RNA, 1892 nt, Artificial Sequence
  HPIV3/Homo sapiens/PER/FLA4571/2008__AHX22069.1 fusion glycoprotein mRNA gc (F0)
aggagagucccgcagucggcguccagcggcucugcuuguucgugugugugucguugcaggccuuauucaagcuuaccaugcccaucagcauccugcucaucaucaccaccaugaucauggccucccacugccagaucgacaucacgaagcugcagcacgugggcguccuggugaacagcccgaaggggaugaagaucucccagaacuucgagacccgcuaccucauccugagccugauccccaagaucgaggacuccaacagcugcggcgaccagcagaucaagcaguacaagcggcuccuggaccgccugaucaucccccucuacgacgggcugcggcugcagaaggacgugaucgucaccaaccaggaguccaacgagaacaccgacccccgcacggagcgguucuucggcggggugaucggcaccaucgcccucggcguggcgaccagcgcccagaucaccgccgccgucgcccugguggaggcgaagcaggcccgcuccgacaucgagaagcugaaggaggccauccgggacacgaacaaggccgugcagagcguccaguccagcguggggaaccucaucguggcgaucaaguccguccaggacuacgugaacaaggagaucgugccgagcaucgcccgccugggcugcgaggccgccgggcugcagcucggcaucgcccugacccagcacuacuccgagcugaccaacaucuucggggacaacaucggcagccuccaggagaagggcaucaagcugcaggggaucgcgucccuguaccggaccaacaucacggagaucuucaccaccagcaccgucgacaaguacgacaucuacgaccuccuguucacggaguccaucaaggugcgcgugaucgacgucgaccugaacgacuacagcaucacccuccaggugcggcugccccugcucacccgccugcugaacacccagaucuacaagguggacagcaucuccuacaacauccagaaccgggagugguacaucccccuccccagccacaucaugacgaagggcgccuuccucgggggcgccgacgucaaggagugcaucgaggccuucuccagcuacaucugcccguccgaccccggcuucgugcugaaccacgagauggagagcugccuguccgggaacaucagccagugcccccgcaccaccgugaccuccgacaucgucccccgguacgccuucgugaacggcggggucguggcgaacugcaucacgacgaccugcacgugcaacggcaucgggaaccgcaucaaccagccgcccgaccagggcgugaagaucaucacccacaaggagugcaacaccaucggcaucaacgggaugcuguucaacaccaacaaggagggcacccuggccuucuacacccccgacgacaucacccucaacaacagcgucgcccuggaccccaucgacaucuccaucgagcugaacaaggccaagagcgaccucgaggaguccaaggaguggauccggcgcagcaaccagaagcuggacuccaucgggagcuggcaccaguccagcaccaccaucaucgugauccugaucaugaugaucauccucuucaucaucaacaucacgaucaucaccaucgccaucaaguacuaccggauccagaagcgcaaccggguggaccagaacgacaagccguacguccugaccaacaagugaggacuagucccuguucccagagcccacuuuuuuuucuuuuuuugaaauaaaauagccugucuuucagaucucaaaggcucuuuucagagccaccaaaaaaaaaaaaaaaaaaaaaaaaaaaaaaaaaaaaaaaaaaaaaaaaaaaaaaaaaaaaaaaaaaaaaaaaaaaaaaaaaaaaaaaaaaaaaaaaaaaaa

SEQ ID NO: 14619 - RNA, 1991 nt, Artificial Sequence
  HPIV3/BJ/001/08__ADX01268.1 hemagglutinin-neuraminidase (HN)
aggagagucccgcagucggcguccagcggcucugcuuguucgugugugugucguugcaggccuuauucaagcuuaccauggaguacuggaagcacaccaaccacggcaaggacgccgggaacgagcuggagaccagcacggccacccacggcaacaagcucaccaacaagaucaccuacauccuguggacgaucacccuggugcuccuguccaucgucuucaucaucgugcugaccaacagcaucaaguccgagaaggcgcgcgagagccuccugcaggacaucaacaacgaguucauggaggugaccgagaagauccaggucgccuccgacaacacgaacgaccugauccagagcggggugaacacccggcuccugaccauccagucccacgugcagaacuacauccccaucagccugacccagcagaucuccgaccuccgcaaguucaucagcgagaucacgauccggaacgacaaccaggaggucccgccccagcgcaucacccacgacgugggcaucaagccccugaaccccgacgacuucuggcggugcaccuccgggcugccgagccucaugaagacccccaagauccgccugaugcccggccccggccugcucgccaugccgacgaccguggacgggugcguccggacccccucccuggugaucaacgaccugaucuacgccuacaccagcaaccucaucacgcgcggcugccaggacaucgggaaguccuaccaggugcugcagaucggcaucaucaccgucaacagcgaccuggugcccgaccucaacccccggaucucccacaccuucaacaucaacgacaaccgcaagagcugcucccuggcccugcucaacaccgacguguaccagcugugcagcacgccgaaggucgacgagcggagcgacuacgcguccagcgggaucgaggacaucgugcuggacaucgugaacuacgacggcuccaucagcaccacccgcuucaagaacaacaacaucuccuucgaccagcccuacgccgcccucuaccccagcgucggccccgggaucuacuacaagggcaagaucaucuuccugggguacggcggccuggagcacccgaucaacgagaacgccaucugcaacaccacggggugccccggcaagacccagcgggacugcaaccaggcgucccacagccccugguucuccgaccgccggauggugaacagcaucaucguggucgacaaggggcucaacuccgugcccaagcugaagguguggaccaucagcaugcgccagaacuacuggggcuccgaggggcggcugcuccugcugggcaacaagaucuacaucuacacccgcagcacguccuggcacagcaagcuccagcugggcaucaucgacaucaccgacuacuccgacauccggaucaaguggaccuggcacaacguccugagccgcccggggaacaacgagugccccuggggccacuccugccccgacgggugcaucaccggcguguacacggacgccuacccccucaacccgaccgggagcaucgucagcuccgugauccuggacagccagaagucccgggugaaccccgucaucaccuacagcaccgccaccgagcgcgugaacgagcuggccauccgcaacaagacgcucuccgccggcuacaccaccaccagcugcaucacgcacuacaacaagggcuacugcuuccacaucguggagaucaaccacaagucccugaacaccuuccagcccaugcuguucaagaccgagauccccaagagcugcuccugaggacuagucccuguucccagagcccacuuuuuuuucuuuuuuugaaauaaaauagccugucuuucagaucucaaaggcucuuuucagagccaccaaaaaaaaaaaaaaaaaaaaaaaaaaaaaaaaaaaaaaaaaaaaaaaaaaaaaaaaaaaaaaaaaaaaaaaaaaaaaaaaaaaaaaaaaaaaaaaaaaaaa

SEQ ID NO: 14620 - RNA, 1892 nt, Artificial Sequence
  HPIV3/Homo sapiens/PER/FLA4571/2008__AHX22069.1 fusion glycoprotein mRNA human (F0)
aggagagucccgcagucggcguccagcggcucugcuuguucgugugugugucguugcaggccuuauucaagcuuaccaugcccaucagcauucugcucauaaucaccacaaugauuauggccucccacugccagaucgacauuacuaaguugcaacaugugggcguccugguuaacucuccuaaagggaugaagaucucacagaauuucgagacgagauacuugauauuaagucugaucccaaaaauugaagauagcaacuccuguggagaccagcagaucaagcaauauaaaaggcuacucgaucggcugauuaucccgcuuuacgacggucugcgcuugcagaaggaugugauaguaaccaaucaggagucuaacgaaaauacagacccccgaacugagcguuucuucggcggggugauuggaaccaucgcucucggcgucgcaacaucggcccagauuaccgcggcuguggcccugguugaagcaaagcaagccagaucagauaucgagaaacugaaggaggcuaucagggacacuaacaaagcagugcagagcguccagaguuccguggguaaucucauuguagccauaaagucuguucaggauuaugugaacaaagaaaucgucccuagcauugcucgguuagggugcgaggccgcgggacugcaacuuggcaucgcauugacacagcacuacuccgaacugaccaauauauuuggcgacaacauugggucacuacaggagaagggaaucaagcuccaagguaucgccagucuguaucgcacgaauauuacugagaucuucaccacaagcacuguggauaaauacgacauuuaugaucuucuguuuaccgaaucuauaaaggugagagucaucgacguugacuugaacgauuacuccauuacacuccaggugaggcugccauuacugacccggcuccuuaauacgcagaucuacaaaguagacucaaucagcuauaacauucagaaucgcgagugguacauaccccugccuagucauaucaugacuaagggcgcuuuccuugggggagccgaugugaaagaauguauugaggcauuuucuuccuauaucugcccaagcgaccccggcuucguccuaaaccacgaaauggagucgugucugucugguaacauuucccaaugcccucgaacaaccgugacuucagauaucguuccaagauacgcuuuugugaaugggggagucguggccaacuguauaacaaccacgugcaccuguaauggcaucggcaacaggauuaaucagccgcccgaccaggggguaaagaucauuacacauaaagagugcaacacuaucggaauaaaugguaugcucuuuaacaccaauaaggaaggcacacuggcguuuuauacuccugaugacauuacccuuaacaauaguguugcccuggauccaaucgacauuagcaucgaguugaacaaggcaaaauccgaucucgaagagucuaaggaauggauacggcguagcaaucagaaacuggacucaaucgggaguuggcaccaauccagcacaaccauuaucgugauuuuaaucaugaugauaauucuguucaucaucaacauuacuaucauuacgauagcuaucaaguacuaucgcauucagaaaagaaauagggucgaccagaacgauaagcccuacgugcuaacaaacaagugaggacuagucccuguucccagagcccacuuuuuuuucuuuuuuugaaauaaaauagccugucuuucagaucucaaaggcucuuuucagagccaccaaaaaaaaaaaaaaaaaaaaaaaaaaaaaaaaaaaaaaaaaaaaaaaaaaaaaaaaaaaaaaaaaaaaaaaaaaaaaaaaaaaaaaaaaaaaaaaaaaaaa

SEQ ID NO: 14621 - RNA, 1991 nt, Artificial Sequence
  HPIV3/BJ/001/08__ADX01268.1 hemagglutinin-neuraminidase (HN)
aggagagucccgcagucggcguccagcggcucugcuuguucgugugugugucguugcaggccuuauucaagcuuaccauggaguacuggaagcacaccaaccauggcaaagacgccgggaaugaacuggagacaagcacugcuacgcacggaaacaagcucaccaauaaaaucacauauauucuuuggacuauaacccugguguuguuauccaucgucuucauuaucguucugacaaacucuauuaagucagaaaaagcaagagagagucuacuccaggauaucaauaacgaauuuauggaggugaccgagaagauacaaguagccagcgacaauacuaacgaucugauccaguccggugugaauacaaggcuucugaccauucagucucauguccagaacuacauccccauuucguugacgcaacagaucucagaccuccggaaguucauaagcgaaauuacuauccgcaaugauaaccaggaggugccuccacagcgaauuacccacgacguuggcaucaaaccgcugaaucccgaugacuuuuggcguugcacaagugggcugccuucccucaugaagacuccaaaaaucagauuaaugcccggaccuggccugcuugcgaugccaaccacaguggaugguugugucaggacccccucuuuggugauuaacgaccugauauaugcuuacacgagcaaucuaaucacucgggggugccaagauauuggaaaguccuaucagguacuccagaucggcauaauuacaguuaacucagaccuggugccugaucuuaacccacgcaucagucauaccuucaauaucaacgacaauagaaaaagcuguucucuggccuugcucaacacugacgucuaccagcugugcuccacaccgaagguggaugaaaggucagacuaugcaagcaguggcauugaggauaucguguuagacauugucaauuacgaugggucuauauccaccacgcgguuuaagaacaauaacaucagcuucgaccaacccuacgccgcucuguauccuucgguuggaccagguauuuacuauaaaggcaagaucaucuuucucggguacggaggccuugagcaccccauuaaugaaaacgcaauauguaauaccacagguugcccugggaaaacucagcgcgauuguaaccaggccucucacuccccaugguucucagaccgaagaauggugaauaguaucauuguaguggauaagggacugaacagcguccccaaauugaagguguggaccaucuccaugaggcaaaauuauuggggcucugagggccggcuacugcuccuggggaacaaaauuuacaucuauacacguagcacuucauggcauaguaaacuucagcugggaauaaucgacauuaccgauuacuccgacauccgcauuaaguggacauggcacaacguuuugagcagaccggguaauaacgaaugcccuuggggccauucuugucccgacgggugcaucaccggaguguacacugaugcuuauccacucaauccuacgggcucaauagucaguagcgugauucuggacucccagaagucuaggguaaaccccguuaucacauacucgaccgccacugagcgggugaaugaauuagcgauucgaaacaagacccugagcgcagguuauacaaccacuuccuguaucacacacuacaauaaaggguauugcuuucacauagucgagaucaaccauaagucacuaaauacguuccagccaaugcucuuuaaaaccgagauucccaagaguugcucuugaggacuagucccuguucccagagcccacuuuuuuuucuuuuuuugaaauaaaauagccugucuuucagaucucaaaggcucuuuucagagccaccaaaaaaaaaaaaaaaaaaaaaaaaaaaaaaaaaaaaaaaaaaaaaaaaaaaaaaaaaaaaaaaaaaaaaaaaaaaaaaaaaaaaaaaaaaaaaaaaaaaaa

SEQ ID NO: 14622 - RNA, 1837 nt, Artificial Sequence
  HPIV3/Homo sapiens/PER/FLA4571/2008__AHX22069.1 fusion glycoprotein mRNA gc (F0)
aggagaaagcuuaccaugcccaucagcauccugcucaucaucaccaccaugaucauggccucccacugccagaucgacaucacgaagcugcagcacgugggcguccuggugaacagcccgaaggggaugaagaucucccagaacuucgagacccgcuaccucauccugagccugauccccaagaucgaggacuccaacagcugcggcgaccagcagaucaagcaguacaagcggcuccuggaccgccugaucaucccccucuacgacgggcugcggcugcagaaggacgugaucgucaccaaccaggaguccaacgagaacaccgacccccgcacggagcgguucuucggcggggugaucggcaccaucgcccucggcguggcgaccagcgcccagaucaccgccgccgucgcccugguggaggcgaagcaggcccgcuccgacaucgagaagcugaaggaggccauccgggacacgaacaaggccgugcagagcguccaguccagcguggggaaccucaucguggcgaucaaguccguccaggacuacgugaacaaggagaucgugccgagcaucgcccgccugggcugcgaggccgccgggcugcagcucggcaucgcccugacccagcacuacuccgagcugaccaacaucuucggggacaacaucggcagccuccaggagaagggcaucaagcugcaggggaucgcgucccuguaccggaccaacaucacggagaucuucaccaccagcaccgucgacaaguacgacaucuacgaccuccuguucacggaguccaucaaggugcgcgugaucgacgucgaccugaacgacuacagcaucacccuccaggugcggcugccccugcucacccgccugcugaacacccagaucuacaagguggacagcaucuccuacaacauccagaaccgggagugguacaucccccuccccagccacaucaugacgaagggcgccuuccucgggggcgccgacgucaaggagugcaucgaggccuucuccagcuacaucugcccguccgaccccggcuucgugcugaaccacgagauggagagcugccuguccgggaacaucagccagugcccccgcaccaccgugaccuccgacaucgucccccgguacgccuucgugaacggcggggucguggcgaacugcaucacgacgaccugcacgugcaacggcaucgggaaccgcaucaaccagccgcccgaccagggcgugaagaucaucacccacaaggagugcaacaccaucggcaucaacgggaugcuguucaacaccaacaaggagggcacccuggccuucuacacccccgacgacaucacccucaacaacagcgucgcccuggaccccaucgacaucuccaucgagcugaacaaggccaagagcgaccucgaggaguccaaggaguggauccggcgcagcaaccagaagcuggacuccaucgggagcuggcaccaguccagcaccaccaucaucgugauccugaucaugaugaucauccucuucaucaucaacaucacgaucaucaccaucgccaucaaguacuaccggauccagaagcgcaaccggguggaccagaacgacaagccguacguccugaccaacaagugaggacuaguuauaagacugacuagcccgaugggccucccaacgggcccuccuccccuccuugcaccgagauuaauaaaaaaaaaaaaaaaaaaaaaaaaaaaaaaaaaaaaaaaaaaaaaaaaaaaaaaaaaaaaaaaaugcaucccccccccccccccccccccccccccccccaaaggcucuuuucagagccaccagaauu

SEQ ID NO: 14623 - RNA, 1936 nt, Artificial Sequence
  HPIV3/BJ/001/08__ADX01268.1 hemagglutinin-neuraminidase (HN)
aggagaaagcuuaccauggaguacuggaagcacaccaaccacggcaaggacgccgggaacgagcuggagaccagcacggccacccacggcaacaagcucaccaacaagaucaccuacauccuguggacgaucacccuggugcuccuguccaucgucuucaucaucgugcugaccaacagcaucaaguccgagaaggcgcgcgagagccuccugcaggacaucaacaacgaguucauggaggugaccgagaagauccaggucgccuccgacaacacgaacgaccugauccagagcggggugaacacccggcuccugaccauccagucccacgugcagaacuacauccccaucagccugacccagcagaucuccgaccuccgcaaguucaucagcgagaucacgauccggaacgacaaccaggaggucccgccccagcgcaucacccacgacgugggcaucaagccccugaaccccgacgacuucuggcggugcaccuccgggcugccgagccucaugaagacccccaagauccgccugaugcccggccccggccugcucgccaugccgacgaccguggacgggugcguccggacccccucccuggugaucaacgaccugaucuacgccuacaccagcaaccucaucacgcgcggcugccaggacaucgggaaguccuaccaggugcugcagaucggcaucaucaccgucaacagcgaccuggugcccgaccucaacccccggaucucccacaccuucaacaucaacgacaaccgcaagagcugcucccuggcccugcucaacaccgacguguaccagcugugcagcacgccgaaggucgacgagcggagcgacuacgcguccagcgggaucgaggacaucgugcuggacaucgugaacuacgacggcuccaucagcaccacccgcuucaagaacaacaacaucuccuucgaccagcccuacgccgcccucuaccccagcgucggccccgggaucuacuacaagggcaagaucaucuuccugggguacggcggccuggagcacccgaucaacgagaacgccaucugcaacaccacggggugccccggcaagacccagcgggacugcaaccaggcgucccacagccccugguucuccgaccgccggauggugaacagcaucaucguggucgacaaggggcucaacuccgugcccaagcugaagguguggaccaucagcaugcgccagaacuacuggggcuccgaggggcggcugcuccugcugggcaacaagaucuacaucuacacccgcagcacguccuggcacagcaagcuccagcugggcaucaucgacaucaccgacuacuccgacauccggaucaaguggaccuggcacaacguccugagccgcccggggaacaacgagugccccuggggccacuccugccccgacgggugcaucaccggcguguacacggacgccuacccccucaacccgaccgggagcaucgucagcuccgugauccuggacagccagaagucccgggugaaccccgucaucaccuacagcaccgccaccgagcgcgugaacgagcuggccauccgcaacaagacgcucuccgccggcuacaccaccaccagcugcaucacgcacuacaacaagggcuacugcuuccacaucguggagaucaaccacaagucccugaacaccuuccagcccaugcuguucaagaccgagauccccaagagcugcuccugaggacuaguuauaagacugacuagcccgaugggccucccaacgggcccuccuccccuccuugcaccgagauuaauaaaaaaaaaaaaaaaaaaaaaaaaaaaaaaaaaaaaaaaaaaaaaaaaaaaaaaaaaaaaaaaaugcaucccccccccccccccccccccccccccccccaaaggcucuuuucagagccaccagaauu

SEQ ID NO: 14624 - RNA, 1837 nt, Artificial Sequence
  HPIV3/Homo sapiens/PER/FLA4571/2008__AHX22069.1 fusion glycoprotein mRNA human (F0)
aggagaaagcuuaccaugcccaucagcauucugcucauaaucaccacaaugauuauggccucccacugccagaucgacauuacuaaguugcaacaugugggcguccugguuaacucuccuaaagggaugaagaucucacagaauuucgagacgagauacuugauauuaagucugaucccaaaaauugaagauagcaacuccuguggagaccagcagaucaagcaauauaaaaggcuacucgaucggcugauuaucccgcuuuacgacggucugcgcuugcagaaggaugugauaguaaccaaucaggagucuaacgaaaauacagacccccgaacugagcguuucuucggcggggugauuggaaccaucgcucucggcgucgcaacaucggcccagauuaccgcggcuguggcccugguugaagcaaagcaagccagaucagauaucgagaaacugaaggaggcuaucagggacacuaacaaagcagugcagagcguccagaguuccguggguaaucucauuguagccauaaagucuguucaggauuaugugaacaaagaaaucgucccuagcauugcucgguuagggugcgaggccgcgggacugcaacuuggcaucgcauugacacagcacuacuccgaacugaccaauauauuuggcgacaacauugggucacuacaggagaagggaaucaagcuccaagguaucgccagucuguaucgcacgaauauuacugagaucuucaccacaagcacuguggauaaauacgacauuuaugaucuucuguuuaccgaaucuauaaaggugagagucaucgacguugacuugaacgauuacuccauuacacuccaggugaggcugccauuacugacccggcuccuuaauacgcagaucuacaaaguagacucaaucagcuauaacauucagaaucgcgagugguacauaccccugccuagucauaucaugacuaagggcgcuuuccuugggggagccgaugugaaagaauguauugaggcauuuucuuccuauaucugcccaagcgaccccggcuucguccuaaaccacgaaauggagucgugucugucugguaacauuucccaaugcccucgaacaaccgugacuucagauaucguuccaagauacgcuuuugugaaugggggagucguggccaacuguauaacaaccacgugcaccuguaauggcaucggcaacaggauuaaucagccgcccgaccaggggguaaagaucauuacacauaaagagugcaacacuaucggaauaaaugguaugcucuuuaacaccaauaaggaaggcacacuggcguuuuauacuccugaugacauuacccuuaacaauaguguugcccuggauccaaucgacauuagcaucgaguugaacaaggcaaaauccgaucucgaagagucuaaggaauggauacggcguagcaaucagaaacuggacucaaucgggaguuggcaccaauccagcacaaccauuaucgugauuuuaaucaugaugauaauucuguucaucaucaacauuacuaucauuacgauagcuaucaaguacuaucgcauucagaaaagaaauagggucgaccagaacgauaagcccuacgugcuaacaaacaagugaggacuaguuauaagacugacuagcccgaugggccucccaacgggcccuccuccccuccuugcaccgagauuaauaaaaaaaaaaaaaaaaaaaaaaaaaaaaaaaaaaaaaaaaaaaaaaaaaaaaaaaaaaaaaaaaugcaucccccccccccccccccccccccccccccccaaaggcucuuuucagagccaccagaauu

SEQ ID NO: 14625 - RNA, 1936 nt, Artificial Sequence
  HPIV3/BJ/001/08__ADX01268.1 hemagglutinin-neuraminidase (HN)
aggagaaagcuuaccauggaguacuggaagcacaccaaccauggcaaagacgccgggaaugaacuggagacaagcacugcuacgcacggaaacaagcucaccaauaaaaucacauauauucuuuggacuauaacccugguguuguuauccaucgucuucauuaucguucugacaaacucuauuaagucagaaaaagcaagagagagucuacuccaggauaucaauaacgaauuuauggaggugaccgagaagauacaaguagccagcgacaauacuaacgaucugauccaguccggugugaauacaaggcuucugaccauucagucucauguccagaacuacauccccauuucguugacgcaacagaucucagaccuccggaaguucauaagcgaaauuacuauccgcaaugauaaccaggaggugccuccacagcgaauuacccacgacguuggcaucaaaccgcugaaucccgaugacuuuuggcguugcacaagugggcugccuucccucaugaagacuccaaaaaucagauuaaugcccggaccuggccugcuugcgaugccaaccacaguggaugguugugucaggacccccucuuuggugauuaacgaccugauauaugcuuacacgagcaaucuaaucacucgggggugccaagauauuggaaaguccuaucagguacuccagaucggcauaauuacaguuaacucagaccuggugccugaucuuaacccacgcaucagucauaccuucaauaucaacgacaauagaaaaagcuguucucuggccuugcucaacacugacgucuaccagcugugcuccacaccgaagguggaugaaaggucagacuaugcaagcaguggcauugaggauaucguguuagacauugucaauuacgaugggucuauauccaccacgcgguuuaagaacaauaacaucagcuucgaccaacccuacgccgcucuguauccuucgguuggaccagguauuuacuauaaaggcaagaucaucuuucucggguacggaggccuugagcaccccauuaaugaaaacgcaauauguaauaccacagguugcccugggaaaacucagcgcgauuguaaccaggccucucacuccccaugguucucagaccgaagaauggugaauaguaucauuguaguggauaagggacugaacagcguccccaaauugaagguguggaccaucuccaugaggcaaaauuauuggggcucugagggccggcuacugcuccuggggaacaaaauuuacaucuauacacguagcacuucauggcauaguaaacuucagcugggaauaaucgacauuaccgauuacuccgacauccgcauuaaguggacauggcacaacguuuugagcagaccggguaauaacgaaugcccuuggggccauucuugucccgacgggugcaucaccggaguguacacugaugcuuauccacucaauccuacgggcucaauagucaguagcgugauucuggacucccagaagucuaggguaaaccccguuaucacauacucgaccgccacugagcgggugaaugaauuagcgauucgaaacaagacccugagcgcagguuauacaaccacuuccuguaucacacacuacaauaaaggguauugcuuucacauagucgagaucaaccauaagucacuaaauacguuccagccaaugcucuuuaaaaccgagauucccaagaguugcucuugaggacuaguuauaagacugacuagcccgaugggccucccaacgggcccuccuccccuccuugcaccgagauuaauaaaaaaaaaaaaaaaaaaaaaaaaaaaaaaaaaaaaaaaaaaaaaaaaaaaaaaaaaaaaaaaaugcaucccccccccccccccccccccccccccccccaaaggcucuuuucagagccaccagaauu

SEQ ID NO: 14626 - protein, 539 aa, Artificial Sequence
  HMPV/TN/92-4__ABM67072.1 fusion glycoprotein (F0)
MSWKVVIIFSLLITPQHGLKESYLEESCSTITEGYLSVLRTGWYTNVFTLEVGDVENLTCSDGPSLIKTELDLTKSALRELKTVSADQLAREEQIENPRQSRFVLGAIALGVAAAAAVTAGVAIAKTIRLESEVTAINNALKKTNEAVSTLGNGVRVLATAVRELKDFVSKNLTRAINKNKCDIDDLKMAVSFSQFNRRFLNVVRQFSDNAGITPAISLDLMTDAELARAVPNMPTSAGQIKLMLENRAMVRRKGFGILIGVYGSSVIYMVQLPIFGVIDTPCWIVKAAPSCSEKKGNYACLLREDQGWYCQNAGSTVYYPNEKDCETRGDHVFCDTAAGINVAEQSKECNINISTTNYPCKVSTGRHPISMVALSPLGALVACYKGVSCSIGSNRVGIIKQLNKGCSYITNQDADTVTIDNTVYQLSKVEGEQHVIKGRPVSSSFDPIKFPEDQFNVALDQVFENIENSQALVDQSNRILSSAEKGNTGFIIVIILIAVLGSSMILVSIFIIIKKTKKPTGAPPELSGVTNNGFIPHN

SEQ ID NO: 14627 - protein, 539 aa, Artificial Sequence
  HMPV/TN/92-4__ABM67072.1 fusion glycoprotein (variant)
MSWKVVIIFSLLITPQHGLKESYLEESCSTITEGYLSVLRTGWYTNVFTLEVGDVENLTCSDGPSLIKTELDLTKSALRELKTVSADQLAREEQIENPGSGSFVLGAIALGVAAAAAVTAGVAICKTIRLESEVTAINNALKKTNEAVSTLGNGVRVLAFAVRELKDFVSKNLTRALNKNKCDIDDLKMAVSFSQFNRRFLNVVRQFSDNAGITPAISLDLMTDAELARAVPNMPTSAGQIKLMLENRAMVRRKGFGILCGVYGSSVIYMVQLPIFGVIDTPCWIVKAAPSCSEKKGNYACLLREDQGWYCQNAGSTVYYPNEKDCETRGDHVFCDTAAGINVAEQSKECNINISTTNYPCKVSTGRHPISMVALSPLGALVACYKGVSCSIGSNRVGIIKQLNKGCSYITNQDADTVTIDNTVYQLSKVEGEQHVIKGRPVSSSFDPIKFPEDQFNVALDQVFENIENSQALVDQSNRILSSAEKGNTGFIIVIILIAVLGSSMILVSIFIIIKKTKKPTGAPPELSGVTNNGFIPHN

SEQ ID NO: 14628 - protein, 539 aa, Artificial Sequence
  HMPV/TN/92-4__ABM67072.1 fusion glycoprotein (variant)
MSWKVVIIFSLLITPQHGLKESYLEESCSTITEGYLSVLRTGWYTNVFTLEVGDVENLTCSDGPSLIKTELDLTKSALRELKTVSADQLAREEQIENPGSGSFVLGAIALGVAAAAAVTAGVAICKTIRLESEVTAINNALKKTNEAVSTLGNGVRVLATAVRELKDFVSKNLTRAINKNKCDIDDLKMAVSFSQFNRRFLNVVRQFSDNAGITPAISLDLMTDAELARAVPNMPTSAGQIKLMLENRAMVRRKGFGILCGVYGSSVIYMVQLPIFGVIDTPCWIVKAAPSCSEKKGNYACLLREDQGWYCQNAGSTVYYPNEKDCETRGDHVFCDTAAGINVAEQSKECNINISTTNYPCKVSTGRHPISMVALSPLGALVACYKGVSCSIGSNRVGIIKQLNKGCSYITNQDADTVTIDNTVYQLSKVEGEQHVIKGRPVSSSFDPIKFPEHQWHVALDQVFENIENSQALVDQSNRILSSAEKGNTGFIIVIILIAVLGSSMILVSIFIIIKKTKKPTGAPPELSGVTNNGFIPHN

SEQ ID NO: 14629 - protein, 539 aa, Artificial Sequence
  HMPV/TN/92-4__ABM67072.1 fusion glycoprotein (variant)
MSWKVVIIFSLLITPQHGLKESYLEESCSTITEGYLSVLRTGWYTNVFTLEVGDVENLTCSDGPSLIKTELDLLKSALRELKTVSADQLAREEQIENPGSGSFVLGAIALGVAAAAAVTAGVAIAKTIRLESEVTAINNALKKTNEAVSTLGNGVRVLATAVRELKDFVSKNLTRAINKNKCDIPDLKMAVSFSQFNRRFLNVVRQFSDNAGITPAISLDLMTDAELARAVPNMPTSAGQIKLMLENRAMVRRKGFGILIGVYGSSVIYMVQLPIFGVIDTPCWIVKAAPSCSEKKGNYACLLREDQGWYCQNAGSTVYYPNEKDCETRGDHVFCDTAAGINVAEQSKECNINISTTNYPCKVSTGRHPISMVALSPLGALVACYKGVSCSIGSNRVGIIKQLNKGCSYITNQDADTVTIDNTVYQLSKVEGEQHVIKGRPVSSSFDPIKFPEDQFQVALDQVFENIENSQALVDQSNRILSSAEKGNTGFIIVIILIAVLGSSMILVSIFIIIKKTKKPTGAPPELSGVTNNGFIPHN

SEQ ID NO: 14630 - protein, 539 aa, Artificial Sequence
  HMPV/TN/92-4__ABM67072.1 fusion glycoprotein (variant)
MSWKVVIIFSLLITPQHGLKESYLEESCSTITEGYLSVLRTGWYTNVFTLEVGDVENLTCSDGPSLIKTELDLLKSALRELKTVSADQLAREEQIENPGSGSFVLGAIALGVAAAAAVTAGVAIAKTIRLESEVTAINNALKKTNEAVSTLGNGVRVLATAVRELKDFVSKNLTRAINKNKCDIPDLKMAVSFSQFNRRFLNVVRQFSDNAGITPAISLDLMTDAELARAVPNMPTSAGQIKLMLENRAMVRRKGFGILIGVYGSSVIYMVQLPIFGVIDTPCWIVKAAPSCSEKKGNYACLLREDQGWYCQNAGSTVYYPNEKDCETRGDHVFCDTAAGINVAEQSKECNINISTTNYPCKVSTGRHPISMVALSPLGALVACYKGVSCSIGSNRVGIIKQLNKGCSYITNQDADTVTIDNTVYQLSKVEGEQHVIKGRPVSSSFDPIKFPENQFQVALDQVFENIENSQALVDQSNRILSSAEKGNTGFIIVIILIAVLGSSMILVSIFIIIKKTKKPTGAPPELSGVTNNGFIPHN

SEQ ID NO: 14631 - protein, 539 aa, Artificial Sequence
  HMPV/TN/92-4__ABM67072.1 fusion glycoprotein (variant)
MSWKVVIIFSLLITPQHGLKESYLEESCSTITEGYLSVLRTGWYTNVFTLEVGDVENLTCSDGPSLIKTELDLLKSALRELKTVSADQLAREEQIENPGSGSFVLGAIALGVAAAAAVTAGVAIAKTIRLESEVTAINNALKKTNEAVSTLGNGVRVLATAVRELKDFVLKNLTRAINKNKCDIPDLKMAVSFSQFNRRFLNVVRQFSDNAGITPAISLDLMTDAELARAVPNMPTSAGQIKLMLENRAMVRRKGFGILIGVYGSSVIYMVQLPIFGVIDTPCWIVKAAPSCSEKKGNYACLLREDQGWYCQNAGSTVYYPNEKDCETRGDHVFCDTAAGINVAEQSKECNINISTTNYPCKVSTGRHPISMVALSPLGALVACYKGVSCSIGSNRVGIIKQLNKGCSYITNQDADTVTIDNTVYQLSKVEGEQHVIKGRPVSSSFDPIKFPEDQFQVALDQVFENIENSQALVDQSNRILSSAEKGNTGFIIVIILIAVLGSSMILVSIFIIIKKTKKPTGAPPELSGVTNNGFIPHN

SEQ ID NO: 14632 - protein, 539 aa, Artificial Sequence
  HMPV/TN/92-4__ABM67072.1 fusion glycoprotein (variant)
MSWKVVIIFSLLITPQHGLKESYLEESCSTITEGYLSVLRTGWYTNVFTLEVGDVENLTCSDGPSLIKTELDLLKSALRELKTVSADQLAREEQIENPGSGSFVLGAIALGVAAAAAVTAGVAIAKTIRLESEVTAINNALKKTNEAVSTLGNGVRVLATAVRELKDFVLKNLTRAINKNKCDIPDLKMAVSFSQFNRRFLNVVRQFSDNAGITPAISLDLMTDAELARAVPNMPTSAGQIKLMLENRAMVRRKGFGILIGVYGSSVIYMVQLPIFGVIDTPCWIVKAAPSCSEKKGNYACLLREDQGWYCQNAGSTVYYPNEKDCETRGDHVFCDTAAGINVAEQSKECNINISTTNYPCKVSTGRHPISMVALSPLGALVACYKGVSCSIGSNRVGIIKQLNKGCSYITNQDADTVTIDNTVYQLSKVEGEQHVIKGRPVSSSFDPIKFPENQFQVALDQVFENIENSQALVDQSNRILSSAEKGNTGFIIVIILIAVLGSSMILVSIFIIIKKTKKPTGAPPELSGVTNNGFIPHN

SEQ ID NO: 14633 - protein, 539 aa, Artificial Sequence
  HMPV/TN/92-4__ABM67072.1 fusion glycoprotein (variant)
MSWKVVIIFSLLITPQHGLKESYLEESCSTITEGYLSVLRTGWYTNVFTLPVGDVENLTCSDGPSLIKTELDLLKSALRELKTVSADQLAREEQIENPGSGSFVLGAIALGVAAAAAVTAGVAIAKTIRLESEVTAINNALKKTNEAVSTLGNGVRVLATAVRELKDFVSKNLTRAINKNKCDIDDLKMAVSFSQFNRRFLNVVRQFSDNAGITPAISLDLMTDAELARAVPNMPTSAGQIKLMLENRAMVRRKGFGILIGVYGSSVIYMVQLPIFGVIDTPCWIVKAAPSCSEKKGNYACLLREDQGWYCQNAGSTVYYPNEKDCETRGDHVFCDTAAGINVAEQSKECNINISTTNYPCKVSTGRHPISMVALSPLGALVACYKGVSCSIGSNRVGIIKQLNKGCSYITNQDADTVTIDNTVYQLSKVEGEQHVIKGRPVSSSFDPIKFPEDQFQVALDQVFENIENSQALVDQSNRILSSAEKGNTGFIIVIILIAVLGSSMILVSIFIIIKKTKKPTGAPPELSGVTNNGFIPHN

SEQ ID NO: 14634 - protein, 539 aa, Artificial Sequence
  HMPV/TN/92-4__ABM67072.1 fusion glycoprotein (variant)
MSWKVVIIFSLLITPQHGLKESYLEESCSTITEGYLSVLRTGWYTNVFTLPVGDVENLTCSDGPSLIKTELDLLKSALRELKTVSADQLAREEQIENPGSGSFVLGAIALGVAAAAAVTAGVAIAKTIRLESEVTAINNALKKTNEAVSTLGNGVRVLATAVRELKDFVSKNLTRAINKNKCDIDDLKMAVSFSQFNRRFLNVVRQFSDNAGITPAISLDLMTDAELARAVPNMPTSAGQIKLMLENRAMVRRKGFGILIGVYGSSVIYMVQLPIFGVIDTPCWIVKAAPSCSEKKGNYACLLREDQGWYCQNAGSTVYYPNEKDCETRGDHVFCDTAAGINVAEQSKECNINISTTNYPCKVSTGRHPISMVALSPLGALVACYKGVSCSIGSNRVGIIKQLNKGCSYITNQDADTVTIDNTVYQLSKVEGEQHVIKGRPVSSSFDPIKFPENQFQVALDQVFENIENSQALVDQSNRILSSAEKGNTGFIIVIILIAVLGSSMILVSIFIIIKKTKKPTGAPPELSGVTNNGFIPHN

SEQ ID NO: 14635 - protein, 539 aa, Artificial Sequence
  HMPV/TN/92-4__ABM67072.1 fusion glycoprotein (variant)
MSWKVVIIFSLLITPQHGLKESYLEESCSTITEGYLSVLRTGWYTNVFTLEVGDVENLTCSDGPSLIKTELDLLKSALRELKTVSADQLAREEQIENPGSGSFVLGAIALGVAAAAAVTAGVAIAKTIRLESEVTAINNALKKTNEAVSTLGNGVRVLATAVRELKDFVSKNLTRAINKNKCDIDDLKMAVSFSQFNRRFLNVVRQFSDNAGITPAISLDLMTDAELARAVPNMPTSAGQIKLMLENRAMVRRKGFGILIGVYGSSVIYMVQLPIFGVIDTPCWIVKAAPSCSEKKGNYACLLREDQGWYCQNAGSTVYYPNEKDCETRGDHVFCDTAAGINVAEQSKECNINISTTNYPCKVSTGRHPISMVALSPLGALVACYKGVSCSIGSNRVGIIKQLNKGCSYITNQDADTVTIDNTVYQLSKVEGEQHVIKGRPVSSSFDPIKFPEDQFQVALDQVFENIENSQALVDQSNRILSSAEKGNTGFIIVIILIAVLGSSMILVSIFIIIKKTKKPTGAPPELSGVTNNGFIPHN

SEQ ID NO: 14636 - protein, 539 aa, Artificial Sequence
  HMPV/TN/92-4__ABM67072.1 fusion glycoprotein (variant)
MSWKVVIIFSLLITPQHGLKESYLEESCSTITEGYLSVLRTGWYTNVFTLEVGDLENLTCSDGPSLIKTELDLTKSALRELKTVSADQLAREEQIENPGSGSFVLGAIALGVAAAAAVTAGVAIAKTIRLESEVTAINNALKKTNEAVSTLGNGVRVLATAVRELKDFVSKNLTRAINKNKCDIDDLKMAVSFSQFNRRFLNVVRQFSDNAGITPAISLDLMTDAELARAVPNMPTSAGQIKLMLENRAMVRRKGFGILIGVYGSSVIYMVQLPIFGVIDTPCWIVKAAPSCSEKKGNYACLLREDQGWYCQNAGSTVYYPNEKDCETRGDHVFCDTAAGINVAEQSKECNINISTTNYPCKVSTGRHPISMVALSPLGALVACYKGVSCSIGSNRVGIIKQLNKGCSYITNQDADTVTIDNTVYQLSKVEGEQHVIKGRPVSSSFDPIKFPEDQFQVALDQVFENIENSQALVDQSNRILSSAEKGNTGFIIVIILIAVLGSSMILVSIFIIIKKTKKPTGAPPELSGVTNNGFIPHN

SEQ ID NO: 14637 - protein, 539 aa, Artificial Sequence
  HMPV/TN/92-4__ABM67072.1 fusion glycoprotein (variant)
MSWKVVIIFSLLITPQHGLKESYLEESCSTITEGYLSVLRTGWYTNVFTLEVGDVENLTCSDGPSLIKTELDLTKSALRELKTVSADQLAREEQIENPGSGSFVLGAIALGVAAAAAVTAGVAIAKTIRLESEVTAINNALKKTNEAVSTLGNGVRVLATAVRELKDFVLKNLTRAINKNKCDIDDLKMAVSFSQFNRRFLNVVRQFSDNAGITPAISLDLMTDAELARAVPNMPTSAGQIKLMLENRAMVRRKGFGILIGVYGSSVIYMVQLPIFGVIDTPCWIVKAAPSCSEKKGNYACLLREDQGWYCQNAGSTVYYPNEKDCETRGDHVFCDTAAGINVAEQSKECNINISTTNYPCKVSTGRHPISMVALSPLGALVACYKGVSCSIGSNRVGIIKQLNKGCSYITNQDADTVTIDNTVYQLSKVEGEQHVIKGRPVSSSFDPIKFPEDQFQVALDQVFENIENSQALVDQSNRILSSAEKGNTGFIIVIILIAVLGSSMILVSIFIIIKKTKKPTGAPPELSGVTNNGFIPHN

SEQ ID NO: 14638 - protein, 539 aa, Artificial Sequence
  HMPV/TN/92-4__ABM67072.1 fusion glycoprotein (variant)
MSWKVVIIFSLLITPQHGLKESYLEESCSTITEGYLSVLRTGWYTNVFTLEVGDVENLTCSDGPSLIKTELDLTKSALRELKTVSADQLAREEQIENPGSGSFVLGAIALGVAAAAAVTAGVAIAKTIRLESEVTAINNALKKTNEAVSTLGNGVRVLATAVRELKDFVSKNLWRAINKNKCDIDDLKMAVSFSQFNRRFLNVVRQFSDNAGITPAISLDLMTDAELARAVPNMPTSAGQIKLMLENRAMVRRKGFGILIGVYGSSVIYMVQLPIFGVIDTPCWIVKAAPSCSEKKGNYACLLREDQGWYCQNAGSTVYYPNEKDCETRGDHVFCDTAAGINVAEQSKECNINISTTNYPCKVSTGRHPISMVALSPLGALVACYKGVSCSIGSNRVGIIKQLNKGCSYITNQDADTVTIDNTVYQLSKVEGEQHVIKGRPVSSSFDPIKFPEDQFQVALDQVFENIENSQALVDQSNRILSSAEKGNTGFIIVIILIAVLGSSMILVSIFIIIKKTKKPTGAPPELSGVTNNGFIPHN

SEQ ID NO: 14639 - protein, 539 aa, Artificial Sequence
  HMPV/TN/92-4__ABM67072.1 fusion glycoprotein (variant)
MSWKVVIIFSLLITPQHGLKESYLEESCSTITEGYLSVLRTGWYTNVFTLEVGDLENLTCSDGPSLIKTELDLLKSALRELKTVSADQLAREEQIENPGSGSFVLGAIALGVAAAAAVTAGVAIAKTIRLESEVTAINNALKKTNEAVSTLGNGVRVLATAVRELKDFVLKNLWRAINKNKCDIDDLKMAVSFSQFNRRFLNVVRQFSDNAGITPAISLDLMTDAELARAVPNMPTSAGQIKLMLENRAMVRRKGFGILIGVYGSSVIYMVQLPIFGVIDTPCWIVKAAPSCSEKKGNYACLLREDQGWYCQNAGSTVYYPNEKDCETRGDHVFCDTAAGINVAEQSKECNINISTTNYPCKVSTGRHPISMVALSPLGALVACYKGVSCSIGSNRVGIIKQLNKGCSYITNQDADTVTIDNTVYQLSKVEGEQHVIKGRPVSSSFDPIKFPEDQFQVALDQVFENIENSQALVDQSNRILSSAEKGNTGFIIVIILIAVLGSSMILVSIFIIIKKTKKPTGAPPELSGVTNNGFIPHN

SEQ ID NO: 14640 - protein, 539 aa, Artificial Sequence
  HMPV/TN/92-4__ABM67072.1 fusion glycoprotein (variant)
MSWKVVIIFSLLITPQHGLKESYLEESCSTITEGYLSVLRTGWYTNVFTLPVGDVENLTCSDGPSLIKTELDLTKSALRELKTVSADQLAREEQIENPGSGSFVLGAIALGVAAAAAVTAGVAIAKTIRLESEVTAINNALKKTNEAVSTLGNGVRVLATAVRELKDFVSKNLTRAINKNKCDIDDLKMAVSFSQFNRRFLNVVRQFSDNAGITPAISLDLMTDAELARAVPNMPTSAGQIKLMLENRAMVRRKGFGILIGVYGSSVIYMVQLPIFGVIDTPCWIVKAAPSCSEKKGNYACLLREDQGWYCQNAGSTVYYPNEKDCETRGDHVFCDTAAGINVAEQSKECNINISTTNYPCKVSTGRHPISMVALSPLGALVACYKGVSCSIGSNRVGIIKQLNKGCSYITNQDADTVTIDNTVYQLSKVEGEQHVIKGRPVSSSFDPIKFPEDQFQVALDQVFENIENSQALVDQSNRILSSAEKGNTGFIIVIILIAVLGSSMILVSIFIIIKKTKKPTGAPPELSGVTNNGFIPHN

SEQ ID NO: 14641 - protein, 539 aa, Artificial Sequence
  HMPV/TN/92-4__ABM67072.1 fusion glycoprotein (variant)
MSWKVVIIFSLLITPQHGLKESYLEESCSTITEGYLSVLRTGWYTNVFTLEVGDVENLTCSDGPSLIKTELDLTKSALRELKTVSADQLAREEQIENPGSGSFVLGAIALGVAAAAAVTAGVAIAKTIRLESEVTAINNALKKTNEAVSTLGNGVRVLATAVRELKDFVSKNLTRAINKNKCDIPDLKMAVSFSQFNRRFLNVVRQFSDNAGITPAISLDLMTDAELARAVPNMPTSAGQIKLMLENRAMVRRKGFGILIGVYGSSVIYMVQLPIFGVIDTPCWIVKAAPSCSEKKGNYACLLREDQGWYCQNAGSTVYYPNEKDCETRGDHVFCDTAAGINVAEQSKECNINISTTNYPCKVSTGRHPISMVALSPLGALVACYKGVSCSIGSNRVGIIKQLNKGCSYITNQDADTVTIDNTVYQLSKVEGEQHVIKGRPVSSSFDPIKFPEDQFQVALDQVFENIENSQALVDQSNRILSSAEKGNTGFIIVIILIAVLGSSMILVSIFIIIKKTKKPTGAPPELSGVTNNGFIPHN

SEQ ID NO: 14642 - protein, 539 aa, Artificial Sequence
  HMPV/TN/92-4__ABM67072.1 fusion glycoprotein (variant)
MSWKVVIIFSLLITPQHGLKESYLEESCSTITEGYLSVLRTGWYTNVFTLEVGDVENLTCSDGPSLIKTELDLTKSALRELKTVSADQLAREEQIENPGSGSFVLGAIALGVAAAAAVTAGVAIAKTIRLESEVTAINNALKKTNEAVSTLGNGVRVLATAVRELKDFVSKNLTRAINKNKCPIDDLKMAVSFSQFNRRFLNVVRQFSDNAGITPAISLDLMTDAELARAVPNMPTSAGQIKLMLENRAMVRRKGFGILIGVYGSSVIYMVQLPIFGVIDTPCWIVKAAPSCSEKKGNYACLLREDQGWYCQNAGSTVYYPNEKDCETRGDHVFCDTAAGINVAEQSKECNINISTTNYPCKVSTGRHPISMVALSPLGALVACYKGVSCSIGSNRVGIIKQLNKGCSYITNQDADTVTIDNTVYQLSKVEGEQHVIKGRPVSSSFDPIKFPEDQFQVALDQVFENIENSQALVDQSNRILSSAEKGNTGFIIVIILIAVLGSSMILVSIFIIIKKTKKPTGAPPELSGVTNNGFIPHN

SEQ ID NO: 14643 - protein, 539 aa, Artificial Sequence
  HMPV/TN/92-4__ABM67072.1 fusion glycoprotein (variant)
MSWKVVIIFSLLITPQHGLKESYLEESCSTITEGYLSVLRTGWYTNVFTLEVGDVENLTCSDGPSLIKTELDLTKSALRELKTVSADQLAREEQIENPGSGSFVLGAIALGVAAAAAVTAGVAIAKTIRLPSEVTAINNALKKTNEAVSTLGNGVRVLATAVRELKDFVSKNLTRAINKNKCDIDDLKMAVSFSQFNRRFLNVVRQFSDNAGITPAISLDLMTDAELARAVPNMPTSAGQIKLMLENRAMVRRKGFGILIGVYGSSVIYMVQLPIFGVIDTPCWIVKAAPSCSEKKGNYACLLREDQGWYCQNAGSTVYYPNEKDCETRGDHVFCDTAAGINVAEQSKECNINISTTNYPCKVSTGRHPISMVALSPLGALVACYKGVSCSIGSNRVGIIKQLNKGCSYITNQDADTVTIDNTVYQLSKVEGEQHVIKGRPVSSSFDPIKFPEDQFQVALDQVFENIENSQALVDQSNRILSSAEKGNTGFIIVIILIAVLGSSMILVSIFIIIKKTKKPTGAPPELSGVTNNGFIPHN

SEQ ID NO: 14644 - protein, 539 aa, Artificial Sequence
  HMPV/TN/92-4__ABM67072.1 fusion glycoprotein (variant)
MSWKVVIIFSLLITPQHGLKESYLEESCSTITEGYLSVLRTGWYTNVFTLEVGDVENLTCSDGPSLIKTELDLTKSALRELKTVSADQLAREEQIENPGSGSFVLGAIALGVAAAAAVTAGVAIAKTIRLESEVTAINNALKKTNEAVSTLGNGVRVLATAVRELKDFVSKNLTRAINKNKCDIDDLKMAVSFSQFNRRFLNVVRQFSDNAGITPAISLDLMTDAELARAVPNMPTSAGQIKLMLENRAMVRRKGFGILIGVYGSSVIYMVQLPIFGVIDTPCWIVKAAPSCSEKKGNYACLLREDQGWYCQNAGSTVYYPNEKDCETRGDHVFCDTAAGINVAEQSKECNINISTTNYPCKVSTGRHPISMVALSPLGALVACYKGVSCSIGSNRVGIIKQLNKGCSYITNQDADTVTIDNTVYQLSKVEGEQHVIKGRPVSSSFPPIKFPEDQFQVALDQVFENIENSQALVDQSNRILSSAEKGNTGFIIVIILIAVLGSSMILVSIFIIIKKTKKPTGAPPELSGVTNNGFIPHN

SEQ ID NO: 14645 - protein, 539 aa, Artificial Sequence
  HMPV/TN/92-4__ABM67072.1 fusion glycoprotein (variant)
MSWKVVIIFSLLITPQHGLKESYLEESCSTITEGYLSVLRTGWYTNVFTLEVGDVENLTCSDGPSLIKTELDLTKSALRELKTVSADQLAREEQIENPGSGSFVLGAIALGVAAAAAVTAGVAIAKTIRLESEVTAINNALKKTNEAVSTLGNGVRVLATAVRELKDFVSKNLTRAINKNKCDIDDLKMAVSFSQFNRRFLNVVRQFSDNAGITPAISLDLMTDAELARAVPNMPTSAGQIKLMLENRAMVRRKGFGILIGVYGSSVIYMVQLPIFGVIDTPCWIVKAAPSCSEKKGNYACLLREDQGWYCQNAGSTVYYPNEKDCETRGDHVFCDTAAGINVAEQSKECNINISTTNYPCKVSTGRHPISMVALSPLGALVACYKGVSCSIGSNRVGIIKQLNKGCSYITNQDADTVTIDNTVYQLSKVEGEQHVIKGRPVSSSFDPIKFPENQFQVALDQVFENIENSQALVDQSNRILSSAEKGNTGFIIVIILIAVLGSSMILVSIFIIIKKTKKPTGAPPELSGVTNNGFIPHN

SEQ ID NO: 14646 - protein, 539 aa, Artificial Sequence
  HMPV/TN/92-4__ABM67072.1 fusion glycoprotein (variant)
MSWKVVIIFSLLITPQHGLKESYLEESCSTITEGYLSVLRTGWYTNVFTLEVGDVENLTCSDGPSLIKTELDLTKSALRELKTVSADQLAREEQIENPGSGSFVLGAIALGVAAAAAVTAGVAIAKTIRLESEVTAINNALKKTNEAVSTLGNGVRVLATAVRELKDFVSKNLTRAINKNKCDIDDLKMAVSFSQFNRRFLNVVRQFSDNAGITPAISLDLMTDAELARAVPNMPTSAGQIKLMLENRAMVRRKGFGILIGVYGSSVIYMVQLPIFGVIDTPCWIVKAAPSCSEKKGNYACLLREDQGWYCQNAGSTVYYPNEKDCETRGDHVFCDTAAGINVAEQSKECNINISTTNYPCKVSTGRHPISMVALSPLGALVACYKGVSCSIGSNRVGIIKQLNKGCSYITNQDADTVTIDNTVYQLSKVEGEQHVIKGRPVSSSFDPIKFPQDQFQVALDQVFENIENSQALVDQSNRILSSAEKGNTGFIIVIILIAVLGSSMILVSIFIIIKKTKKPTGAPPELSGVTNNGFIPHN

SEQ ID NO: 14647 - protein, 539 aa, Artificial Sequence
  HMPV/TN/92-4__ABM67072.1 fusion glycoprotein (variant)
MSWKVVIIFSLLITPQHGLKESYLEESCSTITEGYLSVLRTGWYTNVFTLEVGDVENLTCSDGPSLIKTELDLTKSALRELKTVSADQLAREEQIENPGSGSFVLGAIALGVAAAAAVTAGVAIAKTIRLESEVTAINNALKKTNEAVSTLGNGVRVLATAVRELKDFVSKNLTRAINKNKCDIDDLKMAVSFSQWNRRFLNVVRQFSDNAGITPAISLDLMTDAELARAVPNMPTSAGQIKLMLENRAMVRRKGFGILIGVYGSSVIYMVQLPIFGVIDTPCWIVKAAPSCSEKKGNYACLLREDQGWYCQNAGSTVYYPNEKDCETRGDHVFCDTAAGINVAEQSKECNINISTTNYPCKVSTGRHPISMVALSPLGALVACYKGVSCSIGSNRVGIIKQLNKGCSYITNQDADTVTIDNTVYQLSKVEGEQHVIKGRPVSSSFDPIKFPEDQFQVALDQVFENIENSQALVDQSNRILSSAEKGNTGFIIVIILIAVLGSSMILVSIFIIIKKTKKPTGAPPELSGVTNNGFIPHN

SEQ ID NO: 14648 - protein, 539 aa, Artificial Sequence
  HMPV/NL/1/99__AAQ90145.1 fusion glycoprotein (F0)
MSWKVMIIISLLITPQHGLKESYLEESCSTITEGYLSVLRTGWYTNVFTLEVGDVENLTCTDGPSLIKTELDLTKSALRELKTVSADQLAREEQIENPRQSRFVLGAIALGVATAAAVTAGIAIAKTIRLESEVNAIKGALKQTNEAVSTLGNGVRVLATAVRELKEFVSKNLTSAINRNKCDIADLKMAVSFSQFNRRFLNVVRQFSDNAGITPAISLDLMTDAELARAVSYMPTSAGQIKLMLENRAMVRRKGFGILIGVYGSSVIYMVQLPIFGVIDTPCWIIKAAPSCSEKNGNYACLLREDQGWYCKNAGSTVYYPNEKDCETRGDHVFCDTAAGINVAEQSRECNINISTTNYPCKVSTGRHPISMVALSPLGALVACYKGVSCSIGSNWVGIIKQLPKGCSYITNQDADTVTIDNTVYQLSKVEGEQHVIKGRPVSSSFDPIKFPEDQFNVALDQVFESIENSQALVDQSNKILNSAEKGNTGFIIVVILVAVLGLTMISVSIIIIIKKTRKPTGAPPELNGVTNGGFIPHS

SEQ ID NO: 14649 - protein, 539 aa, Artificial Sequence
  HMPV/Sabana__AEA02280.1 fusion glycoprotein (F0)
MSWKVMIIISLLITPQHGLKESYLEESCSTITEGYLSVLRTGWYTNVFTLEVGDVENLTCTDGPSLIKTELDLTKSALRELKTVSADQLAREEQIENPRQSRFVLGAIALGVATAAAVTAGIAIAKTIRLESEVNAIKGALKTTNEAVSTLGNGVRVLATAVRELKEFVSKNLTSAINKNKCDIADLKMAVSFSQFNRRFLNVVRQFSDNAGITPAISLDLMNDAELARAVSYMPTSAGQIKLMLENRAMVRRKGFGILIGVYGSSVIYMVQLPIFGVINTPCWIIKAAPSCSEKDGNYACLLREDQGWYCKNAGSTVYYPNEKDCETRGDHVFCDTAAGINVAEQSRECNINISTTNYPCKVSTGRHPISMVALSPLGALVACYKGVSCSTGSNQVGIIKQLPKGCSYITNQDADTVTIDNTVYQLSKVEGEQHVIKGRPVSSSFDPIRFPEDQFNVALDQVFESIENSQALVDQSNKILNSAEKGNTGFIIVIILIAVLGLTMISVSIIIIIKKTRKPTGAPPELNGVTNGGFIPHS

SEQ ID NO: 14650 - RNA, 1620 nt, Artificial Sequence
  HMPV/TN/92-4__ABM67072.1 fusion glycoprotein CDS gc (F0)
augagcuggaagguggucaucaucuucucccugcucaucacgccccagcacggccugaaggagagcuaccuggaggaguccugcagcaccaucaccgagggguaccucuccgugcugcgcaccggcugguacaccaacguguucacccuggaggucggggacguggagaaccucacgugcagcgacggcccgucccugaucaagaccgagcuggaccucaccaagagcgcccugcgggagcugaagaccguguccgccgaccagcucgcgcgcgaggagcagaucgagaacccccggcagagccgcuucguccugggggccaucgcccugggcguggccgccgcggccgccgugacggccggcgucgcgaucgccaagaccauccggcucgaguccgaggugaccgccaucaacaacgcccugaagaagaccaacgaggccgugagcacgcuggggaacggcguccgcgugcucgcgaccgccgugcgggagcugaaggacuucgucuccaagaaccugacccgcgccaucaacaagaacaagugcgacaucgacgaccucaagauggccgugagcuucucccaguucaaccggcgcuuccugaacgugguccggcaguucagcgacaacgccgggaucacccccgcgaucucccuggaccucaugacggacgccgagcuggcccgcgccgugcccaacaugccgaccagcgccggccagaucaagcugaugcucgagaaccgggcgauggugcgccggaagggguucggcauccugaucggcgucuacggguccagcgugaucuacauggugcagcugcccaucuucggcgucaucgacacccccugcuggaucgugaaggccgcccccagcugcuccgagaagaaggggaacuacgccugccuccugcgcgaggaccagggcugguacugccagaacgccggcagcaccgucuacuacccgaacgagaaggacugcgagacgcgcggggaccacguguucugcgacaccgcggccggcaucaacguggccgagcaguccaaggagugcaacaucaacaucagcaccaccaacuaccccugcaaggucuccacggggcggcaccccaucagcaugguggcccugagcccccucggcgcgcugguggccugcuacaagggggucuccugcuccaucggcagcaaccgggugggcaucaucaagcagcugaacaaggggugcuccuacaucaccaaccaggacgccgacaccgugaccaucgacaacacggucuaccagcucagcaagguggagggcgagcagcacgugaucaaggggcgcccggucuccagcuccuucgaccccaucaaguuccccgaggaccaguucaacguggcccuggaccagguguucgagaacaucgagaacagccaggcccuggucgaccaguccaaccggauccucagcuccgcggagaagggcaacaccggguucaucaucgugaucauccugaucgccgugcugggcagcagcaugauccucgucuccaucuucaucaucaucaagaagaccaagaagcccaccggcgccccgcccgagcugagcggggugacgaacaacggcuucaucccccacaacuga

SEQ ID NO: 14651 - RNA, 1620 nt, Artificial Sequence
  HMPV/TN/92-4__ABM67072.1 fusion glycoprotein CDS gc (variant)
augagcuggaagguggucaucaucuucucccugcucaucacgccccagcacggccugaaggagagcuaccuggaggaguccugcagcaccaucaccgagggguaccucuccgugcugcgcaccggcugguacaccaacguguucacccuggaggucggggacguggagaaccucacgugcagcgacggcccgucccugaucaagaccgagcuggaccucaccaagagcgcccugcgggagcugaagaccguguccgccgaccagcucgcgcgcgaggagcagaucgagaaccccgggagcggcuccuucguccugggcgccaucgcccuggggguggccgccgcggccgccgugacggccggcgucgcgaucugcaagaccauccggcucgagagcgaggugaccgccaucaacaacgcccugaagaagaccaacgaggccguguccacgcuggggaacggcguccgcgugcucgccuucgcggugcgggagcugaaggacuucgucagcaagaaccugacccgcgcccucaacaagaacaagugcgacaucgacgaccugaagauggccguguccuucagccaguucaaccggcgcuuccugaacgugguccggcaguucuccgacaacgccgggaucacccccgccaucagccucgaccugaugaccgacgcggagcuggcccgcgccgugcccaacaugccgacguccgccggccagaucaagcucaugcuggagaaccgggccauggugcgccggaagggcuucgggauccugugcggcgucuacgggagcagcgugaucuacauggugcagcuccccaucuucggcgucaucgacacccccugcuggaucgugaaggcggcccccuccugcagcgagaagaagggcaacuacgccugccugcugcgcgaggaccaggggugguacugccagaacgccggcuccaccgucuacuacccgaacgagaaggacugcgagacccgcggggaccacguguucugcgacacggccgcgggcaucaacguggccgagcagagcaaggagugcaacaucaacaucuccaccaccaacuaccccugcaaggucagcaccgggcggcaccccaucuccaugguggcccucagcccccugggcgcccugguggcgugcuacaagggcgucuccugcagcaucggguccaaccgggugggcaucaucaagcagcucaacaaggggugcagcuacaucacgaaccaggacgccgacaccgugaccaucgacaacaccgucuaccagcuguccaagguggagggcgagcagcacgugaucaaggggcgcccggucagcuccagcuucgaccccaucaaguuccccgaggaccaguucaacguggcccuggaccagguguucgagaacaucgagaacucccaggcccucgucgaccagagcaaccggauccuguccagcgccgagaagggcaacacgggcuucaucaucgugaucauccugaucgcggugcucgggagcuccaugauccuggucagcaucuucaucaucaucaagaagaccaagaagcccaccggcgccccgcccgagcuguccggggugaccaacaacggcuucaucccccacaacuga

SEQ ID NO: 14652 - RNA, 1620 nt, Artificial Sequence
  HMPV/TN/92-4__ABM67072.1 fusion glycoprotein CDS gc (variant)
augagcuggaagguggucaucaucuucucccugcucaucacgccccagcacggccugaaggagagcuaccuggaggaguccugcagcaccaucaccgagggguaccucuccgugcugcgcaccggcugguacaccaacguguucacccuggaggucggggacguggagaaccucacgugcagcgacggcccgucccugaucaagaccgagcuggaccucaccaagagcgcccugcgggagcugaagaccguguccgccgaccagcucgcgcgcgaggagcagaucgagaaccccgggagcggcuccuucguccugggcgccaucgcccuggggguggccgccgcggccgccgugacggccggcgucgcgaucugcaagaccauccggcucgagagcgaggugaccgccaucaacaacgcccugaagaagaccaacgaggccguguccacgcuggggaacggcguccgcgugcucgccaccgcggugcgggagcugaaggacuucgucagcaagaaccugacccgcgccaucaacaagaacaagugcgacaucgacgaccucaagauggccguguccuucagccaguucaaccggcgcuuccugaacgugguccggcaguucuccgacaacgccgggaucacccccgccaucagccuggaccucaugacggacgcggagcuggcccgcgccgugcccaacaugccgaccuccgccggccagaucaagcugaugcucgagaaccgggccauggugcgccggaagggcuucgggauccugugcggcgucuacgggagcagcgugaucuacauggugcagcugcccaucuucggcgucaucgacacccccugcuggaucgugaaggcggcccccuccugcagcgagaagaagggcaacuacgccugccuccugcgcgaggaccaggggugguacugccagaacgccggcuccaccgucuacuacccgaacgagaaggacugcgagacgcgcggggaccacguguucugcgacaccgccgcgggcaucaacguggccgagcagagcaaggagugcaacaucaacaucuccaccaccaacuaccccugcaaggucagcacggggcggcaccccaucuccaugguggcccugagcccccucggcgcccugguggcgugcuacaagggcgucuccugcagcaucggguccaaccgggugggcaucaucaagcagcugaacaaggggugcagcuacaucaccaaccaggacgccgacaccgugaccaucgacaacacggucuaccagcucuccaagguggagggcgagcagcacgugaucaaggggcgcccggucagcuccagcuucgaccccaucaaguuccccgagcaccaguggcacguggcccuggaccagguguucgagaacaucgagaacucccaggcccuggucgaccagagcaaccggauccucuccagcgccgagaagggcaacaccggcuucaucaucgugaucauccugaucgcggugcuggggagcuccaugauccucgucagcaucuucaucaucaucaagaagaccaagaagcccaccggcgccccgcccgagcuguccggggugacgaacaacggcuucaucccccacaacuga

SEQ ID NO: 14653 - RNA, 1620 nt, Artificial Sequence
  HMPV/TN/92-4__ABM67072.1 fusion glycoprotein CDS gc (variant)
augagcuggaagguggucaucaucuucucccugcucaucacgccccagcacggccugaaggagagcuaccuggaggaguccugcagcaccaucaccgagggguaccucuccgugcugcgcaccggcugguacaccaacguguucacccuggaggucggggacguggagaaccucacgugcagcgacggccccucccugaucaagaccgagcuggaccuccucaagagcgcccugcgggagcugaagaccguguccgccgaccagcuggcgcgcgaggagcagaucgagaaccccgggagcggcuccuucguccugggcgccaucgcccucgggguggccgccgcggccgccgugaccgccggcgucgcgaucgccaagacgauccggcuggagagcgaggugaccgccaucaacaacgcccugaagaagaccaacgaggccguguccacccucgggaacggcguccgcgugcuggcgacggccgugcgggagcugaaggacuucgucagcaagaaccucacccgcgccaucaacaagaacaagugcgacauccccgaccugaagauggccguguccuucagccaguucaaccggcgcuuccugaacgugguccggcaguucuccgacaacgccgggaucacccccgcgaucagccucgaccugaugaccgacgccgagcuggcccgcgccgugccgaacaugcccacguccgccggccagaucaagcucaugcuggagaaccgggcgauggugcgccggaagggcuucgggauccugaucggcgucuacgggagcagcgugaucuacauggugcagcuccccaucuucggcgucaucgacacccccugcuggaucgugaaggccgccccguccugcagcgagaagaagggcaacuacgccugccugcugcgcgaggaccaggggugguacugccagaacgccggcuccaccgucuacuaccccaacgagaaggacugcgagacccgcggggaccacguguucugcgacacggcggccggcaucaacguggccgagcagagcaaggagugcaacaucaacaucuccaccaccaacuaccccugcaaggucagcaccgggcggcaccccaucuccaugguggcccucagcccgcugggcgcgcugguggccugcuacaagggcgucuccugcagcaucggguccaaccgggugggcaucaucaagcagcucaacaaggggugcagcuacaucacgaaccaggacgccgacaccgugaccaucgacaacaccgucuaccagcuguccaagguggagggcgagcagcacgugaucaaggggcgccccgucagcuccagcuucgaccccaucaaguuccccgaggaccaguuccagguggcccuggaccagguguucgagaacaucgagaacucccaggcccucgucgaccagagcaaccggauccuguccagcgcggagaagggcaacacgggcuucaucaucgugaucauccugaucgccgugcucgggagcuccaugauccuggucagcaucuucaucaucaucaagaagaccaagaagccgaccggcgccccgcccgagcuguccggggugaccaacaacggcuucaucccccacaacuga

SEQ ID NO: 14654 - RNA, 1620 nt, Artificial Sequence
  HMPV/TN/92-4__ABM67072.1 fusion glycoprotein CDS gc (variant)
augagcuggaagguggucaucaucuucucccugcucaucacgccccagcacggccugaaggagagcuaccuggaggaguccugcagcaccaucaccgagggguaccucuccgugcugcgcaccggcugguacaccaacguguucacccuggaggucggggacguggagaaccucacgugcagcgacggccccucccugaucaagaccgagcuggaccuccucaagagcgcccugcgggagcugaagaccguguccgccgaccagcuggcgcgcgaggagcagaucgagaaccccgggagcggcuccuucguccugggcgccaucgcccucgggguggccgccgcggccgccgugaccgccggcgucgcgaucgccaagacgauccggcuggagagcgaggugaccgccaucaacaacgcccugaagaagaccaacgaggccguguccacccucgggaacggcguccgcgugcuggcgacggccgugcgggagcugaaggacuucgucagcaagaaccucacccgcgccaucaacaagaacaagugcgacauccccgaccugaagauggccguguccuucagccaguucaaccggcgcuuccugaacgugguccggcaguucuccgacaacgccgggaucacccccgcgaucagccucgaccugaugaccgacgccgagcuggcccgcgccgugccgaacaugcccacguccgccggccagaucaagcucaugcuggagaaccgggcgauggugcgccggaagggcuucgggauccugaucggcgucuacgggagcagcgugaucuacauggugcagcuccccaucuucggcgucaucgacacccccugcuggaucgugaaggccgccccguccugcagcgagaagaagggcaacuacgccugccugcugcgcgaggaccaggggugguacugccagaacgccggcuccaccgucuacuaccccaacgagaaggacugcgagacccgcggggaccacguguucugcgacacggcggccggcaucaacguggccgagcagagcaaggagugcaacaucaacaucuccaccaccaacuaccccugcaaggucagcaccgggcggcaccccaucuccaugguggcccucagcccgcugggcgcgcugguggccugcuacaagggcgucuccugcagcaucggguccaaccgggugggcaucaucaagcagcucaacaaggggugcagcuacaucacgaaccaggacgccgacaccgugaccaucgacaacaccgucuaccagcuguccaagguggagggcgagcagcacgugaucaaggggcgccccgucagcuccagcuucgaccccaucaaguuccccgagaaccaguuccagguggcccuggaccagguguucgagaacaucgagaacucccaggcccucgucgaccagagcaaccggauccuguccagcgcggagaagggcaacacgggcuucaucaucgugaucauccugaucgccgugcucgggagcuccaugauccuggucagcaucuucaucaucaucaagaagaccaagaagccgaccggcgccccgcccgagcuguccggggugaccaacaacggcuucaucccccacaacuga

SEQ ID NO: 14655 - RNA, 1620 nt, Artificial Sequence
  HMPV/TN/92-4__ABM67072.1 fusion glycoprotein CDS gc (variant)
augagcuggaagguggucaucaucuucucccugcucaucacgccccagcacggccugaaggagagcuaccuggaggaguccugcagcaccaucaccgagggguaccucuccgugcugcgcaccggcugguacaccaacguguucacccuggaggucggggacguggagaaccucacgugcagcgacggccccucccugaucaagaccgagcuggaccuccucaagagcgcccugcgggagcugaagaccguguccgccgaccagcuggcgcgcgaggagcagaucgagaaccccgggagcggcuccuucguccugggcgccaucgcccucgggguggccgccgcggccgccgugaccgccggcgucgcgaucgccaagacgauccggcuggagagcgaggugaccgccaucaacaacgcccugaagaagaccaacgaggccguguccacccucgggaacggcguccgcgugcuggcgacggccgugcgggagcugaaggacuucguccucaagaaccugacccgcgccaucaacaagaacaagugcgacauccccgaccugaagauggccgugagcuucucccaguucaaccggcgcuuccucaacgugguccggcaguucagcgacaacgccgggaucacccccgcgaucucccuggaccugaugaccgacgccgagcucgcccgcgccgugccgaacaugcccacgagcgccggccagaucaagcugaugcuggagaaccgggcgauggugcgccggaagggcuucgggauccucaucggcgucuacggguccagcgugaucuacauggugcagcugcccaucuucggcgucaucgacacccccugcuggaucgugaaggccgccccgagcugcuccgagaagaagggcaacuacgccugccugcuccgcgaggaccaggggugguacugccagaacgccggcagcaccgucuacuaccccaacgagaaggacugcgagacccgcggggaccacguguucugcgacacggcggccggcaucaacguggccgagcaguccaaggagugcaacaucaacaucagcaccaccaacuaccccugcaaggucuccaccgggcggcaccccaucagcaugguggcccuguccccgcugggcgcgcucguggccugcuacaagggcgucagcugcuccaucgggagcaaccgggugggcaucaucaagcagcugaacaaggggugcuccuacaucacgaaccaggacgccgacaccgugaccaucgacaacaccgucuaccagcugagcaagguggagggcgagcagcacgugaucaaggggcgccccgucuccagcuccuucgaccccaucaaguuccccgaggaccaguuccagguggcccucgaccagguguucgagaacaucgagaacagccaggcccuggucgaccaguccaaccggauccugagcuccgcggagaagggcaacacgggcuucaucaucgugaucauccucaucgccgugcuggggagcagcaugauccuggucuccaucuucaucaucaucaagaagaccaagaagccgaccggcgccccgcccgagcucagcggggugaccaacaacggcuucaucccccacaacuga

SEQ ID NO: 14656 - RNA, 1620 nt, Artificial Sequence
  HMPV/TN/92-4__ABM67072.1 fusion glycoprotein CDS gc (variant)
augagcuggaagguggucaucaucuucucccugcucaucacgccccagcacggccugaaggagagcuaccuggaggaguccugcagcaccaucaccgagggguaccucuccgugcugcgcaccggcugguacaccaacguguucacccuggaggucggggacguggagaaccucacgugcagcgacggccccucccugaucaagaccgagcuggaccuccucaagagcgcccugcgggagcugaagaccguguccgccgaccagcuggcgcgcgaggagcagaucgagaaccccgggagcggcuccuucguccugggcgccaucgcccucgggguggccgccgcggccgccgugaccgccggcgucgcgaucgccaagacgauccggcuggagagcgaggugaccgccaucaacaacgcccugaagaagaccaacgaggccguguccacccucgggaacggcguccgcgugcuggcgacggccgugcgggagcugaaggacuucguccucaagaaccugacccgcgccaucaacaagaacaagugcgacauccccgaccugaagauggccgugagcuucucccaguucaaccggcgcuuccucaacgugguccggcaguucagcgacaacgccgggaucacccccgcgaucucccuggaccugaugaccgacgccgagcucgcccgcgccgugccgaacaugcccacgagcgccggccagaucaagcugaugcuggagaaccgggcgauggugcgccggaagggcuucgggauccucaucggcgucuacggguccagcgugaucuacauggugcagcugcccaucuucggcgucaucgacacccccugcuggaucgugaaggccgccccgagcugcuccgagaagaagggcaacuacgccugccugcuccgcgaggaccaggggugguacugccagaacgccggcagcaccgucuacuaccccaacgagaaggacugcgagacccgcggggaccacguguucugcgacacggcggccggcaucaacguggccgagcaguccaaggagugcaacaucaacaucagcaccaccaacuaccccugcaaggucuccaccgggcggcaccccaucagcaugguggcccuguccccgcugggcgcgcucguggccugcuacaagggcgucagcugcuccaucgggagcaaccgggugggcaucaucaagcagcugaacaaggggugcuccuacaucacgaaccaggacgccgacaccgugaccaucgacaacaccgucuaccagcugagcaagguggagggcgagcagcacgugaucaaggggcgccccgucuccagcuccuucgaccccaucaaguuccccgagaaccaguuccagguggcccucgaccagguguucgagaacaucgagaacagccaggcccuggucgaccaguccaaccggauccugagcuccgcggagaagggcaacacgggcuucaucaucgugaucauccucaucgccgugcuggggagcagcaugauccuggucuccaucuucaucaucaucaagaagaccaagaagccgaccggcgccccgcccgagcucagcggggugaccaacaacggcuucaucccccacaacuga

SEQ ID NO: 14657 - RNA, 1620 nt, Artificial Sequence
  HMPV/TN/92-4__ABM67072.1 fusion glycoprotein CDS gc (variant)
augagcuggaagguggucaucaucuucucccugcucaucacgccccagcacggccugaaggagagcuaccuggaggaguccugcagcaccaucaccgagggguaccucuccgugcugcgcaccggcugguacaccaacguguucacccugcccgucggggacguggagaaccucacgugcagcgacggccccucccugaucaagaccgagcuggaccuccucaagagcgcccugcgggagcugaagaccguguccgccgaccagcuggcgcgcgaggagcagaucgagaaccccgggagcggcuccuucguccugggcgccaucgcccucgggguggccgccgcggccgccgugaccgccggcgucgcgaucgccaagacgauccggcuggagagcgaggugaccgccaucaacaacgcccugaagaagaccaacgaggccguguccacccucgggaacggcguccgcgugcuggcgacggccgugcgggagcugaaggacuucgucagcaagaaccucacccgcgccaucaacaagaacaagugcgacaucgacgaccugaagauggccguguccuucagccaguucaaccggcgcuuccugaacgugguccggcaguucuccgacaacgccgggaucacccccgcgaucagccucgaccugaugaccgacgccgagcuggcccgcgccgugccgaacaugcccacguccgccggccagaucaagcucaugcuggagaaccgggcgauggugcgccggaagggcuucgggauccugaucggcgucuacgggagcagcgugaucuacauggugcagcuccccaucuucggcgucaucgacacccccugcuggaucgugaaggccgccccguccugcagcgagaagaagggcaacuacgccugccugcugcgcgaggaccaggggugguacugccagaacgccggcuccaccgucuacuaccccaacgagaaggacugcgagacccgcggggaccacguguucugcgacacggcggccggcaucaacguggccgagcagagcaaggagugcaacaucaacaucuccaccaccaacuaccccugcaaggucagcaccgggcggcaccccaucuccaugguggcccucagcccgcugggcgcgcugguggccugcuacaagggcgucuccugcagcaucggguccaaccgggugggcaucaucaagcagcucaacaaggggugcagcuacaucacgaaccaggacgccgacaccgugaccaucgacaacaccgucuaccagcuguccaagguggagggcgagcagcacgugaucaaggggcgccccgucagcuccagcuucgaccccaucaaguuccccgaggaccaguuccagguggcccuggaccagguguucgagaacaucgagaacucccaggcccucgucgaccagagcaaccggauccuguccagcgcggagaagggcaacacgggcuucaucaucgugaucauccugaucgccgugcucgggagcuccaugauccuggucagcaucuucaucaucaucaagaagaccaagaagccgaccggcgccccgcccgagcuguccggggugaccaacaacggcuucaucccccacaacuga

SEQ ID NO: 14658 - RNA, 1620 nt, Artificial Sequence
  HMPV/TN/92-4__ABM67072.1 fusion glycoprotein CDS gc (variant)
augagcuggaagguggucaucaucuucucccugcucaucacgccccagcacggccugaaggagagcuaccuggaggaguccugcagcaccaucaccgagggguaccucuccgugcugcgcaccggcugguacaccaacguguucacccugcccgucggggacguggagaaccucacgugcagcgacggccccucccugaucaagaccgagcuggaccuccucaagagcgcccugcgggagcugaagaccguguccgccgaccagcuggcgcgcgaggagcagaucgagaaccccgggagcggcuccuucguccugggcgccaucgcccucgggguggccgccgcggccgccgugaccgccggcgucgcgaucgccaagacgauccggcuggagagcgaggugaccgccaucaacaacgcccugaagaagaccaacgaggccguguccacccucgggaacggcguccgcgugcuggcgacggccgugcgggagcugaaggacuucgucagcaagaaccucacccgcgccaucaacaagaacaagugcgacaucgacgaccugaagauggccguguccuucagccaguucaaccggcgcuuccugaacgugguccggcaguucuccgacaacgccgggaucacccccgcgaucagccucgaccugaugaccgacgccgagcuggcccgcgccgugccgaacaugcccacguccgccggccagaucaagcucaugcuggagaaccgggcgauggugcgccggaagggcuucgggauccugaucggcgucuacgggagcagcgugaucuacauggugcagcuccccaucuucggcgucaucgacacccccugcuggaucgugaaggccgccccguccugcagcgagaagaagggcaacuacgccugccugcugcgcgaggaccaggggugguacugccagaacgccggcuccaccgucuacuaccccaacgagaaggacugcgagacccgcggggaccacguguucugcgacacggcggccggcaucaacguggccgagcagagcaaggagugcaacaucaacaucuccaccaccaacuaccccugcaaggucagcaccgggcggcaccccaucuccaugguggcccucagcccgcugggcgcgcugguggccugcuacaagggcgucuccugcagcaucggguccaaccgggugggcaucaucaagcagcucaacaaggggugcagcuacaucacgaaccaggacgccgacaccgugaccaucgacaacaccgucuaccagcuguccaagguggagggcgagcagcacgugaucaaggggcgccccgucagcuccagcuucgaccccaucaaguuccccgagaaccaguuccagguggcccuggaccagguguucgagaacaucgagaacucccaggcccucgucgaccagagcaaccggauccuguccagcgcggagaagggcaacacgggcuucaucaucgugaucauccugaucgccgugcucgggagcuccaugauccuggucagcaucuucaucaucaucaagaagaccaagaagccgaccggcgccccgcccgagcuguccggggugaccaacaacggcuucaucccccacaacuga

SEQ ID NO: 14659 - RNA, 1620 nt, Artificial Sequence
  HMPV/TN/92-4__ABM67072.1 fusion glycoprotein CDS gc (variant)
augagcuggaagguggucaucaucuucucccugcucaucacgccccagcacggccugaaggagagcuaccuggaggaguccugcagcaccaucaccgagggguaccucuccgugcugcgcaccggcugguacaccaacguguucacccuggaggucggggacguggagaaccucacgugcagcgacggcccgucccugaucaagaccgagcuggaccuccucaagagcgcccugcgggagcugaagaccguguccgccgaccagcuggcgcgcgaggagcagaucgagaaccccgggagcggcuccuucguccugggcgccaucgcccucgggguggccgccgcggccgccgugaccgccggcgucgcgaucgccaagacgauccggcuggagagcgaggugaccgccaucaacaacgcccugaagaagaccaacgaggccguguccacccucgggaacggcguccgcgugcuggcgacggccgugcgggagcugaaggacuucgucagcaagaaccucacccgcgccaucaacaagaacaagugcgacaucgacgaccugaagauggccguguccuucagccaguucaaccggcgcuuccugaacgugguccggcaguucuccgacaacgccgggaucacccccgcgaucagccucgaccugaugaccgacgccgagcuggcccgcgccgugcccaacaugccgacguccgccggccagaucaagcucaugcuggagaaccgggcgauggugcgccggaagggcuucgggauccugaucggcgucuacgggagcagcgugaucuacauggugcagcuccccaucuucggcgucaucgacacccccugcuggaucgugaaggccgcccccuccugcagcgagaagaagggcaacuacgccugccugcugcgcgaggaccaggggugguacugccagaacgccggcuccaccgucuacuacccgaacgagaaggacugcgagacccgcggggaccacguguucugcgacacggcggccggcaucaacguggccgagcagagcaaggagugcaacaucaacaucuccaccaccaacuaccccugcaaggucagcaccgggcggcaccccaucuccaugguggcccucagcccccugggcgcgcugguggccugcuacaagggcgucuccugcagcaucggguccaaccgggugggcaucaucaagcagcucaacaaggggugcagcuacaucacgaaccaggacgccgacaccgugaccaucgacaacaccgucuaccagcuguccaagguggagggcgagcagcacgugaucaaggggcgcccggucagcuccagcuucgaccccaucaaguuccccgaggaccaguuccagguggcccuggaccagguguucgagaacaucgagaacucccaggcccucgucgaccagagcaaccggauccuguccagcgcggagaagggcaacacgggcuucaucaucgugaucauccugaucgccgugcucgggagcuccaugauccuggucagcaucuucaucaucaucaagaagaccaagaagcccaccggcgccccgcccgagcuguccggggugaccaacaacggcuucaucccccacaacuga

SEQ ID NO: 14660 - RNA, 1620 nt, Artificial Sequence
  HMPV/TN/92-4__ABM67072.1 fusion glycoprotein CDS gc (variant)
augagcuggaagguggucaucaucuucucccugcucaucacgccccagcacggccugaaggagagcuaccuggaggaguccugcagcaccaucaccgagggguaccucuccgugcugcgcaccggcugguacaccaacguguucacccuggaggucggggaccucgagaaccugacgugcagcgacggcccgucccugaucaagaccgagcucgaccugaccaagagcgcccugcgggagcucaagaccguguccgccgaccagcuggcgcgcgaggagcagaucgagaaccccgggagcggcuccuucgugcugggcgccaucgcccucggggucgccgccgcggccgccgugacggccggcguggcgaucgccaagaccauccggcuggagagcgaggucaccgccaucaacaacgcccugaagaagaccaacgaggccguguccacgcucgggaacggcgugcgcguccuggcgaccgccgugcgggagcugaaggacuucgugagcaagaaccucacccgcgccaucaacaagaacaagugcgacaucgacgaccugaagauggccgucuccuucagccaguucaaccggcgcuuccugaacguggugcggcaguucuccgacaacgccgggaucacccccgcgaucagccucgaccugaugacggacgccgagcuggcccgcgccguccccaacaugccgaccuccgccggccagaucaagcucaugcuggagaaccgggcgauggugcgccggaagggcuucgggauccugaucggcguguacgggagcagcgucaucuacauggugcagcuccccaucuucggcgugaucgacacccccugcuggaucgucaaggccgcccccuccugcagcgagaagaagggcaacuacgccugccugcugcgcgaggaccaggggugguacugccagaacgccggcuccaccguguacuacccgaacgagaaggacugcgagacgcgcggggaccacgucuucugcgacaccgcggccggcaucaacguggccgagcagagcaaggagugcaacaucaacaucuccaccaccaacuaccccugcaaggugagcacggggcggcaccccaucuccauggucgcccucagcccccugggcgcgcugguggccugcuacaagggcguguccugcagcaucggguccaaccgggucggcaucaucaagcagcucaacaaggggugcagcuacaucaccaaccaggacgccgacaccgugaccaucgacaacacgguguaccagcuguccaaggucgagggcgagcagcacgugaucaaggggcgcccggugagcuccagcuucgaccccaucaaguuccccgaggaccaguuccaggucgcccuggaccagguguucgagaacaucgagaacucccaggcccucguggaccagagcaaccggauccuguccagcgcggagaagggcaacaccggcuucaucaucgucaucauccugaucgccgugcucgggagcuccaugauccuggugagcaucuucaucaucaucaagaagaccaagaagcccaccggcgccccgcccgagcuguccggggucacgaacaacggcuucaucccccacaacuga

SEQ ID NO: 14661 - RNA, 1620 nt, Artificial Sequence
  HMPV/TN/92-4__ABM67072.1 fusion glycoprotein CDS gc (variant)
augagcuggaagguggucaucaucuucucccugcucaucacgccccagcacggccugaaggagagcuaccuggaggaguccugcagcaccaucaccgagggguaccucuccgugcugcgcaccggcugguacaccaacguguucacccuggaggucggggacguggagaaccucacgugcagcgacggcccgucccugaucaagaccgagcuggaccucaccaagagcgcccugcgggagcugaagaccguguccgccgaccagcucgcgcgcgaggagcagaucgagaaccccgggagcggcuccuucguccugggcgccaucgcccuggggguggccgccgcggccgccgugacggccggcgucgcgaucgccaagaccauccggcucgagagcgaggugaccgccaucaacaacgcccugaagaagaccaacgaggccguguccacgcuggggaacggcguccgcgugcucgcgaccgccgugcgggagcugaaggacuucguccugaagaaccucacccgcgccaucaacaagaacaagugcgacaucgacgaccugaagauggccgugagcuucucccaguucaaccggcgcuuccugaacgugguccggcaguucagcgacaacgccgggaucacccccgcgaucucccucgaccugaugacggacgccgagcuggcccgcgccgugcccaacaugccgaccagcgccggccagaucaagcucaugcuggagaaccgggcgauggugcgccggaagggcuucgggauccugaucggcgucuacggguccagcgugaucuacauggugcagcuccccaucuucggcgucaucgacacccccugcuggaucgugaaggccgcccccagcugcuccgagaagaagggcaacuacgccugccugcugcgcgaggaccaggggugguacugccagaacgccggcagcaccgucuacuacccgaacgagaaggacugcgagacgcgcggggaccacguguucugcgacaccgcggccggcaucaacguggccgagcaguccaaggagugcaacaucaacaucagcaccaccaacuaccccugcaaggucuccacggggcggcaccccaucagcaugguggcccucagcccccugggcgcgcugguggccugcuacaagggcgucuccugcuccaucgggagcaaccgggugggcaucaucaagcagcucaacaaggggugcuccuacaucaccaaccaggacgccgacaccgugaccaucgacaacacggucuaccagcugagcaagguggagggcgagcagcacgugaucaaggggcgcccggucuccagcuccuucgaccccaucaaguuccccgaggaccaguuccagguggcccuggaccagguguucgagaacaucgagaacagccaggcccucgucgaccaguccaaccggauccugagcuccgcggagaagggcaacaccggcuucaucaucgugaucauccugaucgccgugcucgggagcagcaugauccuggucuccaucuucaucaucaucaagaagaccaagaagcccaccggcgccccgcccgagcugagcggggugacgaacaacggcuucaucccccacaacuga

SEQ ID NO: 14662 - RNA, 1620 nt, Artificial Sequence
  HMPV/TN/92-4__ABM67072.1 fusion glycoprotein CDS gc (variant)
augagcuggaagguggucaucaucuucucccugcucaucacgccccagcacggccugaaggagagcuaccuggaggaguccugcagcaccaucaccgagggguaccucuccgugcugcgcaccggcugguacaccaacguguucacccuggaggucggggacguggagaaccucacgugcagcgacggcccgucccugaucaagaccgagcuggaccucaccaagagcgcccugcgggagcugaagaccguguccgccgaccagcucgcgcgcgaggagcagaucgagaaccccgggagcggcuccuucguccugggcgccaucgcccuggggguggccgccgcggccgccgugacggccggcgucgcgaucgccaagaccauccggcucgagagcgaggugaccgccaucaacaacgcccugaagaagaccaacgaggccguguccacgcuggggaacggcguccgcgugcucgcgaccgccgugcgggagcugaaggacuucgucagcaagaaccuguggcgcgccaucaacaagaacaagugcgacaucgacgaccucaagauggccguguccuucagccaguucaaccggcgcuuccugaacgugguccggcaguucuccgacaacgccgggaucacccccgcgaucagccuggaccucaugaccgacgccgagcuggcccgcgccgugcccaacaugccgacguccgccggccagaucaagcugaugcucgagaaccgggcgauggugcgccggaagggcuucgggauccugaucggcgucuacgggagcagcgugaucuacauggugcagcugcccaucuucggcgucaucgacacccccugcuggaucgugaaggccgcccccuccugcagcgagaagaagggcaacuacgccugccuccugcgcgaggaccaggggugguacugccagaacgccggcuccaccgucuacuacccgaacgagaaggacugcgagacccgcggggaccacguguucugcgacacggcggccggcaucaacguggccgagcagagcaaggagugcaacaucaacaucuccaccaccaacuaccccugcaaggucagcaccgggcggcaccccaucuccaugguggcccugagcccccucggcgcgcugguggccugcuacaagggcgucuccugcagcaucggguccaaccgggugggcaucaucaagcagcugaacaaggggugcagcuacaucacgaaccaggacgccgacaccgugaccaucgacaacaccgucuaccagcucuccaagguggagggcgagcagcacgugaucaaggggcgcccggucagcuccagcuucgaccccaucaaguuccccgaggaccaguuccagguggcccuggaccagguguucgagaacaucgagaacucccaggcccuggucgaccagagcaaccggauccucuccagcgcggagaagggcaacacgggcuucaucaucgugaucauccugaucgccgugcuggggagcuccaugauccucgucagcaucuucaucaucaucaagaagaccaagaagcccaccggcgccccgcccgagcuguccggggugaccaacaacggcuucaucccccacaacuga

SEQ ID NO: 14663 - RNA, 1620 nt, Artificial Sequence
  HMPV/TN/92-4__ABM67072.1 fusion glycoprotein CDS gc (variant)
augagcuggaagguggucaucaucuucucccugcucaucacgccccagcacggccugaaggagagcuaccuggaggaguccugcagcaccaucaccgagggguaccucuccgugcugcgcaccggcugguacaccaacguguucacccuggaggucggggaccucgagaaccugacgugcagcgacggcccgucccugaucaagaccgagcucgaccugcugaaguccgcccuccgggagcugaagaccguguccgccgaccagcuggcgcgcgaggagcagaucgagaaccccgggagcggcuccuucgugcucggcgccaucgcccugggggucgccgccgcggccgccgugaccgccggcguggcgaucgccaagacgauccggcuggagagcgaggucaccgccaucaacaacgcccucaagaagaccaacgaggccguguccacccuggggaacggcgugcgcguccuggcgacggccgugcgggagcucaaggacuucgugcugaagaaccuguggcgcgccaucaacaagaacaagugcgacaucgacgaccucaagauggccgucagcuucucccaguucaaccggcgcuuccugaacguggugcggcaguucagcgacaacgccgggaucacccccgcgaucucccuggaccucaugaccgacgccgagcuggcccgcgccguccccaacaugccgaccagcgccggccagaucaagcugaugcucgagaaccgggcgauggugcgccggaagggcuucgggauccugaucggcguguacggguccagcgucaucuacauggugcagcugcccaucuucggcgugaucgacacgcccugcuggaucgucaaggccgcccccagcugcuccgagaagaagggcaacuacgccugccuccugcgcgaggaccaggggugguacugccagaacgccggcagcaccguguacuacccgaacgagaaggacugcgagacccgcggggaccacgucuucugcgacaccgcggccggcaucaacguggccgagcaguccaaggagugcaacaucaacaucagcacgaccaacuaccccugcaagguguccaccgggcggcaccccaucagcauggucgcccugagcccccucggcgcgcugguggccugcuacaagggcgugagcugcuccaucgggagcaaccgggucggcaucaucaagcagcugaacaaggggugcuccuacaucaccaaccaggacgccgacacggugaccaucgacaacaccguguaccagcucagcaaggucgagggcgagcagcacgugaucaaggggcgcccgguguccagcuccuucgaccccaucaaguuccccgaggaccaguuccaggucgcccuggaccagguguucgagaacaucgagaacagccaggcccugguggaccaguccaaccggauccucagcuccgcggagaagggcaacaccggcuucaucaucgucaucauccugaucgccgugcuggggagcagcaugauccucguguccaucuucaucaucaucaagaagacgaagaagcccaccggcgccccgcccgagcugagcggggucaccaacaacggcuucaucccccacaacuga

SEQ ID NO: 14664 - RNA, 1620 nt, Artificial Sequence
  HMPV/TN/92-4__ABM67072.1 fusion glycoprotein CDS gc (variant)
augagcuggaagguggucaucaucuucucccugcucaucacgccccagcacggccugaaggagagcuaccuggaggaguccugcagcaccaucaccgagggguaccucuccgugcugcgcaccggcugguacaccaacguguucacccugcccgucggggacguggagaaccucacgugcagcgacggccccucccugaucaagaccgagcuggaccucaccaagagcgcccugcgggagcugaagaccguguccgccgaccagcucgcgcgcgaggagcagaucgagaaccccgggagcggcuccuucguccugggcgccaucgcccuggggguggccgccgcggccgccgugacggccggcgucgcgaucgccaagaccauccggcucgagagcgaggugaccgccaucaacaacgcccugaagaagaccaacgaggccguguccacgcuggggaacggcguccgcgugcucgcgaccgccgugcgggagcugaaggacuucgucagcaagaaccugacccgcgccaucaacaagaacaagugcgacaucgacgaccucaagauggccguguccuucagccaguucaaccggcgcuuccugaacgugguccggcaguucuccgacaacgccgggaucacccccgcgaucagccuggaccucaugacggacgccgagcuggcccgcgccgugccgaacaugcccaccuccgccggccagaucaagcugaugcucgagaaccgggcgauggugcgccggaagggcuucgggauccugaucggcgucuacgggagcagcgugaucuacauggugcagcugcccaucuucggcgucaucgacacccccugcuggaucgugaaggccgccccguccugcagcgagaagaagggcaacuacgccugccuccugcgcgaggaccaggggugguacugccagaacgccggcuccaccgucuacuaccccaacgagaaggacugcgagacgcgcggggaccacguguucugcgacaccgcggccggcaucaacguggccgagcagagcaaggagugcaacaucaacaucuccaccaccaacuaccccugcaaggucagcacggggcggcaccccaucuccaugguggcccugagcccgcucggcgcgcugguggccugcuacaagggcgucuccugcagcaucggguccaaccgggugggcaucaucaagcagcugaacaaggggugcagcuacaucaccaaccaggacgccgacaccgugaccaucgacaacacggucuaccagcucuccaagguggagggcgagcagcacgugaucaaggggcgccccgucagcuccagcuucgaccccaucaaguuccccgaggaccaguuccagguggcccuggaccagguguucgagaacaucgagaacucccaggcccuggucgaccagagcaaccggauccucuccagcgcggagaagggcaacaccggcuucaucaucgugaucauccugaucgccgugcuggggagcuccaugauccucgucagcaucuucaucaucaucaagaagaccaagaagccgaccggcgccccgcccgagcuguccggggugacgaacaacggcuucaucccccacaacuga

SEQ ID NO: 14665 - RNA, 1620 nt, Artificial Sequence
  HMPV/TN/92-4__ABM67072.1 fusion glycoprotein CDS gc (variant)
augagcuggaagguggucaucaucuucucccugcucaucacgccccagcacggccugaaggagagcuaccuggaggaguccugcagcaccaucaccgagggguaccucuccgugcugcgcaccggcugguacaccaacguguucacccuggaggucggggacguggagaaccucacgugcagcgacggccccucccugaucaagaccgagcuggaccucaccaagagcgcccugcgggagcugaagaccguguccgccgaccagcucgcgcgcgaggagcagaucgagaaccccgggagcggcuccuucguccugggcgccaucgcccuggggguggccgccgcggccgccgugacggccggcgucgcgaucgccaagaccauccggcucgagagcgaggugaccgccaucaacaacgcccugaagaagaccaacgaggccguguccacgcuggggaacggcguccgcgugcucgcgaccgccgugcgggagcugaaggacuucgucagcaagaaccugacccgcgccaucaacaagaacaagugcgacauccccgaccucaagauggccguguccuucagccaguucaaccggcgcuuccugaacgugguccggcaguucuccgacaacgccgggaucacccccgcgaucagccuggaccucaugacggacgccgagcuggcccgcgccgugccgaacaugcccaccuccgccggccagaucaagcugaugcucgagaaccgggcgauggugcgccggaagggcuucgggauccugaucggcgucuacgggagcagcgugaucuacauggugcagcugcccaucuucggcgucaucgacacccccugcuggaucgugaaggccgccccguccugcagcgagaagaagggcaacuacgccugccuccugcgcgaggaccaggggugguacugccagaacgccggcuccaccgucuacuaccccaacgagaaggacugcgagacgcgcggggaccacguguucugcgacaccgcggccggcaucaacguggccgagcagagcaaggagugcaacaucaacaucuccaccaccaacuaccccugcaaggucagcacggggcggcaccccaucuccaugguggcccugagcccgcucggcgcgcugguggccugcuacaagggcgucuccugcagcaucggguccaaccgggugggcaucaucaagcagcugaacaaggggugcagcuacaucaccaaccaggacgccgacaccgugaccaucgacaacacggucuaccagcucuccaagguggagggcgagcagcacgugaucaaggggcgccccgucagcuccagcuucgaccccaucaaguuccccgaggaccaguuccagguggcccuggaccagguguucgagaacaucgagaacucccaggcccuggucgaccagagcaaccggauccucuccagcgcggagaagggcaacaccggcuucaucaucgugaucauccugaucgccgugcuggggagcuccaugauccucgucagcaucuucaucaucaucaagaagaccaagaagccgaccggcgccccgcccgagcuguccggggugacgaacaacggcuucaucccccacaacuga

SEQ ID NO: 14666 - RNA, 1620 nt, Artificial Sequence
  HMPV/TN/92-4__ABM67072.1 fusion glycoprotein CDS gc (variant)
augagcuggaagguggucaucaucuucucccugcucaucacgccccagcacggccugaaggagagcuaccuggaggaguccugcagcaccaucaccgagggguaccucuccgugcugcgcaccggcugguacaccaacguguucacccuggaggucggggacguggagaaccucacgugcagcgacggccccucccugaucaagaccgagcuggaccucaccaagagcgcccugcgggagcugaagaccguguccgccgaccagcucgcgcgcgaggagcagaucgagaaccccgggagcggcuccuucguccugggcgccaucgcccuggggguggccgccgcggccgccgugacggccggcgucgcgaucgccaagaccauccggcucgagagcgaggugaccgccaucaacaacgcccugaagaagaccaacgaggccguguccacgcuggggaacggcguccgcgugcucgcgaccgccgugcgggagcugaaggacuucgucagcaagaaccugacccgcgccaucaacaagaacaagugccccaucgacgaccucaagauggccguguccuucagccaguucaaccggcgcuuccugaacgugguccggcaguucuccgacaacgccgggaucacccccgcgaucagccuggaccucaugacggacgccgagcuggcccgcgccgugccgaacaugcccaccuccgccggccagaucaagcugaugcucgagaaccgggcgauggugcgccggaagggcuucgggauccugaucggcgucuacgggagcagcgugaucuacauggugcagcugcccaucuucggcgucaucgacacccccugcuggaucgugaaggccgccccguccugcagcgagaagaagggcaacuacgccugccuccugcgcgaggaccaggggugguacugccagaacgccggcuccaccgucuacuaccccaacgagaaggacugcgagacgcgcggggaccacguguucugcgacaccgcggccggcaucaacguggccgagcagagcaaggagugcaacaucaacaucuccaccaccaacuaccccugcaaggucagcacggggcggcaccccaucuccaugguggcccugagcccgcucggcgcgcugguggccugcuacaagggcgucuccugcagcaucggguccaaccgggugggcaucaucaagcagcugaacaaggggugcagcuacaucaccaaccaggacgccgacaccgugaccaucgacaacacggucuaccagcucuccaagguggagggcgagcagcacgugaucaaggggcgccccgucagcuccagcuucgaccccaucaaguuccccgaggaccaguuccagguggcccuggaccagguguucgagaacaucgagaacucccaggcccuggucgaccagagcaaccggauccucuccagcgcggagaagggcaacaccggcuucaucaucgugaucauccugaucgccgugcuggggagcuccaugauccucgucagcaucuucaucaucaucaagaagaccaagaagccgaccggcgccccgcccgagcuguccggggugacgaacaacggcuucaucccccacaacuga

SEQ ID NO: 14667 - RNA, 1620 nt, Artificial Sequence
  HMPV/TN/92-4__ABM67072.1 fusion glycoprotein CDS gc (variant)
augagcuggaagguggucaucaucuucucccugcucaucacgccccagcacggccugaaggagagcuaccuggaggaguccugcagcaccaucaccgagggguaccucuccgugcugcgcaccggcugguacaccaacguguucacccuggaggucggggacguggagaaccucacgugcagcgacggccccucccugaucaagaccgagcuggaccucaccaagagcgcccugcgggagcugaagaccguguccgccgaccagcucgcgcgcgaggagcagaucgagaaccccgggagcggcuccuucguccugggcgccaucgcccuggggguggccgccgcggccgccgugacggccggcgucgcgaucgccaagaccauccggcuccccagcgaggugaccgccaucaacaacgcccugaagaagaccaacgaggccguguccacgcuggggaacggcguccgcgugcucgcgaccgccgugcgggagcugaaggacuucgucagcaagaaccugacccgcgccaucaacaagaacaagugcgacaucgacgaccucaagauggccguguccuucagccaguucaaccggcgcuuccugaacgugguccggcaguucuccgacaacgccgggaucacccccgcgaucagccuggaccucaugacggacgccgagcuggcccgcgccgugccgaacaugcccaccuccgccggccagaucaagcugaugcucgagaaccgggcgauggugcgccggaagggcuucgggauccugaucggcgucuacgggagcagcgugaucuacauggugcagcugcccaucuucggcgucaucgacacccccugcuggaucgugaaggccgccccguccugcagcgagaagaagggcaacuacgccugccuccugcgcgaggaccaggggugguacugccagaacgccggcuccaccgucuacuaccccaacgagaaggacugcgagacgcgcggggaccacguguucugcgacaccgcggccggcaucaacguggccgagcagagcaaggagugcaacaucaacaucuccaccaccaacuaccccugcaaggucagcacggggcggcaccccaucuccaugguggcccugagcccgcucggcgcgcugguggccugcuacaagggcgucuccugcagcaucggguccaaccgggugggcaucaucaagcagcugaacaaggggugcagcuacaucaccaaccaggacgccgacaccgugaccaucgacaacacggucuaccagcucuccaagguggagggcgagcagcacgugaucaaggggcgccccgucagcuccagcuucgaccccaucaaguuccccgaggaccaguuccagguggcccuggaccagguguucgagaacaucgagaacucccaggcccuggucgaccagagcaaccggauccucuccagcgcggagaagggcaacaccggcuucaucaucgugaucauccugaucgccgugcuggggagcuccaugauccucgucagcaucuucaucaucaucaagaagaccaagaagccgaccggcgccccgcccgagcuguccggggugacgaacaacggcuucaucccccacaacuga

SEQ ID NO: 14668 - RNA, 1620 nt, Artificial Sequence
  HMPV/TN/92-4__ABM67072.1 fusion glycoprotein CDS gc (variant)
augagcuggaagguggucaucaucuucucccugcucaucacgccccagcacggccugaaggagagcuaccuggaggaguccugcagcaccaucaccgagggguaccucuccgugcugcgcaccggcugguacaccaacguguucacccuggaggucggggacguggagaaccucacgugcagcgacggccccucccugaucaagaccgagcuggaccucaccaagagcgcccugcgggagcugaagaccguguccgccgaccagcucgcgcgcgaggagcagaucgagaaccccgggagcggcuccuucguccugggcgccaucgcccuggggguggccgccgcggccgccgugacggccggcgucgcgaucgccaagaccauccggcucgagagcgaggugaccgccaucaacaacgcccugaagaagaccaacgaggccguguccacgcuggggaacggcguccgcgugcucgcgaccgccgugcgggagcugaaggacuucgucagcaagaaccugacccgcgccaucaacaagaacaagugcgacaucgacgaccucaagauggccguguccuucagccaguucaaccggcgcuuccugaacgugguccggcaguucuccgacaacgccgggaucacccccgcgaucagccuggaccucaugacggacgccgagcuggcccgcgccgugcccaacaugccgaccuccgccggccagaucaagcugaugcucgagaaccgggcgauggugcgccggaagggcuucgggauccugaucggcgucuacgggagcagcgugaucuacauggugcagcugcccaucuucggcgucaucgacacccccugcuggaucgugaaggccgcccccuccugcagcgagaagaagggcaacuacgccugccuccugcgcgaggaccaggggugguacugccagaacgccggcuccaccgucuacuacccgaacgagaaggacugcgagacgcgcggggaccacguguucugcgacaccgcggccggcaucaacguggccgagcagagcaaggagugcaacaucaacaucuccaccaccaacuaccccugcaaggucagcacggggcggcaccccaucuccaugguggcccugagcccccucggcgcgcugguggccugcuacaagggcgucuccugcagcaucggguccaaccgggugggcaucaucaagcagcugaacaaggggugcagcuacaucaccaaccaggacgccgacaccgugaccaucgacaacacggucuaccagcucuccaagguggagggcgagcagcacgugaucaaggggcgcccggucagcuccagcuucccgcccaucaaguuccccgaggaccaguuccagguggcccuggaccagguguucgagaacaucgagaacucccaggcccuggucgaccagagcaaccggauccucuccagcgcggagaagggcaacaccggcuucaucaucgugaucauccugaucgccgugcuggggagcuccaugauccucgucagcaucuucaucaucaucaagaagaccaagaagcccaccggcgccccgcccgagcuguccggggugacgaacaacggcuucaucccccacaacuga

SEQ ID NO: 14669 - RNA, 1620 nt, Artificial Sequence
  HMPV/TN/92-4__ABM67072.1 fusion glycoprotein CDS gc (variant)
augagcuggaagguggucaucaucuucucccugcucaucacgccccagcacggccugaaggagagcuaccuggaggaguccugcagcaccaucaccgagggguaccucuccgugcugcgcaccggcugguacaccaacguguucacccuggaggucggggacguggagaaccucacgugcagcgacggcccgucccugaucaagaccgagcuggaccucaccaagagcgcccugcgggagcugaagaccguguccgccgaccagcucgcgcgcgaggagcagaucgagaaccccgggagcggcuccuucguccugggcgccaucgcccuggggguggccgccgcggccgccgugacggccggcgucgcgaucgccaagaccauccggcucgagagcgaggugaccgccaucaacaacgcccugaagaagaccaacgaggccguguccacgcuggggaacggcguccgcgugcucgcgaccgccgugcgggagcugaaggacuucgucagcaagaaccugacccgcgccaucaacaagaacaagugcgacaucgacgaccucaagauggccguguccuucagccaguucaaccggcgcuuccugaacgugguccggcaguucuccgacaacgccgggaucacccccgcgaucagccuggaccucaugacggacgccgagcuggcccgcgccgugcccaacaugccgaccuccgccggccagaucaagcugaugcucgagaaccgggcgauggugcgccggaagggcuucgggauccugaucggcgucuacgggagcagcgugaucuacauggugcagcugcccaucuucggcgucaucgacacccccugcuggaucgugaaggccgcccccuccugcagcgagaagaagggcaacuacgccugccuccugcgcgaggaccaggggugguacugccagaacgccggcuccaccgucuacuacccgaacgagaaggacugcgagacgcgcggggaccacguguucugcgacaccgcggccggcaucaacguggccgagcagagcaaggagugcaacaucaacaucuccaccaccaacuaccccugcaaggucagcacggggcggcaccccaucuccaugguggcccugagcccccucggcgcgcugguggccugcuacaagggcgucuccugcagcaucggguccaaccgggugggcaucaucaagcagcugaacaaggggugcagcuacaucaccaaccaggacgccgacaccgugaccaucgacaacacggucuaccagcucuccaagguggagggcgagcagcacgugaucaaggggcgcccggucagcuccagcuucgaccccaucaaguuccccgagaaccaguuccagguggcccuggaccagguguucgagaacaucgagaacucccaggcccuggucgaccagagcaaccggauccucuccagcgcggagaagggcaacaccggcuucaucaucgugaucauccugaucgccgugcuggggagcuccaugauccucgucagcaucuucaucaucaucaagaagaccaagaagcccaccggcgccccgcccgagcuguccggggugacgaacaacggcuucaucccccacaacuga

SEQ ID NO: 14670 - RNA, 1620 nt, Artificial Sequence
  HMPV/TN/92-4__ABM67072.1 fusion glycoprotein CDS gc (variant)
augagcuggaagguggucaucaucuucucccugcucaucacgccccagcacggccugaaggagagcuaccuggaggaguccugcagcaccaucaccgagggguaccucuccgugcugcgcaccggcugguacaccaacguguucacccuggaggucggggacguggagaaccucacgugcagcgacggcccgucccugaucaagaccgagcuggaccucaccaagagcgcccugcgggagcugaagaccguguccgccgaccagcucgcgcgcgaggagcagaucgagaaccccgggagcggcuccuucguccugggcgccaucgcccuggggguggccgccgcggccgccgugacggccggcgucgcgaucgccaagaccauccggcucgagagcgaggugaccgccaucaacaacgcccugaagaagaccaacgaggccguguccacgcuggggaacggcguccgcgugcucgcgaccgccgugcgggagcugaaggacuucgucagcaagaaccugacccgcgccaucaacaagaacaagugcgacaucgacgaccucaagauggccguguccuucagccaguucaaccggcgcuuccugaacgugguccggcaguucuccgacaacgccgggaucacccccgcgaucagccuggaccucaugacggacgccgagcuggcccgcgccgugcccaacaugccgaccuccgccggccagaucaagcugaugcucgagaaccgggcgauggugcgccggaagggcuucgggauccugaucggcgucuacgggagcagcgugaucuacauggugcagcugcccaucuucggcgucaucgacacccccugcuggaucgugaaggccgcccccuccugcagcgagaagaagggcaacuacgccugccuccugcgcgaggaccaggggugguacugccagaacgccggcuccaccgucuacuacccgaacgagaaggacugcgagacgcgcggggaccacguguucugcgacaccgcggccggcaucaacguggccgagcagagcaaggagugcaacaucaacaucuccaccaccaacuaccccugcaaggucagcacggggcggcaccccaucuccaugguggcccugagcccccucggcgcgcugguggccugcuacaagggcgucuccugcagcaucggguccaaccgggugggcaucaucaagcagcugaacaaggggugcagcuacaucaccaaccaggacgccgacaccgugaccaucgacaacacggucuaccagcucuccaagguggagggcgagcagcacgugaucaaggggcgcccggucagcuccagcuucgaccccaucaaguucccccaggaccaguuccagguggcccuggaccagguguucgagaacaucgagaacucccaggcccuggucgaccagagcaaccggauccucuccagcgcggagaagggcaacaccggcuucaucaucgugaucauccugaucgccgugcuggggagcuccaugauccucgucagcaucuucaucaucaucaagaagaccaagaagcccaccggcgccccgcccgagcuguccggggugacgaacaacggcuucaucccccacaacuga

SEQ ID NO: 14671 - RNA, 1620 nt, Artificial Sequence
  HMPV/TN/92-4__ABM67072.1 fusion glycoprotein CDS gc (variant)
augagcuggaagguggucaucaucuucucccugcucaucacgccccagcacggccugaaggagagcuaccuggaggaguccugcagcaccaucaccgagggguaccucuccgugcugcgcaccggcugguacaccaacguguucacccuggaggucggggacguggagaaccucacgugcagcgacggcccgucccugaucaagaccgagcuggaccucaccaagagcgcccugcgggagcugaagaccguguccgccgaccagcucgcgcgcgaggagcagaucgagaaccccgggagcggcuccuucguccugggcgccaucgcccuggggguggccgccgcggccgccgugacggccggcgucgcgaucgccaagaccauccggcucgagagcgaggugaccgccaucaacaacgcccugaagaagaccaacgaggccguguccacgcuggggaacggcguccgcgugcucgcgaccgccgugcgggagcugaaggacuucgucagcaagaaccugacccgcgccaucaacaagaacaagugcgacaucgacgaccucaagauggccguguccuucagccaguggaaccggcgcuuccugaacgugguccggcaguucuccgacaacgccgggaucacccccgcgaucagccuggaccucaugacggacgccgagcuggcccgcgccgugcccaacaugccgaccuccgccggccagaucaagcugaugcucgagaaccgggcgauggugcgccggaagggcuucgggauccugaucggcgucuacgggagcagcgugaucuacauggugcagcugcccaucuucggcgucaucgacacccccugcuggaucgugaaggccgcccccuccugcagcgagaagaagggcaacuacgccugccuccugcgcgaggaccaggggugguacugccagaacgccggcuccaccgucuacuacccgaacgagaaggacugcgagacgcgcggggaccacguguucugcgacaccgcggccggcaucaacguggccgagcagagcaaggagugcaacaucaacaucuccaccaccaacuaccccugcaaggucagcacggggcggcaccccaucuccaugguggcccugagcccccucggcgcgcugguggccugcuacaagggcgucuccugcagcaucggguccaaccgggugggcaucaucaagcagcugaacaaggggugcagcuacaucaccaaccaggacgccgacaccgugaccaucgacaacacggucuaccagcucuccaagguggagggcgagcagcacgugaucaaggggcgcccggucagcuccagcuucgaccccaucaaguuccccgaggaccaguuccagguggcccuggaccagguguucgagaacaucgagaacucccaggcccuggucgaccagagcaaccggauccucuccagcgcggagaagggcaacaccggcuucaucaucgugaucauccugaucgccgugcuggggagcuccaugauccucgucagcaucuucaucaucaucaagaagaccaagaagcccaccggcgccccgcccgagcuguccggggugacgaacaacggcuucaucccccacaacuga

SEQ ID NO: 14672 - RNA, 1620 nt, Artificial Sequence
  HMPV/NL/1/99__AAQ90145.1 fusion glycoprotein CDS gc (F0)
augagcuggaaggugaugaucaucaucucccugcucaucacgccccagcacggccugaaggagagcuaccuggaggaguccugcagcaccaucaccgagggguaccucuccguccugcgcaccggcugguacaccaacguguucacccuggaggugggggacgucgagaaccucacgugcaccgacggcccgagccugaucaagaccgagcuggaccucaccaaguccgcccugcgggagcugaagacggugagcgccgaccagcucgcgcgcgaggagcagaucgagaacccccggcagucccgcuucgugcugggggccaucgcccugggcgucgccaccgccgcggccgugaccgccggcaucgccaucgcgaagaccauccggcucgagagcgaggugaacgccaucaagggggcccugaagcagacgaacgaggccgucuccacccugggcaacggggugcgcgugcucgccaccgcgguccgggagcugaaggaguucgugagcaagaaccugaccuccgccaucaaccgcaacaagugcgacaucgccgaccucaagauggccgugagcuucucccaguucaaccggcgcuuccugaacgucgugcggcaguucagcgacaacgccggcaucacgcccgcgaucucccuggaccucaugaccgacgccgagcuggcccgcgccgugagcuacaugcccaccuccgccgggcagaucaagcugaugcucgagaaccgggcgaugguccgccggaagggcuucggcauccugaucgggguguacggcagcagcgugaucuacaugguccagcugccgaucuucggggugaucgacacccccugcuggaucaucaaggccgcccccuccugcagcgagaagaacggcaacuacgccugccuccugcgcgaggaccagggcugguacugcaagaacgccggguccacgguguacuaccccaacgagaaggacugcgagacccggggcgaccacgucuucugcgacaccgcggccgggaucaacguggccgagcagagccgcgagugcaacaucaacaucuccaccacgaacuacccgugcaaggucagcaccggccggcaccccaucuccaugguggcccugagcccccucggggcgcugguggccugcuacaagggcgucuccugcagcaucggcuccaacuggguggggaucaucaagcagcugcccaagggcugcagcuacaucaccaaccaggacgccgacaccgugacgaucgacaacaccgucuaccagcucuccaagguggagggggagcagcacgugaucaagggccgcccggucagcuccagcuucgaccccaucaaguuccccgaggaccaguucaacguggcccuggaccagguguucgaguccaucgagaacagccaggcccuggucgaccaguccaacaagauccucaacagcgcggagaaggggaacaccggcuucaucaucguggugauccuggucgccgugcugggccucaccaugaucagcguguccaucaucaucaucaucaagaagacgcggaagcccaccggggccccgcccgagcugaacggcgucaccaacgggggcuucaucccccacagcuga

SEQ ID NO: 14673 - RNA, 1620 nt, Artificial Sequence
  HMPV/Sabana__AEA02280.1 fusion glycoprotein CDS gc (F0)
augagcuggaaggugaugaucaucaucucccugcucaucacgccccagcacggccugaaggagagcuaccuggaggaguccugcagcaccaucaccgagggguaccucuccguccugcgcaccggcugguacaccaacguguucacccuggaggugggggacgucgagaaccucacgugcaccgacggcccgagccugaucaagaccgagcuggaccucaccaaguccgcccugcgggagcugaagacggugagcgccgaccagcucgcgcgcgaggagcagaucgagaacccccggcagucccgcuucgugcugggggccaucgcccugggcgucgccaccgccgcggccgugaccgccggcaucgccaucgcgaagaccauccggcucgagagcgaggugaacgccaucaagggggcccugaagacgaccaacgaggccgucuccacccugggcaacggggugcgcgugcucgccaccgcgguccgggagcugaaggaguucgugagcaagaaccugacguccgccaucaacaagaacaagugcgacaucgccgaccucaagauggccgugagcuucucccaguucaaccgccgguuccugaacgucgugcgccaguucagcgacaacgccggcaucacccccgcgaucucccuggaccucaugaacgacgccgagcuggcccgggccgugagcuacaugcccaccuccgccgggcagaucaagcugaugcucgagaaccgcgcgaugguccggcgcaagggcuucggcauccugaucgggguguacggcagcagcgugaucuacaugguccagcugccgaucuucggggugaucaacacccccugcuggaucaucaaggccgcccccuccugcagcgagaaggacggcaacuacgccugccuccugcgggaggaccagggcugguacugcaagaacgccggguccacgguguacuaccccaacgagaaggacugcgagacccgcggcgaccacgucuucugcgacaccgcggccgggaucaacguggccgagcagagccgggagugcaacaucaacaucuccaccacgaacuacccgugcaaggucagcaccggccgccaccccaucuccaugguggcccugagcccccucggggcgcugguggccugcuacaagggcgucuccugcagcaccggcuccaaccagguggggaucaucaagcagcugcccaagggcugcagcuacaucaccaaccaggacgccgacacggugaccaucgacaacaccgucuaccagcucuccaagguggagggggagcagcacgugaucaagggccggccggucagcuccagcuucgaccccauccgcuuccccgaggaccaguucaacguggcccuggaccagguguucgaguccaucgagaacagccaggcccuggucgaccaguccaacaagauccucaacagcgcggagaaggggaacaccggcuucaucaucgugaucauccugaucgccgugcugggccucacgaugaucagcgucuccaucaucaucaucaucaagaagacccggaagcccaccggggccccgcccgagcugaacggcgugaccaacgggggcuucaucccccacagcuga

SEQ ID NO: 14674 - RNA, 1620 nt, Artificial Sequence
  HMPV/TN/92-4__ABM67072.1 fusion glycoprotein CDS human (F0)
augagcuggaagguggucaucauuuucucccugcucauaacaccccagcacggccuuaaagagucuuaccuggaagagucaugcaguaccaucacugaaggguauuugagcguuuuaagaacgggaugguacaccaacguguuuacacuggagguaggugacguggaaaaucuaacuuguuccgauggcccuucucucauuaagaccgagcuggaccuuacaaaaucggcccugagggaguugaagaccgucucagcugaucaacucgcacgggaggaacagaucgaaaacccacgccagagccgauucgugcugggggccauugcgcugggaguugcugccgcagccgcugugacugcaggcgucgccaucgcuaaaacaauacgucucgagagugaggugaccgccaucaauaacgcguuaaagaagacgaaugaagcaguauccacucuggguaacgggguuagagugcuugccaccgcugucagggaguugaaagacuuugugucuaagaaucugacacgggccauuaacaaaaauaagugcgauaucgacgaucuaaaaauggcagugagcuucucccaguuuaaccgcagauuccucaaugucguuaggcaauuuucagacaacgcuggaauuacuccggccaucagucuggaucuuaugaccgacgcggaacuggcccgggcagugcccaauaugccuacaagcgcuggccagauaaaguugaugcucgagaaccgcgccaugguacgaagaaagggcuucgggauucugaucggaguguaugguucuuccgucauuuacauggugcaguuaccaaucuuuggcguuaucgauacccccuguuggauugugaaagcugccccuucaugcagcgaaaagaaagggaauuaugcaugucugcucagggaggaccagggaugguacugccaaaacgccggcaguacggucuauuacccaaacgagaaggauugugaaacucggggugaccauguguucugcgacacagcugcggggauaaauguagcagagcagucuaaagaauguaacaucaauauuuccaccacuaacuaccccugcaagguuagcacaggacgucacccuaucucgaugguggcccuuucuccacugggcgcuuuggucgccuguuauaaaggcguguccugcucaauagggaguaaucgcgucggaauuaucaagcagcuaaacaaggguugcagcuacaucaccaaucaggaugcagacacggugaccauugauaacacaguuuaucaacuguccaaaguggagggcgaacagcauguaaucaaggggagaccggucucuagcucauuugaccccauuaaauucccugaggaucaguuuaauguggcccucgaccaaguuuucgagaacauagaaaauagucaggcucugguggaucaguccaacaggauccuuagcucugccgagaagggaaauacuggcuucauuaucgucaucauucugauagcaguguuggguucaaguaugauccucguaagcauuuuuaucauuaucaaaaagaccaagaaaccaacaggggcgcccccugaacuguccggcgugacuaacaauggauucauaccacacaacuga

SEQ ID NO: 14675 - RNA, 1620 nt, Artificial Sequence
  HMPV/TN/92-4__ABM67072.1 fusion glycoprotein CDS human (variant)
augagcuggaagguggucaucauuuucucccugcucauaacaccccagcacggccuuaaagagucuuaccuggaagagucaugcaguaccaucacugaaggguauuugagcguuuuaagaacgggaugguacaccaacguguuuacacuggagguaggugacguggaaaaucuaacuuguuccgauggcccuucucucauuaagaccgagcuggaccuuacaaaaucggcccugagggaguugaagaccgucucagcugaucaacucgcacgggaggaacagaucgaaaacccagggagcggaaguuucgugcugggcgccauugcgcuggguguugcugccgcagccgcugugacugcaggggucgccaucugcaaaacaauacgccucgaguccgaggugaccgcuaucaauaacgccuuaaagaagacgaaugaagcgguaucuacucugggaaacggcguucgagugcuugcauuugccguccgugaguugaaagacuucgugagcaagaaucugaccagagcucuaaacaaaaauaagugugauauugacgaucucaaaauggccguguccuuuucacaguucaacaggcgguuucugaaugucguucgccaguucagugacaacgcaggcaucacaccggcuauuagccuugaucugaugacugacgccgaauuggcgagagccgugcccaauaugccuaccucugcagggcaaaucaagcucaugcuggagaacagggcuaugguacggcgcaagggauuugguauauuaugcggcguguauggguccucagucauuuacauggugcagcugccaaucuucggaguuauugauacacccuguuggaucgugaaagccgcuccuagcugcagugaaaagaaaggcaauuaugccugucuccuucgagaggaccaggguugguacugccagaacgcagggucuaccgucuauuacccaaacgagaaggauugugaaacgagaggagaccauguguuuugcgacacugccgcuggcaucaauguagcggagcaauccaaagaauguaacauuaauauaagcacaaccaacuaccccugcaagguuucgacuggcaggcacccuaucucuaugguggcacuguccccauugggggcccuagucgcuugcuauaaaggagugucauguaguauugguagcaaucgggucggcaucauaaagcagcugaacaaggggugcuccuacauuacaaaucaggaugccgacaccgugacgaucgauaacaccguuuaucagcucucuaaaguggagggagaacaacauguaaucaagggccguccggucagcucaaguuucgaccccauuaaauuuccugaggaucaguucaauguggcacuggaccagguuuucgagaacaucgaaaauucccaagcccuuguggaucagagcaaccgcauucugucuucagcugagaaggguaauacaggguuuauaaucgucauuaucuugaucgccgugcucggcaguagcaugauucugguauccauauucaucauuaucaaaaagacuaagaaaccaaccggagcacccccugaauuaucuggcgugacaaacaauggguuuauuccacacaacuga

SEQ ID NO: 14676 - RNA, 1620 nt, Artificial Sequence
  HMPV/TN/92-4__ABM67072.1 fusion glycoprotein CDS human (variant)
augagcuggaagguggucaucauuuucucccugcucauaacaccccagcacggccuuaaagagucuuaccuggaagagucaugcaguaccaucacugaaggguauuugagcguuuuaagaacgggaugguacaccaacguguuuacacuggagguaggugacguggaaaaucuaacuuguuccgauggcccuucucucauuaagaccgagcuggaccuuacaaaaucggcccugagggaguugaagaccgucucagcugaucaacucgcacgggaggaacagaucgaaaacccagggagcggaaguuucgugcugggcgccauugcgcuggguguugcugccgcagccgcugugacugcaggggucgccaucugcaaaacaauacgccucgaguccgaggugaccgcuaucaauaacgccuuaaagaagacgaaugaagcgguaucuacucugggaaacggcguucgagugcuugcaaccgccguccgugaguugaaagacuuugugagcaagaaucugacaagagcuauuaacaaaaauaagugugauaucgacgaucuaaaaauggccguguccuucucacaguuuaacaggcgguuccucaaugucguucgccaguuuagugacaacgcaggcauuacuccggcuaucagccuggaucuuaugaccgacgccgaacuggcgagagccgugcccaauaugccuacaucugcagggcaaauaaaguugaugcucgagaacagggcuaugguacggcgcaagggauucgguauucugugcggcguguauggguccucagucaucuacauggugcaguuaccaauuuuuggaguuaucgauacccccuguuggaucgugaaagccgcuccuagcugcagugaaaagaaaggcaauuaugccugucugcuccgagaggaccaggguugguacugccagaacgcagggucuacggucuauuacccaaacgagaaggauugugaaacuagaggagaccauguguucugcgacacagccgcuggcauuaauguagcggagcaauccaaagaauguaacauaaauaucagcaccacuaacuaccccugcaagguuucgacaggcaggcacccuauuucuaugguggcacuuuccccacugggggccuuggucgcuugcuauaaaggagugucauguaguaucgguagcaaucgggucggcauaauuaagcagcuaaacaaggggugcuccuacaucaccaaucaggaugccgacacggugaccaucgauaacacaguuuaucagcugucuaaaguggagggagaacaacauguaauuaagggccguccggucagcucaaguuuugaccccaucaaauucccugagcaccaguggcauguggcacucgaucagguuuuugagaauauugaaaacucccaagcccugguggaccagagcaaucgcauacuuucuucagcugagaaggguaacacuggguucaucauugucaucauccugauugccguguugggcaguagcaugauacucguauccaucuucauuaucauuaaaaagaccaagaaaccaacaggagcacccccugaacugucuggcgugacuaauaacggguuuaucccacacaauuga

SEQ ID NO: 14677 - RNA, 1620 nt, Artificial Sequence
  HMPV/TN/92-4__ABM67072.1 fusion glycoprotein CDS human (variant)
augagcuggaagguggucaucauuuucucccugcucauaacaccccagcacggccuuaaagagucuuaccuggaagagucaugcaguaccaucacugaaggguauuugagcguuuuaagaacgggaugguacaccaacguguuuacacuggagguaggugacguggaaaaucuaacuuguuccgauggcccuucucucauuaagaccgagcuggaccuucugaaaucggccuugagggagcucaagacagucucagcugaucaacuggcacgggaggaacagaucgaaaacccagggagcggaaguuucgugcugggcgccauugcgcucgguguugcugccgcagccgcugugaccgcaggggucgccaucgcuaaaacuauacgcuuagaguccgaggugacagccaucaauaacgcgcugaagaagaccaaugaagcaguaucuacgcuuggaaacggcguucgaguguuggccacugcuguccgugagcugaaagacuuugugagcaagaaucuaaccagagccauuaacaaaaauaagugcgauaucccggaccucaaaauggcaguguccuucucacaguuuaacaggcgguuccugaaugucguucgccaguuuagugauaacgcuggcauuacacccgccaucagccuugaccugaugacugaugcggaauuggccagagcagugccuaauaugccaaccucugcugggcaaauaaagcucaugcuggagaacagggccaugguacggcgcaagggauucgguauuuuaaucggcguguauggguccucagucauuuacauggugcagcugcccaucuuuggaguuaucgacacaccuuguuggauugugaaagcugccccaagcugcagugaaaagaaaggcaauuaugcaugucuccuucgagaggaucaggguugguacugccagaacgccgggucuaccgucuauuaccccaacgagaaggacugugaaacgagaggagaucauguguucugcgacacugcugcgggcauaaauguagcagagcaauccaaagaauguaacaucaauauuagcacaaccaacuacccuugcaagguuucgacuggcaggcacccaaucucuaugguggcccuguccccguugggggcucuagucgccuguuauaaaggagugucaugcaguauagguagcaaucgggucggcauuaucaagcagcugaacaaggggugcuccuacaucacaaaucaggacgcagauaccgugacgauugacaacaccguuuaucagcucucuaaaguggagggagaacaacauguaaucaagggccgucccgucagcucaaguuuugauccuauuaaauucccagaggaccaguuucagguggcccuggaucaaguuuucgagaauauagaaaacucccaggcucuuguggaccagagcaaucgcauccugucuucagccgagaaggguaacacaggguucauuaucgucaucauuuugauagcagugcucggcaguagcaugauccugguauccauuuuuaucauuaucaaaaagacuaagaaacccaccggagcgccuccagaauuaucuggcgugacaaauaacggguucauaccccacaauuga

SEQ ID NO: 14678 - RNA, 1620 nt, Artificial Sequence
  HMPV/TN/92-4__ABM67072.1 fusion glycoprotein CDS human (variant)
augagcuggaagguggucaucauuuucucccugcucauaacaccccagcacggccuuaaagagucuuaccuggaagagucaugcaguaccaucacugaaggguauuugagcguuuuaagaacgggaugguacaccaacguguuuacacuggagguaggugacguggaaaaucuaacuuguuccgauggcccuucucucauuaagaccgagcuggaccuucugaaaucggccuugagggagcucaagacagucucagcugaucaacuggcacgggaggaacagaucgaaaacccagggagcggaaguuucgugcugggcgccauugcgcucgguguugcugccgcagccgcugugaccgcaggggucgccaucgcuaaaacuauacgcuuagaguccgaggugacagccaucaauaacgcgcugaagaagaccaaugaagcaguaucuacgcuuggaaacggcguucgaguguuggccacugcuguccgugagcugaaagacuuugugagcaagaaucuaaccagagccauuaacaaaaauaagugcgauaucccggaccucaaaauggcaguguccuucucacaguuuaacaggcgguuccugaaugucguucgccaguuuagugauaacgcuggcauuacacccgccaucagccuugaccugaugacugaugcggaauuggccagagcagugccuaauaugccaaccucugcugggcaaauaaagcucaugcuggagaacagggccaugguacggcgcaagggauucgguauuuuaaucggcguguauggguccucagucauuuacauggugcagcugcccaucuuuggaguuaucgacacaccuuguuggauugugaaagcugccccaagcugcagugaaaagaaaggcaauuaugcaugucuccuucgagaggaucaggguugguacugccagaacgccgggucuaccgucuauuaccccaacgagaaggacugugaaacgagaggagaucauguguucugcgacacugcugcgggcauaaauguagcagagcaauccaaagaauguaacaucaauauuagcacaaccaacuacccuugcaagguuucgacuggcaggcacccaaucucuaugguggcccuguccccguugggggcucuagucgccuguuauaaaggagugucaugcaguauagguagcaaucgggucggcauuaucaagcagcugaacaaggggugcuccuacaucacaaaucaggacgcagauaccgugacgauugacaacaccguuuaucagcucucuaaaguggagggagaacaacauguaaucaagggccgucccgucagcucaaguuuugauccuauuaaauucccagagaaucaguuucagguggcccuggaccaaguuuucgagaacauagaaaauucccaggcucuuguggaucagagcaaccgcauccugucuucagccgagaaggguaauacaggguucauuaucgucaucauuuugauagcagugcucggcaguagcaugauccugguauccauuuuuaucauuaucaaaaagacuaagaaacccaccggagcgccuccagaauuaucuggcgugacaaacaauggguucauaccccacaacuga

SEQ ID NO: 14679 - RNA, 1620 nt, Artificial Sequence
  HMPV/TN/92-4__ABM67072.1 fusion glycoprotein CDS human (variant)
augagcuggaagguggucaucauuuucucccugcucauaacaccccagcacggccuuaaagagucuuaccuggaagagucaugcaguaccaucacugaaggguauuugagcguuuuaagaacgggaugguacaccaacguguuuacacuggagguaggugacguggaaaaucuaacuuguuccgauggcccuucucucauuaagaccgagcuggaccuucugaaaucggccuugagggagcucaagacagucucagcugaucaacuggcacgggaggaacagaucgaaaacccagggagcggaaguuucgugcugggcgccauugcgcucgguguugcugccgcagccgcugugaccgcaggggucgccaucgcuaaaacuauacgcuuagaguccgaggugacagccaucaauaacgcgcugaagaagaccaaugaagcaguaucuacgcuuggaaacggcguucgaguguuggccacugcuguccgugagcugaaagacuuugugcuaaagaaucucaccagagccauuaacaaaaauaagugcgauaucccggaccugaaaauggcagugagcuucucccaguuuaacaggcgguuccuuaaugucguucgccaguuuucagauaacgcuggcauuacacccgccaucagucuggacuugaugacugaugcggaacucgccagagcagugccuaauaugccaaccagcgcugggcaaauaaagcugauguuagagaacagggccaugguacggcgcaagggauucgguauucugaucggcguguaugggucuuccgucauuuacauggugcagcuccccaucuuuggaguuaucgacacaccuuguuggauugugaaagcugccccaucaugcagcgaaaagaaaggcaauuaugcaugucuucugcgagaggaucaggguugguacugccagaacgccgggaguaccgucuauuaccccaacgagaaggacugugaaacgagaggagaucauguguucugcgacacugcugcgggcauaaauguagcagagcaaucuaaagaauguaacaucaauauuuccacaaccaacuacccuugcaagguuagcacuggcaggcacccaaucucgaugguggccuugucuccgcuaggggcucuggucgccuguuauaaaggaguguccugcucaauagguaguaaucgggucggcauuaucaagcagcucaacaaggggugcagcuacaucacaaaucaggacgcagauaccgugacgauugacaacaccguuuaucagcuguccaaaguggagggagaacaacauguaaucaagggccgucccgucucuagcucauuugauccuauuaaauucccagaggaccaguuucagguggcccuugaucaaguuuucgagaauauagaaaacagucaggcucugguggaccaguccaaucgcaucuugagcucugccgagaaggguaacacaggguucauuaucgucaucauucucauagcagugcugggcucaaguaugaucuuaguaagcauuuuuaucauuaucaaaaagacuaagaaacccaccggagcgccuccagaacuguccggcgugacaaauaacggguucauaccccacaauuga

SEQ ID NO: 14680 - RNA, 1620 nt, Artificial Sequence
  HMPV/TN/92-4__ABM67072.1 fusion glycoprotein CDS human (variant)
augagcuggaagguggucaucauuuucucccugcucauaacaccccagcacggccuuaaagagucuuaccuggaagagucaugcaguaccaucacugaaggguauuugagcguuuuaagaacgggaugguacaccaacguguuuacacuggagguaggugacguggaaaaucuaacuuguuccgauggcccuucucucauuaagaccgagcuggaccuucugaaaucggccuugagggagcucaagacagucucagcugaucaacuggcacgggaggaacagaucgaaaacccagggagcggaaguuucgugcugggcgccauugcgcucgguguugcugccgcagccgcugugaccgcaggggucgccaucgcuaaaacuauacgcuuagaguccgaggugacagccaucaauaacgcgcugaagaagaccaaugaagcaguaucuacgcuuggaaacggcguucgaguguuggccacugcuguccgugagcugaaagacuuugugcuaaagaaucucaccagagccauuaacaaaaauaagugcgauaucccggaccugaaaauggcagugagcuucucccaguuuaacaggcgguuccuuaaugucguucgccaguuuucagauaacgcuggcauuacacccgccaucagucuggacuugaugacugaugcggaacucgccagagcagugccuaauaugccaaccagcgcugggcaaauaaagcugauguuagagaacagggccaugguacggcgcaagggauucgguauucugaucggcguguaugggucuuccgucauuuacauggugcagcuccccaucuuuggaguuaucgacacaccuuguuggauugugaaagcugccccaucaugcagcgaaaagaaaggcaauuaugcaugucuucugcgagaggaucaggguugguacugccagaacgccgggaguaccgucuauuaccccaacgagaaggacugugaaacgagaggagaucauguguucugcgacacugcugcgggcauaaauguagcagagcaaucuaaagaauguaacaucaauauuuccacaaccaacuacccuugcaagguuagcacuggcaggcacccaaucucgaugguggccuugucuccgcuaggggcucuggucgccuguuauaaaggaguguccugcucaauagguaguaaucgggucggcauuaucaagcagcucaacaaggggugcagcuacaucacaaaucaggacgcagauaccgugacgauugacaacaccguuuaucagcuguccaaaguggagggagaacaacauguaaucaagggccgucccgucucuagcucauuugauccuauuaaauucccagagaaucaguuucagguggcccuugaccaaguuuucgagaacauagaaaauagucaggcucugguggaucaguccaaccgcaucuugagcucugccgagaaggguaauacaggguucauuaucgucaucauucucauagcagugcugggcucaaguaugaucuuaguaagcauuuuuaucauuaucaaaaagacuaagaaacccaccggagcgccuccagaacuguccggcgugacaaacaauggguucauaccccacaacuga

SEQ ID NO: 14681 - RNA, 1620 nt, Artificial Sequence
  HMPV/TN/92-4__ABM67072.1 fusion glycoprotein CDS human (variant)
augagcuggaagguggucaucauuuucucccugcucauaacaccccagcacggccuuaaagagucuuaccuggaagagucaugcaguaccaucacugaaggguauuugagcguuuuaagaacgggaugguacaccaacguguuuacacugccuguaggugacguggagaaucuaacuuguuccgauggcccaucucucauuaagaccgaacuggaccuucugaaaucggccuugagggagcucaagacagucucagcugaucaacuggcacgggaggaacagaucgagaacccggggagcggaaguuucgugcugggcgccauugcgcucgguguugcugccgcagccgcugugaccgcaggggucgccaucgcuaaaacuauacgcuuagaauccgaggugacagccaucaauaacgcgcugaagaagaccaaugaggcaguaucuacgcuuggaaacggcguucgaguguuggccacugcuguccgugaacugaaagacuuugugagcaagaaucuaaccagagccauuaacaaaaauaagugcgauaucgacgaucucaaaauggcaguguccuucucacaguuuaacaggcgguuccugaaugucguucgccaguuuagugacaacgcuggcauuacacccgccaucagccuugaucugaugacugacgcggaguuggccagagcagugccuaauaugccaaccucugcugggcaaauaaagcucaugcuggaaaacagggccaugguacggcgcaagggauucgguauuuuaaucggcguguauggguccucagucauuuacauggugcagcugcccaucuuuggaguuaucgauacaccuuguuggauugugaaagcugccccaagcugcagugagaagaaaggcaauuaugcaugucuccuucgagaagaccaggguugguacugccagaacgccgggucuaccgucuauuaccccaacgagaaggauugugagacgagaggagaccauguguucugcgacacugcugcgggcauaaauguagcagaacaauccaaagaguguaacaucaauauuagcacaaccaacuacccuugcaagguuucgacuggcaggcacccaaucucuaugguggcccuguccccguugggggcucuagucgccuguuauaaaggagugucaugcaguauagguagcaaucgggucggcauuaucaagcagcugaacaaggggugcuccuacaucacaaaucaggaugcagacaccgugacgauugauaacaccguuuaucagcucucuaaaguggaaggagagcaacauguaaucaagggccgucccgucagcucaaguuuugacccuauuaaauucccagaagaucaguuucagguggcccuggaccaaguuuucgagaauauagagaacucccaggcucuuguggaucagagcaaucgcauccugucuucagccgaaaaggguaacacaggguucauuaucgucaucauuuugauagcagugcucggcaguagcaugauccugguauccauuuuuaucauuaucaaaaagacuaagaaacccaccggagcgccuccagaguuaucuggcgugacaaauaacggguucauaccccacaauuga

SEQ ID NO: 14682 - RNA, 1620 nt, Artificial Sequence
  HMPV/TN/92-4__ABM67072.1 fusion glycoprotein CDS human (variant)
augagcuggaagguggucaucauuuucucccugcucauaacaccccagcacggccuuaaagagucuuaccuggaagagucaugcaguaccaucacugaaggguauuugagcguuuuaagaacgggaugguacaccaacguguuuacacugccuguaggugacguggagaaucuaacuuguuccgauggcccaucucucauuaagaccgaacuggaccuucugaaaucggccuugagggagcucaagacagucucagcugaucaacuggcacgggaggaacagaucgagaacccggggagcggaaguuucgugcugggcgccauugcgcucgguguugcugccgcagccgcugugaccgcaggggucgccaucgcuaaaacuauacgcuuagaauccgaggugacagccaucaauaacgcgcugaagaagaccaaugaggcaguaucuacgcuuggaaacggcguucgaguguuggccacugcuguccgugaacugaaagacuuugugagcaagaaucuaaccagagccauuaacaaaaauaagugcgauaucgacgaucucaaaauggcaguguccuucucacaguuuaacaggcgguuccugaaugucguucgccaguuuagugacaacgcuggcauuacacccgccaucagccuugaucugaugacugacgcggaguuggccagagcagugccuaauaugccaaccucugcugggcaaauaaagcucaugcuggaaaacagggccaugguacggcgcaagggauucgguauuuuaaucggcguguauggguccucagucauuuacauggugcagcugcccaucuuuggaguuaucgauacaccuuguuggauugugaaagcugccccaagcugcagugagaagaaaggcaauuaugcaugucuccuucgagaagaccaggguugguacugccagaacgccgggucuaccgucuauuaccccaacgagaaggauugugagacgagaggagaccauguguucugcgacacugcugcgggcauaaauguagcagaacaauccaaagaguguaacaucaauauuagcacaaccaacuacccuugcaagguuucgacuggcaggcacccaaucucuaugguggcccuguccccguugggggcucuagucgccuguuauaaaggagugucaugcaguauagguagcaaucgggucggcauuaucaagcagcugaacaaggggugcuccuacaucacaaaucaggaugcagacaccgugacgauugauaacaccguuuaucagcucucuaaaguggaaggagagcaacauguaaucaagggccgucccgucagcucaaguuuugacccuauuaaauucccagaaaaucaguuucagguggcccuggaucaaguuuucgagaacauagaaaauucccaggcucuuguggaccagagcaaccgcauccugucuucagccgagaaggguaauacaggguucauuaucgucaucauuuugauagcagugcucggcaguagcaugauccugguauccauuuuuaucauuaucaaaaagacuaagaaacccaccggagcgccuccagaguuaucuggcgugacaaacaauggguucauaccccacaacuga

SEQ ID NO: 14683 - RNA, 1620 nt, Artificial Sequence
  HMPV/TN/92-4__ABM67072.1 fusion glycoprotein CDS human (variant)
augagcuggaagguggucaucauuuucucccugcucauaacaccccagcacggccuuaaagagucuuaccuggaagagucaugcaguaccaucacugaaggguauuugagcguuuuaagaacgggaugguacaccaacguguuuacacuggagguaggugacguggaaaaucuaacuuguuccgauggcccuucucucauuaagaccgagcuggaccuucugaaaucggccuugagggagcucaagacagucucagcugaucaacuggcacgggaggaacagaucgaaaacccagggagcggaaguuucgugcugggcgccauugcgcucgguguugcugccgcagccgcugugaccgcaggggucgccaucgcuaaaacuauacgcuuagaguccgaggugacagccaucaauaacgcgcugaagaagaccaaugaagcaguaucuacgcuuggaaacggcguucgaguguuggccacugcuguccgugagcugaaagacuuugugagcaagaaucuaaccagagccauuaacaaaaauaagugcgauaucgacgaucucaaaauggcaguguccuucucacaguuuaacaggcgguuccugaaugucguucgccaguuuagugacaacgcuggcauuacaccggccaucagccuugaucugaugacugacgcggaauuggccagagcagugcccaauaugccuaccucugcugggcaaauaaagcucaugcuggagaacagggccaugguacggcgcaagggauucgguauuuuaaucggcguguauggguccucagucauuuacauggugcagcugccaaucuuuggaguuaucgauacacccuguuggauugugaaagcugccccuagcugcagugaaaagaaaggcaauuaugcaugucuccuucgagaggaccaggguugguacugccagaacgccgggucuaccgucuauuacccaaacgagaaggauugugaaacgagaggagaccauguguucugcgacacugcugcgggcauaaauguagcagagcaauccaaagaauguaacaucaauauuagcacaaccaacuaccccugcaagguuucgacuggcaggcacccuaucucuaugguggcccuguccccauugggggcucuagucgccuguuauaaaggagugucaugcaguauagguagcaaucgggucggcauuaucaagcagcugaacaaggggugcuccuacaucacaaaucaggaugcagacaccgugacgauugauaacaccguuuaucagcucucuaaaguggagggagaacaacauguaaucaagggccguccggucagcucaaguuuugaccccauuaaauucccugaggaucaguuucagguggcccuggaccaaguuuucgagaauauagaaaacucccaggcucuuguggaucagagcaaucgcauccugucuucagccgagaaggguaacacaggguucauuaucgucaucauuuugauagcagugcucggcaguagcaugauccugguauccauuuuuaucauuaucaaaaagacuaagaaaccaaccggagcgcccccugaauuaucuggcgugacaaauaacggguucauaccacacaauuga

SEQ ID NO: 14684 - RNA, 1620 nt, Artificial Sequence
  HMPV/TN/92-4__ABM67072.1 fusion glycoprotein CDS human (variant)
augagcuggaagguggucaucauuuucucccugcucauaacaccccagcacggccuuaaagagucuuaccuggaagagucaugcaguaccaucacugaaggguauuugagcguuuuaagaacgggaugguacaccaacguguuuacacuggagguaggugaccuagaaaaucucacuuguuccgauggcccuucucugauuaagaccgagcuugaccugacaaaaucggccuugagggagcucaagaccgugucagcugaucaacuggcacgggaggaacagaucgaaaacccagggagcggaaguuucguccugggcgccauugcgcucgguguggcugccgcagccgcuguuacugcagggguggccaucgcuaaaacaauacgcuuagaguccgaggucaccgccaucaauaacgcgcugaagaagacgaaugaagcagugucuacucuuggaaacggcguacgaguuuuggccaccgcugugcgugagcugaaagacuuugucagcaagaaucuaacaagagccauuaacaaaaauaagugcgauaucgacgaucucaaaauggcaguguccuucucacaguuuaacaggcgguuccugaaugugguccgccaguuuagugacaacgcuggcauuacuccggccaucagccuugaucugaugaccgacgcggaauuggccagagcaguucccaauaugccuacaucugcugggcaaauaaagcucaugcuggagaacagggccauggugcggcgcaagggauucgguauuuuaaucggcguauauggguccucagugauuuacaugguccagcugccaaucuuuggagugaucgauacccccuguuggauuguuaaagcugccccuagcugcagugaaaagaaaggcaauuaugcaugucuccuucgagaggaccaggguugguacugccagaacgccgggucuacgguguauuacccaaacgagaaggauugugaaacuagaggagaccaugucuucugcgacacagcugcgggcauaaauguggcagagcaauccaaagaauguaacaucaauauuagcaccacuaacuaccccugcaagguaucgacaggcaggcacccuaucucuaugguugcccuguccccauugggggcucuaguggccuguuauaaaggagucucaugcaguauagguagcaaucgggugggcauuaucaagcagcugaacaaggggugcuccuacaucaccaaucaggaugcagacacggucaccauugauaacacaguguaucagcucucuaaaguugagggagaacaacaugugaucaagggccguccgguaagcucaaguuuugaccccauuaaauucccugaggaucaguuucaggucgcccuggaccaaguguucgagaauauagaaaacucccaggcucuuguugaucagagcaaucgcauccugucuucagccgagaaggguaacacuggguucauuaucgugaucauuuugauagcaguccucggcaguagcaugauccugguguccauuuuuaucauuaucaaaaagaccaagaaaccaacaggagcgcccccugaauuaucuggcguaacuaauaacggguucauaccacacaauuga

SEQ ID NO: 14685 - RNA, 1620 nt, Artificial Sequence
  HMPV/TN/92-4__ABM67072.1 fusion glycoprotein CDS human (variant)
augagcuggaagguggucaucauuuucucccugcucauaacaccccagcacggccuuaaagagucuuaccuggaagagucaugcaguaccaucacugaaggguauuugagcguuuuaagaacgggaugguacaccaacguguuuacacuggagguaggugacguggaaaaucuaacuuguuccgauggcccuucucucauuaagaccgagcuggaccuuacaaaaucggcccugagggaguugaagaccgucucagcugaucaacucgcacgggaggaacagaucgaaaacccagggagcggaaguuucgugcugggcgccauugcgcuggguguugcugccgcagccgcugugacugcaggggucgccaucgcuaaaacaauacgccucgaguccgaggugaccgccaucaauaacgcguuaaagaagacgaaugaagcaguaucuacucugggaaacggcguucgagugcuugccaccgcuguccgugaguugaaagacuuugugcugaagaaucuaacaagagccauuaacaaaaauaagugcgauaucgacgaucucaaaauggcagugagcuucucccaguuuaacaggcgguuccugaaugucguucgccaguuuucagacaacgcuggcauuacuccggccaucagucuugaucugaugaccgacgcggaauuggccagagcagugcccaauaugccuacaagcgcugggcaaauaaagcucaugcuggagaacagggccaugguacggcgcaagggauucgguauuuuaaucggcguguaugggucuuccgucauuuacauggugcagcugccaaucuuuggaguuaucgauacccccuguuggauugugaaagcugccccuucaugcagcgaaaagaaaggcaauuaugcaugucuccuucgagaggaccaggguugguacugccagaacgccgggaguacggucuauuacccaaacgagaaggauugugaaacuagaggagaccauguguucugcgacacagcugcgggcauaaauguagcagagcaaucuaaagaauguaacaucaauauuuccaccacuaacuaccccugcaagguuagcacaggcaggcacccuaucucgaugguggcccugucuccauugggggcucuagucgccuguuauaaaggaguguccugcucaauagguaguaaucgggucggcauuaucaagcagcugaacaaggggugcagcuacaucaccaaucaggaugcagacacggugaccauugauaacacaguuuaucagcucuccaaaguggagggagaacaacauguaaucaagggccguccggucucuagcucauuugaccccauuaaauucccugaggaucaguuucagguggcccuggaccaaguuuucgagaauauagaaaacagucaggcucuuguggaucaguccaaucgcauccugagcucugccgagaaggguaacacuggguucauuaucgucaucauuuugauagcagugcucggcucaaguaugauccugguaagcauuuuuaucauuaucaaaaagaccaagaaaccaacaggagcgcccccugaauuauccggcgugacuaauaacggguucauaccacacaauuga

SEQ ID NO: 14686 - RNA, 1620 nt, Artificial Sequence
  HMPV/TN/92-4__ABM67072.1 fusion glycoprotein CDS human (variant)
augagcuggaagguggucaucauuuucucccugcucauaacaccccagcacggccuuaaagagucuuaccuggaagagucaugcaguaccaucacugaaggguauuugagcguuuuaagaacgggaugguacaccaacguguuuacacuggagguaggugacguggaaaaucuaacuuguuccgauggcccuucucucauuaagaccgagcuggaccuuacaaaaucggcccugagggaguugaagaccgucucagcugaucaacucgcacgggaggaacagaucgaaaacccagggagcggaaguuucgugcugggcgccauugcgcuggguguugcugccgcagccgcugugacugcaggggucgccaucgcuaaaacaauacgccucgaguccgaggugaccgccaucaauaacgcguuaaagaagacgaaugaagcaguaucuacucugggaaacggcguucgagugcuugccaccgcuguccgugaguugaaagacuuugugagcaagaaucuguggagagccauuaacaaaaauaagugcgauaucgacgaucuaaaaauggcaguguccuucucacaguuuaacaggcgguuccucaaugucguucgccaguuuagugacaacgcuggcauuacaccggccaucagccuggaucuuaugacugacgcggaacuggccagagcagugcccaauaugccuaccucugcugggcaaauaaaguugaugcucgagaacagggccaugguacggcgcaagggauucgguauucugaucggcguguauggguccucagucauuuacauggugcaguuaccaaucuuuggaguuaucgauacacccuguuggauugugaaagcugccccuagcugcagugaaaagaaaggcaauuaugcaugucugcuccgagaggaccaggguugguacugccagaacgccgggucuaccgucuauuacccaaacgagaaggauugugaaacgagaggagaccauguguucugcgacacugcugcgggcauaaauguagcagagcaauccaaagaauguaacaucaauauuagcacaaccaacuaccccugcaagguuucgacuggcaggcacccuaucucuaugguggcccuuuccccacugggggcuuuggucgccuguuauaaaggagugucaugcaguauagguagcaaucgggucggcauuaucaagcagcuaaacaaggggugcuccuacaucacaaaucaggaugcagacaccgugacgauugauaacaccguuuaucagcugucuaaaguggagggagaacaacauguaaucaagggccguccggucagcucaaguuuugaccccauuaaauucccugaggaucaguuucagguggcccucgaccaaguuuucgagaauauagaaaacucccaggcucugguggaucagagcaaucgcauccuuucuucagccgagaaggguaacacaggguucauuaucgucaucauucugauagcaguguugggcaguagcaugauccucguauccauuuuuaucauuaucaaaaagacuaagaaaccaaccggagcgcccccugaacugucuggcgugacaaauaacggguucauaccacacaauuga

SEQ ID NO: 14687 - RNA, 1620 nt, Artificial Sequence
  HMPV/TN/92-4__ABM67072.1 fusion glycoprotein CDS human (variant)
augagcuggaagguggucaucauuuucucccugcucauaacaccccagcacggccuuaaagagucuuaccuggaagagucaugcaguaccaucacugaaggguauuugagcguuuuaagaacgggaugguacaccaacguguuuacacuggagguaggugaccuagaaaaucucacuuguuccgauggcccuucucugauuaagaccgagcuugaccuguugaaaucggcccucagggagcugaagacagugucagcugaucaacuggcacgggaggaacagaucgaaaacccagggagcggaaguuucguccucggcgccauugcguuagguguggcugccgcagccgcuguuaccgcagggguggccaucgcuaaaacuauacgccuggaguccgaggucacagccaucaauaacgcgcuuaagaagaccaaugaagcagugucuacguugggaaacggcguacgaguucuggccacugcugugcgugagcuaaaagacuuuguccucaagaaucuguggagagccauuaacaaaaauaagugcgauaucgacgaucuuaaaauggcagugagcuucucccaguuuaacaggcgguuccugaaugugguccgccaguuuucagacaacgcuggcauuaccccggccaucaguuuggaucucaugacagacgcggaacuggccagagcaguucccaauaugccuacuagcgcugggcaaauaaaguuaaugcuggagaacagggccauggugcggcgcaagggauucgguauucucaucggcguauaugggucuuccgugauuuacaugguccagcuuccaaucuuuggagugaucgauacccccuguuggauuguuaaagcugccccuucaugcagcgaaaagaaaggcaauuaugcaugucuguugcgagaggaccaggguugguacugccagaacgccgggaguacaguguauuacccaaacgagaaggauugugaaaccagaggagaccaugucuucugcgacacggcugcgggcauaaauguggcagagcaaucuaaagaauguaacaucaauauuuccacuacaaacuaccccugcaagguaagcaccggcaggcacccuaucucgaugguugcccuaucuccacugggggcucucguggccuguuauaaaggagucuccugcucaauagguaguaaucgggugggcauuaucaagcagcugaacaaggggugcagcuacaucacuaaucaggaugcagacacagucaccauugauaacacgguguaucagcuuuccaaaguugagggagaacaacaugugaucaagggccguccgguaucuagcucauuugaccccauuaaauucccugaggaucaguuucaggucgcccuggaccaaguguucgagaauauagaaaacagucaggcuuugguugaucaguccaaucgcauccucagcucugccgagaaggguaacaccggguucauuaucgugaucauucugauagcagucuuaggcucaaguaugauccuggugagcauuuuuaucauuaucaaaaagacaaagaaaccaacuggagcgcccccugaacuauccggcguaaccaauaacggguucauaccacacaauuga

SEQ ID NO: 14688 - RNA, 1620 nt, Artificial Sequence
  HMPV/TN/92-4__ABM67072.1 fusion glycoprotein CDS human (variant)
augagcuggaagguggucaucauuuucucccugcucauaacaccccagcacggccuuaaagagucuuaccuggaagagucaugcaguaccaucacugaaggguauuugagcguuuuaagaacgggaugguacaccaacguguuuacacugccuguaggugacguggagaaucuaacuuguuccgauggcccaucucucauuaagaccgaacuggaccuuacaaaaucggcccugagggaguugaagaccgucucagcugaucaacucgcacgggaggaacagaucgagaacccggggagcggaaguuucgugcugggcgccauugcgcuggguguugcugccgcagccgcugugacugcaggggucgccaucgcuaaaacaauacgccucgaauccgaggugaccgccaucaauaacgcguuaaagaagacgaaugaggcaguaucuacucugggaaacggcguucgagugcuugccaccgcuguccgugaauugaaagacuuugugagcaagaaucugacaagagccauuaacaaaaauaagugcgauaucgacgaucuaaaaauggcaguguccuucucacaguuuaacaggcgguuccucaaugucguucgccaguuuagugacaacgcuggcauuacucccgccaucagccuggaucuuaugaccgacgcggagcuggccagagcagugccuaauaugccaacaucugcugggcaaauaaaguugaugcucgaaaacagggccaugguacggcgcaagggauucgguauucugaucggcguguauggguccucagucauuuacauggugcaguuacccaucuuuggaguuaucgauaccccuuguuggauugugaaagcugccccaagcugcagugagaagaaaggcaauuaugcaugucugcuccgagaagaccaggguugguacugccagaacgccgggucuacggucuauuaccccaacgagaaggauugugagacuagaggagaccauguguucugcgacacagcugcgggcauaaauguagcagaacaauccaaagaguguaacaucaauauuagcaccacuaacuacccuugcaagguuucgacaggcaggcacccaaucucuaugguggcccuuuccccgcugggggcuuuggucgccuguuauaaaggagugucaugcaguauagguagcaaucgggucggcauuaucaagcagcuaaacaaggggugcuccuacaucaccaaucaggaugcagacacggugaccauugauaacacaguuuaucagcugucuaaaguggaaggagagcaacauguaaucaagggccgucccgucagcucaaguuuugacccuauuaaauucccagaagaucaguuucagguggcccucgaccaaguuuucgagaauauagagaacucccaggcucugguggaucagagcaaucgcauccuuucuucagccgaaaaggguaacacuggguucauuaucgucaucauucugauagcaguguugggcaguagcaugauccucguauccauuuuuaucauuaucaaaaagaccaagaaacccacaggagcgccuccagagcugucuggcgugacuaauaacggguucauaccccacaauuga

SEQ ID NO: 14689 - RNA, 1620 nt, Artificial Sequence
  HMPV/TN/92-4__ABM67072.1 fusion glycoprotein CDS human (variant)
augagcuggaagguggucaucauuuucucccugcucauaacaccccagcacggccuuaaagagucuuaccuggaagagucaugcaguaccaucacugaaggguauuugagcguuuuaagaacgggaugguacaccaacguguuuacacuggagguaggugacguggaaaaucuaacuuguuccgauggcccuucucucauuaagaccgagcuggaccuuacaaaaucggcccugagggaguugaagaccgucucagcugaucaacucgcacgggaggaacagaucgaaaacccagggagcggaaguuucgugcugggcgccauugcgcuggguguugcugccgcagccgcugugacugcaggggucgccaucgcuaaaacaauacgccucgaguccgaggugaccgccaucaauaacgcguuaaagaagacgaaugaagcaguaucuacucugggaaacggcguucgagugcuugccaccgcuguccgugaguugaaagacuuugugagcaagaaucugacaagagccauuaacaaaaauaagugcgauaucccggaccuaaaaauggcaguguccuucucacaguuuaacaggcgguuccucaaugucguucgccaguuuagugauaacgcuggcauuacucccgccaucagccuggaccuuaugaccgaugcggaacuggccagagcagugccuaauaugccaacaucugcugggcaaauaaaguugaugcucgagaacagggccaugguacggcgcaagggauucgguauucugaucggcguguauggguccucagucauuuacauggugcaguuacccaucuuuggaguuaucgacaccccuuguuggauugugaaagcugccccaagcugcagugaaaagaaaggcaauuaugcaugucugcuccgagaggaucaggguugguacugccagaacgccgggucuacggucuauuaccccaacgagaaggacugugaaacuagaggagaucauguguucugcgacacagcugcgggcauaaauguagcagagcaauccaaagaauguaacaucaauauuagcaccacuaacuacccuugcaagguuucgacaggcaggcacccaaucucuaugguggcccuuuccccgcugggggcuuuggucgccuguuauaaaggagugucaugcaguauagguagcaaucgggucggcauuaucaagcagcuaaacaaggggugcuccuacaucaccaaucaggacgcagauacggugaccauugacaacacaguuuaucagcugucuaaaguggagggagaacaacauguaaucaagggccgucccgucagcucaaguuuugauccuauuaaauucccagaggaccaguuucagguggcccucgaucaaguuuucgagaauauagaaaacucccaggcucugguggaccagagcaaucgcauccuuucuucagccgagaaggguaacacuggguucauuaucgucaucauucugauagcaguguugggcaguagcaugauccucguauccauuuuuaucauuaucaaaaagaccaagaaacccacaggagcgccuccagaacugucuggcgugacuaauaacggguucauaccccacaauuga

SEQ ID NO: 14690 - RNA, 1620 nt, Artificial Sequence
  HMPV/TN/92-4__ABM67072.1 fusion glycoprotein CDS human (variant)
augagcuggaagguggucaucauuuucucccugcucauaacaccccagcacggccuuaaagagucuuaccuggaagagucaugcaguaccaucacugaaggguauuugagcguuuuaagaacgggaugguacaccaacguguuuacacuggagguaggugacguggaaaaucuaacuuguuccgauggcccuucucucauuaagaccgagcuggaccuuacaaaaucggcccugagggaguugaagaccgucucagcugaucaacucgcacgggaggaacagaucgaaaacccagggagcggaaguuucgugcugggcgccauugcgcuggguguugcugccgcagccgcugugacugcaggggucgccaucgcuaaaacaauacgccucgaguccgaggugaccgccaucaauaacgcguuaaagaagacgaaugaagcaguaucuacucugggaaacggcguucgagugcuugccaccgcuguccgugaguugaaagacuuugugagcaagaaucugacaagagccauuaacaaaaauaagugcccgaucgaugaccuaaaaauggcaguguccuucucacaguuuaacaggcgguuccucaaugucguucgccaguuuagugauaacgcuggcauuacucccgccaucagccuggaccuuaugaccgaugcggaacuggccagagcagugccuaauaugccaacaucugcugggcaaauaaaguugaugcucgagaacagggccaugguacggcgcaagggauucgguauucugaucggcguguauggguccucagucauuuacauggugcaguuacccaucuuuggaguuaucgacaccccuuguuggauugugaaagcugccccaagcugcagugaaaagaaaggcaauuaugcaugucugcuccgagaggaucaggguugguacugccagaacgccgggucuacggucuauuaccccaacgagaaggacugugaaacuagaggagaucauguguucugcgacacagcugcgggcauaaauguagcagagcaauccaaagaauguaacaucaauauuagcaccacuaacuacccuugcaagguuucgacaggcaggcacccaaucucuaugguggcccuuuccccgcugggggcuuuggucgccuguuauaaaggagugucaugcaguauagguagcaaucgggucggcauuaucaagcagcuaaacaaggggugcuccuacaucaccaaucaggacgcagauacggugaccauugacaacacaguuuaucagcugucuaaaguggagggagaacaacauguaaucaagggccgucccgucagcucaaguuuugauccuauuaaauucccagaggaccaguuucagguggcccucgaucaaguuuucgagaauauagaaaacucccaggcucugguggaccagagcaaucgcauccuuucuucagccgagaaggguaacacuggguucauuaucgucaucauucugauagcaguguugggcaguagcaugauccucguauccauuuuuaucauuaucaaaaagaccaagaaacccacaggagcgccuccagaacugucuggcgugacuaauaacggguucauaccccacaauuga

SEQ ID NO: 14691 - RNA, 1620 nt, Artificial Sequence
  HMPV/TN/92-4__ABM67072.1 fusion glycoprotein CDS human (variant)
augagcuggaagguggucaucauuuucucccugcucauaacaccccagcacggccuuaaagagucuuaccuggaagagucaugcaguaccaucacugaaggguauuugagcguuuuaagaacgggaugguacaccaacguguuuacacuggagguaggugacguggaaaaucuaacuuguuccgauggcccuucucucauuaagaccgagcuggaccuuacaaaaucggcccugagggaguugaagaccgucucagcugaucaacucgcacgggaggaacagaucgaaaacccagggagcggaaguuucgugcugggcgccauugcgcuggguguugcugccgcagccgcugugacugcaggggucgccaucgcuaaaacaauacgccucccguccgaggugaccgccaucaauaacgcguuaaagaagacgaaugaggcaguaucuacucugggaaacggcguucgagugcuugccaccgcuguccgugaauugaaagacuuugugagcaagaaucugacaagagccauuaacaaaaauaagugcgauaucgacgaucuaaaaauggcaguguccuucucacaguuuaacaggcgguuccucaaugucguucgccaguuuagugacaacgcuggcauuacucccgccaucagccuggaucuuaugaccgacgcggagcuggccagagcagugccuaauaugccaacaucugcugggcaaauaaaguugaugcucgaaaacagggccaugguacggcgcaagggauucgguauucugaucggcguguauggguccucagucauuuacauggugcaguuacccaucuuuggaguuaucgauaccccuuguuggauugugaaagcugccccaagcugcagugagaagaaaggcaauuaugcaugucugcuccgagaagaccaggguugguacugccagaacgccgggucuacggucuauuaccccaacgagaaggauugugagacuagaggagaccauguguucugcgacacagcugcgggcauaaauguagcagaacaauccaaagaguguaacaucaauauuagcaccacuaacuacccuugcaagguuucgacaggcaggcacccaaucucuaugguggcccuuuccccgcugggggcuuuggucgccuguuauaaaggagugucaugcaguauagguagcaaucgggucggcauuaucaagcagcuaaacaaggggugcuccuacaucaccaaucaggaugcagacacggugaccauugauaacacaguuuaucagcugucuaaaguggaaggagagcaacauguaaucaagggccgucccgucagcucaaguuuugacccuauuaaauucccagaagaucaguuucagguggcccucgaccaaguuuucgagaauauagagaacucccaggcucugguggaucagagcaaucgcauccuuucuucagccgaaaaggguaacacuggguucauuaucgucaucauucugauagcaguguugggcaguagcaugauccucguauccauuuuuaucauuaucaaaaagaccaagaaacccacaggagcgccuccagagcugucuggcgugacuaauaacggguucauaccccacaauuga

SEQ ID NO: 14692 - RNA, 1620 nt, Artificial Sequence
  HMPV/TN/92-4__ABM67072.1 fusion glycoprotein CDS human (variant)
augagcuggaagguggucaucauuuucucccugcucauaacaccccagcacggccuuaaagagucuuaccuggaagagucaugcaguaccaucacugaaggguauuugagcguuuuaagaacgggaugguacaccaacguguuuacacuggagguaggugacguggaaaaucuaacuuguuccgauggcccuucucucauuaagaccgagcuggaccuuacaaaaucggcccugagggaguugaagaccgucucagcugaucaacucgcacgggaggaacagaucgaaaacccagggagcggaaguuucgugcugggcgccauugcgcuggguguugcugccgcagccgcugugacugcaggggucgccaucgcuaaaacaauacgccucgaguccgaggugaccgccaucaauaacgcguuaaagaagacgaaugaagcaguaucuacucugggaaacggcguucgagugcuugccaccgcuguccgugaguugaaagacuuugugagcaagaaucugacaagagccauuaacaaaaauaagugcgauaucgacgaucuaaaaauggcaguguccuucucacaguuuaacaggcgguuccucaaugucguucgccaguuuagugacaacgcuggcauuacuccggccaucagccuggaucuuaugaccgacgcggaacuggccagagcagugcccaauaugccuacaucugcugggcaaauaaaguugaugcucgagaacagggccaugguacggcgcaagggauucgguauucugaucggcguguauggguccucagucauuuacauggugcaguuaccaaucuuuggaguuaucgauacccccuguuggauugugaaagcugccccuagcugcagugaaaagaaaggcaauuaugcaugucugcuccgagaggaccaggguugguacugccagaacgccgggucuacggucuauuacccaaacgagaaggauugugaaacuagaggagaccauguguucugcgacacagcugcgggcauaaauguagcagagcaauccaaagaauguaacaucaauauuagcaccacuaacuaccccugcaagguuucgacaggcaggcacccuaucucuaugguggcccuuuccccacugggggcuuuggucgccuguuauaaaggagugucaugcaguauagguagcaaucgggucggcauuaucaagcagcuaaacaaggggugcuccuacaucaccaaucaggaugcagacacggugaccauugauaacacaguuuaucagcugucuaaaguggagggagaacaacauguaaucaagggccguccggucagcucaaguuuucccccuauuaaauucccagaggaccaguuucagguggcccucgaucaaguuuucgagaauauagaaaacucccaggcucugguggaccagagcaaucgcauccuuucuucagccgagaaggguaacacuggguucauuaucgucaucauucugauagcaguguugggcaguagcaugauccucguauccauuuuuaucauuaucaaaaagaccaagaaacccacaggagcgccuccagaacugucuggcgugacuaauaacggguucauaccccacaauuga

SEQ ID NO: 14693 - RNA, 1620 nt, Artificial Sequence
  HMPV/TN/92-4__ABM67072.1 fusion glycoprotein CDS human (variant)
augagcuggaagguggucaucauuuucucccugcucauaacaccccagcacggccuuaaagagucuuaccuggaagagucaugcaguaccaucacugaaggguauuugagcguuuuaagaacgggaugguacaccaacguguuuacacuggagguaggugacguggaaaaucuaacuuguuccgauggcccuucucucauuaagaccgagcuggaccuuacaaaaucggcccugagggaguugaagaccgucucagcugaucaacucgcacgggaggaacagaucgaaaacccagggagcggaaguuucgugcugggcgccauugcgcuggguguugcugccgcagccgcugugacugcaggggucgccaucgcuaaaacaauacgccucgaguccgaggugaccgccaucaauaacgcguuaaagaagacgaaugaagcaguaucuacucugggaaacggcguucgagugcuugccaccgcuguccgugaguugaaagacuuugugagcaagaaucugacaagagccauuaacaaaaauaagugcgauaucgacgaucuaaaaauggcaguguccuucucacaguuuaacaggcgguuccucaaugucguucgccaguuuagugacaacgcuggcauuacuccggccaucagccuggaucuuaugaccgacgcggaacuggccagagcagugcccaauaugccuacaucugcugggcaaauaaaguugaugcucgagaacagggccaugguacggcgcaagggauucgguauucugaucggcguguauggguccucagucauuuacauggugcaguuaccaaucuuuggaguuaucgauacccccuguuggauugugaaagcugccccuagcugcagugaaaagaaaggcaauuaugcaugucugcuccgagaggaccaggguugguacugccagaacgccgggucuacggucuauuacccaaacgagaaggauugugaaacuagaggagaccauguguucugcgacacagcugcgggcauaaauguagcagagcaauccaaagaauguaacaucaauauuagcaccacuaacuaccccugcaagguuucgacaggcaggcacccuaucucuaugguggcccuuuccccacugggggcuuuggucgccuguuauaaaggagugucaugcaguauagguagcaaucgggucggcauuaucaagcagcuaaacaaggggugcuccuacaucaccaaucaggaugcagacacggugaccauugauaacacaguuuaucagcugucuaaaguggagggagaacaacauguaaucaagggccguccggucagcucaaguuuugaccccauuaaauucccugagaaucaguuucagguggcccucgaucaaguuuucgagaacauagaaaauucccaggcucugguggaccagagcaaccgcauccuuucuucagccgagaaggguaauacuggguucauuaucgucaucauucugauagcaguguugggcaguagcaugauccucguauccauuuuuaucauuaucaaaaagaccaagaaaccaacaggagcgcccccugaacugucuggcgugacuaacaauggguucauaccacacaacuga

SEQ ID NO: 14694 - RNA, 1620 nt, Artificial Sequence
  HMPV/TN/92-4__ABM67072.1 fusion glycoprotein CDS human (variant)
augagcuggaagguggucaucauuuucucccugcucauaacaccccagcacggccuuaaagagucuuaccuggaagagucaugcaguaccaucacugaaggguauuugagcguuuuaagaacgggaugguacaccaacguguuuacacuggagguaggugacguggaaaaucuaacuuguuccgauggcccuucucucauuaagaccgagcuggaccuuacaaaaucggcccugagggaguugaagaccgucucagcugaucaacucgcacgggaggaacagaucgaaaacccagggagcggaaguuucgugcugggcgccauugcgcuggguguugcugccgcagccgcugugacugcaggggucgccaucgcuaaaacaauacgccucgaguccgaggugaccgccaucaauaacgcguuaaagaagacgaaugaagcaguaucuacucugggaaacggcguucgagugcuugccaccgcuguccgugaguugaaagacuuugugagcaagaaucugacaagagccauuaacaaaaauaagugcgauaucgacgaucuaaaaauggcaguguccuucucacaguuuaacaggcgguuccucaaugucguucgccaguuuagugacaacgcuggcauuacuccggccaucagccuggaucuuaugaccgacgcggaacuggccagagcagugcccaauaugccuacaucugcugggcaaauaaaguugaugcucgagaacagggccaugguacggcgcaagggauucgguauucugaucggcguguauggguccucagucauuuacauggugcaguuaccaaucuuuggaguuaucgauacccccuguuggauugugaaagcugccccuagcugcagugaaaagaaaggcaauuaugcaugucugcuccgagaggaccaggguugguacugccagaacgccgggucuacggucuauuacccaaacgagaaggauugugaaacuagaggagaccauguguucugcgacacagcugcgggcauaaauguagcagagcaauccaaagaauguaacaucaauauuagcaccacuaacuaccccugcaagguuucgacaggcaggcacccuaucucuaugguggcccuuuccccacugggggcuuuggucgccuguuauaaaggagugucaugcaguauagguagcaaucgggucggcauuaucaagcagcuaaacaaggggugcuccuacaucaccaaucaggaugcagacacggugaccauugauaacacaguuuaucagcugucuaaaguggagggagaacaacauguaaucaagggccguccggucagcucaaguuuugaccccauuaaauucccucaggaucaguuucaaguggcccucgaccagguuuucgagaauauagagaacucccaggcucugguggaucagagcaaucgcauccuuucuucagccgaaaaggguaacacuggguucauuaucgucaucauucugauagcaguguugggcaguagcaugauccucguauccauuuuuaucauuaucaaaaagaccaagaaaccaacaggagcgcccccugagcugucuggcgugacuaauaacggguucauaccacacaauuga

SEQ ID NO: 14695 - RNA, 1620 nt, Artificial Sequence
  HMPV/TN/92-4__ABM67072.1 fusion glycoprotein CDS human (variant)
augagcuggaagguggucaucauuuucucccugcucauaacaccccagcacggccuuaaagagucuuaccuggaagagucaugcaguaccaucacugaaggguauuugagcguuuuaagaacgggaugguacaccaacguguuuacacuggagguaggugacguggaaaaucuaacuuguuccgauggcccuucucucauuaagaccgagcuggaccuuacaaaaucggcccugagggaguugaagaccgucucagcugaucaacucgcacgggaggaacagaucgaaaacccagggagcggaaguuucgugcugggcgccauugcgcuggguguugcugccgcagccgcugugacugcaggggucgccaucgcuaaaacaauacgccucgaguccgaggugaccgccaucaauaacgcguuaaagaagacgaaugaagcaguaucuacucugggaaacggcguucgagugcuugccaccgcuguccgugaguugaaagacuuugugagcaagaaucugacaagagccauuaacaaaaauaagugcgauaucgacgaucuaaaaauggcaguguccuucucacaguggaacaggcgguuucucaaugucguucgccaguucagugacaacgcuggcauuacuccggccaucagccuggaucuuaugaccgacgcggaacuggccagagcagugcccaauaugccuacaucugcugggcaaauaaaguugaugcucgagaacagggccaugguacggcgcaagggauuugguauucugaucggcguguauggguccucagucauuuacauggugcaguuaccaaucuucggaguuaucgauacccccuguuggauugugaaagcugccccuagcugcagugaaaagaaaggcaauuaugcaugucugcuccgagaggaccaggguugguacugccagaacgccgggucuacggucuauuacccaaacgagaaggauugugaaacuagaggagaccauguguuuugcgacacagcugcgggcauaaauguagcagagcaauccaaagaauguaacaucaauauuagcaccacuaacuaccccugcaagguuucgacaggcaggcacccuaucucuaugguggcccuuuccccacugggggcuuuggucgccuguuauaaaggagugucaugcaguauagguagcaaucgggucggcauuaucaagcagcuaaacaaggggugcuccuacaucaccaaucaggaugcagacacggugaccauugauaacacaguuuaucagcugucuaaaguggagggagaacaacauguaaucaagggccguccggucagcucaaguuucgaccccauuaaauuuccugaggaucaguuccagguggcccucgaccaaguuuuugagaauauagaaaacucccaggcucugguggaucagagcaaucgcauccuuucuucagccgagaaggguaacacuggguucauuaucgucaucauucugauagcaguguugggcaguagcaugauccucguauccauuuucaucauuaucaaaaagaccaagaaaccaacaggagcgcccccugaacugucuggcgugacuaauaacggguuuauaccacacaauuga

SEQ ID NO: 14696 - RNA, 1620 nt, Artificial Sequence
  HMPV/NL/1/99__AAQ90145.1 fusion glycoprotein CDS human (F0)
augagcuggaaggugaugaucauuauaucccugcucaucacaccccagcacggccuuaaagagucuuaccuggaagagucaugcaguaccauuacugaaggguauuugagcgucuuaagaacgggaugguacaccaacguuuucacacuggaggugggugacguagaaaaucuaacuuguaccgauggcccuucccucaucaagacagagcuggaccuuaccaaaucugcccugagggaguugaagacugugucggcugaucaacucgcacgggaggaacagauugaaaacccacgccagucacgauuuguccugggggccaucgcgcugggaguggcuacagccgcagccguuaccgcuggcauagcaaucgccaaaacgauucgucucgagagcgaggugaaugcuaucaagggugccuuaaagcagacuaacgaagcggucaguacccuggggaauggagugagaguacuugcaacagccguuagggaguugaaagaauuuguguccaagaaccugacuucugcuauuaaucggaacaaaugcgacaucgccgaucuaaagauggcagucagcuuuucccaauucaaucgcagauuucucaacguggugaggcaguucucagacaaugcuggcauaaccccggccauuagucuggaucuuaugacagacgcggagcuggcccgggcagucagcuauaugcccaccucugcuggccagaucaaauugaugcucgaaaaccgcgccaugguucgaagaaagggguuugggauucugaucgguguguacggcuccucaguaaucuauauggugcaguuaccuauuuucggggucauagauacgccauguuggaucauuaaggcugcccccagcugcagugagaaaaauggaaacuacgcaugucugcucagggaggaccaaggcugguauugcaagaaugccgguucuacuguguacuacccuaacgaaaaagauugugagacacggggagaccauguuuucugcgauaccgcugcgggaaucaacguggcagaacagucccgugaguguaauauaaacauuagcacuacaaauuauccaugcaaggucucgaccggccgccaccccaucucuaugguggcccuuuccccucugggcgcuuugguagccuguuacaaagggguuucaugcaguaucggaagcaacuggguggguauuaucaagcagcuaccaaaaggcugcuccuauauuacgaaucaggacgcagacaccgucacaauagauaacacuguguaccaacugucuaaggucgaaggggagcagcaugugaucaagggaagaccgguuagcucaaguuucgaccccauuaaauuuccugaggaucaguucaauguggcccucgaccaaguauuugaauccaucgagaacagccaggcucuggucgaucagucuaauaagauccuuaacucagccgaaaaaggcaauaccgguuucauuauagugguuauccugguggcagucuuggggcucacaaugauuagugugagcaucauuaucauaaucaagaaaacuaggaagccaaccggcgcgcccccugagcugaacggaguaacaaauggcggguucauuccacacuccuga

SEQ ID NO: 14697 - RNA, 1620 nt, Artificial Sequence
  HMPV/Sabana__AEA02280.1 fusion glycoprotein CDS human (F0)
augagcuggaaggugaugaucauuauaucccugcucaucacaccccagcacggccuuaaagagucuuaccuggaagagucaugcaguaccauuacugaaggguauuugagcgucuuaagaacgggaugguacaccaacguuuucacacuggaggugggugacguagaaaaucuaacuuguaccgauggcccuucccucaucaagacagagcuggaccuuaccaaaucugcccugagggaguugaagacugugucggcugaucaacucgcacgggaggaacagauugaaaacccacgccagucacgauuuguccugggggccaucgcgcugggaguggcuacagccgcagccguuaccgcuggcauagcaaucgccaaaacgauucgucucgagagcgaggugaaugcuaucaagggugccuuaaagacuaccaacgaagcggucaguacacuggggaauggagugagaguacuugcaacugccguuagggaguugaaagaauuuguguccaagaaccugaccucugcuauuaauaaaaacaagugcgacaucgccgaucuaaaaauggcagucagcuuuucccaguucaaucggcgcuuucucaacguggugagacaauucucagacaaugcuggcauaacaccggccauuagucuggaucuuaugaacgacgcggagcuggccagggcagucagcuauaugcccaccucugcuggccagaucaaguugaugcucgaaaaucgggccaugguucgccgaaagggguuugggauucugaucgguguguacggcuccucaguaaucuauauggugcaguuaccuauuuucggggucauaaacacgccauguuggaucauuaaagcugcccccagcugcagugagaaggauggaaauuacgcaugucugcucagagaggaccagggcugguauugcaaaaacgccgguucuacuguguacuacccuaacgaaaaggauugugagacaaggggagaccauguuuucugcgauaccgcugcgggaaucaauguggcagaacaaucccgggaguguaacauaaauauuagcacuacaaacuauccaugcaaagucucgaccggccgucaccccaucucuaugguggcccuuuccccucugggcgcuuugguagccuguuacaaggggguuucaugcaguacgggaagcaaucagguggguaucauuaaacagcuaccaaagggcugcuccuauaucaccaaccaggacgcagacacagucacuauugauaauaccguguaccaacugucuaaggucgaaggggagcagcaugugauaaaaggacgcccgguuagcucaaguuucgaccccaucagauuuccugaggaucaguucaacguggcccucgaccaaguauuugaauccauugagaauagccaggcucuggucgaucagucuaacaagauccuuaauucagccgaaaaaggcaacacagguuucaucauugugauaauccugauugcaguuuuggggcucacuaugaucagugugagcauuaucauaaucauuaagaaaaccaggaagccaacaggcgcgcccccugagcugaauggagucaccaacggcggguucaucccacacuccuga

SEQ ID NO: 14698 - RNA, 1892 nt, Artificial Sequence
  HMPV/TN/92-4__ABM67072.1 fusion glycoprotein mRNA gc (F0)
aggagagucccgcagucggcguccagcggcucugcuuguucgugugugugucguugcaggccuuauucaagcuuaccaugagcuggaagguggucaucaucuucucccugcucaucacgccccagcacggccugaaggagagcuaccuggaggaguccugcagcaccaucaccgagggguaccucuccgugcugcgcaccggcugguacaccaacguguucacccuggaggucggggacguggagaaccucacgugcagcgacggcccgucccugaucaagaccgagcuggaccucaccaagagcgcccugcgggagcugaagaccguguccgccgaccagcucgcgcgcgaggagcagaucgagaacccccggcagagccgcuucguccugggggccaucgcccugggcguggccgccgcggccgccgugacggccggcgucgcgaucgccaagaccauccggcucgaguccgaggugaccgccaucaacaacgcccugaagaagaccaacgaggccgugagcacgcuggggaacggcguccgcgugcucgcgaccgccgugcgggagcugaaggacuucgucuccaagaaccugacccgcgccaucaacaagaacaagugcgacaucgacgaccucaagauggccgugagcuucucccaguucaaccggcgcuuccugaacgugguccggcaguucagcgacaacgccgggaucacccccgcgaucucccuggaccucaugacggacgccgagcuggcccgcgccgugcccaacaugccgaccagcgccggccagaucaagcugaugcucgagaaccgggcgauggugcgccggaagggguucggcauccugaucggcgucuacggguccagcgugaucuacauggugcagcugcccaucuucggcgucaucgacacccccugcuggaucgugaaggccgcccccagcugcuccgagaagaaggggaacuacgccugccuccugcgcgaggaccagggcugguacugccagaacgccggcagcaccgucuacuacccgaacgagaaggacugcgagacgcgcggggaccacguguucugcgacaccgcggccggcaucaacguggccgagcaguccaaggagugcaacaucaacaucagcaccaccaacuaccccugcaaggucuccacggggcggcaccccaucagcaugguggcccugagcccccucggcgcgcugguggccugcuacaagggggucuccugcuccaucggcagcaaccgggugggcaucaucaagcagcugaacaaggggugcuccuacaucaccaaccaggacgccgacaccgugaccaucgacaacacggucuaccagcucagcaagguggagggcgagcagcacgugaucaaggggcgcccggucuccagcuccuucgaccccaucaaguuccccgaggaccaguucaacguggcccuggaccagguguucgagaacaucgagaacagccaggcccuggucgaccaguccaaccggauccucagcuccgcggagaagggcaacaccggguucaucaucgugaucauccugaucgccgugcugggcagcagcaugauccucgucuccaucuucaucaucaucaagaagaccaagaagcccaccggcgccccgcccgagcugagcggggugacgaacaacggcuucaucccccacaacugaggacuagucccuguucccagagcccacuuuuuuuucuuuuuuugaaauaaaauagccugucuuucagaucucaaaggcucuuuucagagccaccaaaaaaaaaaaaaaaaaaaaaaaaaaaaaaaaaaaaaaaaaaaaaaaaaaaaaaaaaaaaaaaaaaaaaaaaaaaaaaaaaaaaaaaaaaaaaaaaaaaaa

SEQ ID NO: 14699 - RNA, 1892 nt, Artificial Sequence
  HMPV/TN/92-4__ABM67072.1 fusion glycoprotein mRNA gc (variant)
aggagagucccgcagucggcguccagcggcucugcuuguucgugugugugucguugcaggccuuauucaagcuuaccaugagcuggaagguggucaucaucuucucccugcucaucacgccccagcacggccugaaggagagcuaccuggaggaguccugcagcaccaucaccgagggguaccucuccgugcugcgcaccggcugguacaccaacguguucacccuggaggucggggacguggagaaccucacgugcagcgacggcccgucccugaucaagaccgagcuggaccucaccaagagcgcccugcgggagcugaagaccguguccgccgaccagcucgcgcgcgaggagcagaucgagaaccccgggagcggcuccuucguccugggcgccaucgcccuggggguggccgccgcggccgccgugacggccggcgucgcgaucugcaagaccauccggcucgagagcgaggugaccgccaucaacaacgcccugaagaagaccaacgaggccguguccacgcuggggaacggcguccgcgugcucgccuucgcggugcgggagcugaaggacuucgucagcaagaaccugacccgcgcccucaacaagaacaagugcgacaucgacgaccugaagauggccguguccuucagccaguucaaccggcgcuuccugaacgugguccggcaguucuccgacaacgccgggaucacccccgccaucagccucgaccugaugaccgacgcggagcuggcccgcgccgugcccaacaugccgacguccgccggccagaucaagcucaugcuggagaaccgggccauggugcgccggaagggcuucgggauccugugcggcgucuacgggagcagcgugaucuacauggugcagcuccccaucuucggcgucaucgacacccccugcuggaucgugaaggcggcccccuccugcagcgagaagaagggcaacuacgccugccugcugcgcgaggaccaggggugguacugccagaacgccggcuccaccgucuacuacccgaacgagaaggacugcgagacccgcggggaccacguguucugcgacacggccgcgggcaucaacguggccgagcagagcaaggagugcaacaucaacaucuccaccaccaacuaccccugcaaggucagcaccgggcggcaccccaucuccaugguggcccucagcccccugggcgcccugguggcgugcuacaagggcgucuccugcagcaucggguccaaccgggugggcaucaucaagcagcucaacaaggggugcagcuacaucacgaaccaggacgccgacaccgugaccaucgacaacaccgucuaccagcuguccaagguggagggcgagcagcacgugaucaaggggcgcccggucagcuccagcuucgaccccaucaaguuccccgaggaccaguucaacguggcccuggaccagguguucgagaacaucgagaacucccaggcccucgucgaccagagcaaccggauccuguccagcgccgagaagggcaacacgggcuucaucaucgugaucauccugaucgcggugcucgggagcuccaugauccuggucagcaucuucaucaucaucaagaagaccaagaagcccaccggcgccccgcccgagcuguccggggugaccaacaacggcuucaucccccacaacugaggacuagucccuguucccagagcccacuuuuuuuucuuuuuuugaaauaaaauagccugucuuucagaucucaaaggcucuuuucagagccaccaaaaaaaaaaaaaaaaaaaaaaaaaaaaaaaaaaaaaaaaaaaaaaaaaaaaaaaaaaaaaaaaaaaaaaaaaaaaaaaaaaaaaaaaaaaaaaaaaaaaa

SEQ ID NO: 14700 - RNA, 1892 nt, Artificial Sequence
  HMPV/TN/92-4__ABM67072.1 fusion glycoprotein mRNA gc (variant)
aggagagucccgcagucggcguccagcggcucugcuuguucgugugugugucguugcaggccuuauucaagcuuaccaugagcuggaagguggucaucaucuucucccugcucaucacgccccagcacggccugaaggagagcuaccuggaggaguccugcagcaccaucaccgagggguaccucuccgugcugcgcaccggcugguacaccaacguguucacccuggaggucggggacguggagaaccucacgugcagcgacggcccgucccugaucaagaccgagcuggaccucaccaagagcgcccugcgggagcugaagaccguguccgccgaccagcucgcgcgcgaggagcagaucgagaaccccgggagcggcuccuucguccugggcgccaucgcccuggggguggccgccgcggccgccgugacggccggcgucgcgaucugcaagaccauccggcucgagagcgaggugaccgccaucaacaacgcccugaagaagaccaacgaggccguguccacgcuggggaacggcguccgcgugcucgccaccgcggugcgggagcugaaggacuucgucagcaagaaccugacccgcgccaucaacaagaacaagugcgacaucgacgaccucaagauggccguguccuucagccaguucaaccggcgcuuccugaacgugguccggcaguucuccgacaacgccgggaucacccccgccaucagccuggaccucaugacggacgcggagcuggcccgcgccgugcccaacaugccgaccuccgccggccagaucaagcugaugcucgagaaccgggccauggugcgccggaagggcuucgggauccugugcggcgucuacgggagcagcgugaucuacauggugcagcugcccaucuucggcgucaucgacacccccugcuggaucgugaaggcggcccccuccugcagcgagaagaagggcaacuacgccugccuccugcgcgaggaccaggggugguacugccagaacgccggcuccaccgucuacuacccgaacgagaaggacugcgagacgcgcggggaccacguguucugcgacaccgccgcgggcaucaacguggccgagcagagcaaggagugcaacaucaacaucuccaccaccaacuaccccugcaaggucagcacggggcggcaccccaucuccaugguggcccugagcccccucggcgcccugguggcgugcuacaagggcgucuccugcagcaucggguccaaccgggugggcaucaucaagcagcugaacaaggggugcagcuacaucaccaaccaggacgccgacaccgugaccaucgacaacacggucuaccagcucuccaagguggagggcgagcagcacgugaucaaggggcgcccggucagcuccagcuucgaccccaucaaguuccccgagcaccaguggcacguggcccuggaccagguguucgagaacaucgagaacucccaggcccuggucgaccagagcaaccggauccucuccagcgccgagaagggcaacaccggcuucaucaucgugaucauccugaucgcggugcuggggagcuccaugauccucgucagcaucuucaucaucaucaagaagaccaagaagcccaccggcgccccgcccgagcuguccggggugacgaacaacggcuucaucccccacaacugaggacuagucccuguucccagagcccacuuuuuuuucuuuuuuugaaauaaaauagccugucuuucagaucucaaaggcucuuuucagagccaccaaaaaaaaaaaaaaaaaaaaaaaaaaaaaaaaaaaaaaaaaaaaaaaaaaaaaaaaaaaaaaaaaaaaaaaaaaaaaaaaaaaaaaaaaaaaaaaaaaaaa

SEQ ID NO: 14701 - RNA, 1892 nt, Artificial Sequence
  HMPV/TN/92-4__ABM67072.1 fusion glycoprotein mRNA gc (variant)
aggagagucccgcagucggcguccagcggcucugcuuguucgugugugugucguugcaggccuuauucaagcuuaccaugagcuggaagguggucaucaucuucucccugcucaucacgccccagcacggccugaaggagagcuaccuggaggaguccugcagcaccaucaccgagggguaccucuccgugcugcgcaccggcugguacaccaacguguucacccuggaggucggggacguggagaaccucacgugcagcgacggccccucccugaucaagaccgagcuggaccuccucaagagcgcccugcgggagcugaagaccguguccgccgaccagcuggcgcgcgaggagcagaucgagaaccccgggagcggcuccuucguccugggcgccaucgcccucgggguggccgccgcggccgccgugaccgccggcgucgcgaucgccaagacgauccggcuggagagcgaggugaccgccaucaacaacgcccugaagaagaccaacgaggccguguccacccucgggaacggcguccgcgugcuggcgacggccgugcgggagcugaaggacuucgucagcaagaaccucacccgcgccaucaacaagaacaagugcgacauccccgaccugaagauggccguguccuucagccaguucaaccggcgcuuccugaacgugguccggcaguucuccgacaacgccgggaucacccccgcgaucagccucgaccugaugaccgacgccgagcuggcccgcgccgugccgaacaugcccacguccgccggccagaucaagcucaugcuggagaaccgggcgauggugcgccggaagggcuucgggauccugaucggcgucuacgggagcagcgugaucuacauggugcagcuccccaucuucggcgucaucgacacccccugcuggaucgugaaggccgccccguccugcagcgagaagaagggcaacuacgccugccugcugcgcgaggaccaggggugguacugccagaacgccggcuccaccgucuacuaccccaacgagaaggacugcgagacccgcggggaccacguguucugcgacacggcggccggcaucaacguggccgagcagagcaaggagugcaacaucaacaucuccaccaccaacuaccccugcaaggucagcaccgggcggcaccccaucuccaugguggcccucagcccgcugggcgcgcugguggccugcuacaagggcgucuccugcagcaucggguccaaccgggugggcaucaucaagcagcucaacaaggggugcagcuacaucacgaaccaggacgccgacaccgugaccaucgacaacaccgucuaccagcuguccaagguggagggcgagcagcacgugaucaaggggcgccccgucagcuccagcuucgaccccaucaaguuccccgaggaccaguuccagguggcccuggaccagguguucgagaacaucgagaacucccaggcccucgucgaccagagcaaccggauccuguccagcgcggagaagggcaacacgggcuucaucaucgugaucauccugaucgccgugcucgggagcuccaugauccuggucagcaucuucaucaucaucaagaagaccaagaagccgaccggcgccccgcccgagcuguccggggugaccaacaacggcuucaucccccacaacugaggacuagucccuguucccagagcccacuuuuuuuucuuuuuuugaaauaaaauagccugucuuucagaucucaaaggcucuuuucagagccaccaaaaaaaaaaaaaaaaaaaaaaaaaaaaaaaaaaaaaaaaaaaaaaaaaaaaaaaaaaaaaaaaaaaaaaaaaaaaaaaaaaaaaaaaaaaaaaaaaaaaa

SEQ ID NO: 14702 - RNA, 1892 nt, Artificial Sequence
  HMPV/TN/92-4__ABM67072.1 fusion glycoprotein mRNA gc (variant)
aggagagucccgcagucggcguccagcggcucugcuuguucgugugugugucguugcaggccuuauucaagcuuaccaugagcuggaagguggucaucaucuucucccugcucaucacgccccagcacggccugaaggagagcuaccuggaggaguccugcagcaccaucaccgagggguaccucuccgugcugcgcaccggcugguacaccaacguguucacccuggaggucggggacguggagaaccucacgugcagcgacggccccucccugaucaagaccgagcuggaccuccucaagagcgcccugcgggagcugaagaccguguccgccgaccagcuggcgcgcgaggagcagaucgagaaccccgggagcggcuccuucguccugggcgccaucgcccucgggguggccgccgcggccgccgugaccgccggcgucgcgaucgccaagacgauccggcuggagagcgaggugaccgccaucaacaacgcccugaagaagaccaacgaggccguguccacccucgggaacggcguccgcgugcuggcgacggccgugcgggagcugaaggacuucgucagcaagaaccucacccgcgccaucaacaagaacaagugcgacauccccgaccugaagauggccguguccuucagccaguucaaccggcgcuuccugaacgugguccggcaguucuccgacaacgccgggaucacccccgcgaucagccucgaccugaugaccgacgccgagcuggcccgcgccgugccgaacaugcccacguccgccggccagaucaagcucaugcuggagaaccgggcgauggugcgccggaagggcuucgggauccugaucggcgucuacgggagcagcgugaucuacauggugcagcuccccaucuucggcgucaucgacacccccugcuggaucgugaaggccgccccguccugcagcgagaagaagggcaacuacgccugccugcugcgcgaggaccaggggugguacugccagaacgccggcuccaccgucuacuaccccaacgagaaggacugcgagacccgcggggaccacguguucugcgacacggcggccggcaucaacguggccgagcagagcaaggagugcaacaucaacaucuccaccaccaacuaccccugcaaggucagcaccgggcggcaccccaucuccaugguggcccucagcccgcugggcgcgcugguggccugcuacaagggcgucuccugcagcaucggguccaaccgggugggcaucaucaagcagcucaacaaggggugcagcuacaucacgaaccaggacgccgacaccgugaccaucgacaacaccgucuaccagcuguccaagguggagggcgagcagcacgugaucaaggggcgccccgucagcuccagcuucgaccccaucaaguuccccgagaaccaguuccagguggcccuggaccagguguucgagaacaucgagaacucccaggcccucgucgaccagagcaaccggauccuguccagcgcggagaagggcaacacgggcuucaucaucgugaucauccugaucgccgugcucgggagcuccaugauccuggucagcaucuucaucaucaucaagaagaccaagaagccgaccggcgccccgcccgagcuguccggggugaccaacaacggcuucaucccccacaacugaggacuagucccuguucccagagcccacuuuuuuuucuuuuuuugaaauaaaauagccugucuuucagaucucaaaggcucuuuucagagccaccaaaaaaaaaaaaaaaaaaaaaaaaaaaaaaaaaaaaaaaaaaaaaaaaaaaaaaaaaaaaaaaaaaaaaaaaaaaaaaaaaaaaaaaaaaaaaaaaaaaaa

SEQ ID NO: 14703 - RNA, 1892 nt, Artificial Sequence
  HMPV/TN/92-4__ABM67072.1 fusion glycoprotein mRNA gc (variant)
aggagagucccgcagucggcguccagcggcucugcuuguucgugugugugucguugcaggccuuauucaagcuuaccaugagcuggaagguggucaucaucuucucccugcucaucacgccccagcacggccugaaggagagcuaccuggaggaguccugcagcaccaucaccgagggguaccucuccgugcugcgcaccggcugguacaccaacguguucacccuggaggucggggacguggagaaccucacgugcagcgacggccccucccugaucaagaccgagcuggaccuccucaagagcgcccugcgggagcugaagaccguguccgccgaccagcuggcgcgcgaggagcagaucgagaaccccgggagcggcuccuucguccugggcgccaucgcccucgggguggccgccgcggccgccgugaccgccggcgucgcgaucgccaagacgauccggcuggagagcgaggugaccgccaucaacaacgcccugaagaagaccaacgaggccguguccacccucgggaacggcguccgcgugcuggcgacggccgugcgggagcugaaggacuucguccucaagaaccugacccgcgccaucaacaagaacaagugcgacauccccgaccugaagauggccgugagcuucucccaguucaaccggcgcuuccucaacgugguccggcaguucagcgacaacgccgggaucacccccgcgaucucccuggaccugaugaccgacgccgagcucgcccgcgccgugccgaacaugcccacgagcgccggccagaucaagcugaugcuggagaaccgggcgauggugcgccggaagggcuucgggauccucaucggcgucuacggguccagcgugaucuacauggugcagcugcccaucuucggcgucaucgacacccccugcuggaucgugaaggccgccccgagcugcuccgagaagaagggcaacuacgccugccugcuccgcgaggaccaggggugguacugccagaacgccggcagcaccgucuacuaccccaacgagaaggacugcgagacccgcggggaccacguguucugcgacacggcggccggcaucaacguggccgagcaguccaaggagugcaacaucaacaucagcaccaccaacuaccccugcaaggucuccaccgggcggcaccccaucagcaugguggcccuguccccgcugggcgcgcucguggccugcuacaagggcgucagcugcuccaucgggagcaaccgggugggcaucaucaagcagcugaacaaggggugcuccuacaucacgaaccaggacgccgacaccgugaccaucgacaacaccgucuaccagcugagcaagguggagggcgagcagcacgugaucaaggggcgccccgucuccagcuccuucgaccccaucaaguuccccgaggaccaguuccagguggcccucgaccagguguucgagaacaucgagaacagccaggcccuggucgaccaguccaaccggauccugagcuccgcggagaagggcaacacgggcuucaucaucgugaucauccucaucgccgugcuggggagcagcaugauccuggucuccaucuucaucaucaucaagaagaccaagaagccgaccggcgccccgcccgagcucagcggggugaccaacaacggcuucaucccccacaacugaggacuagucccuguucccagagcccacuuuuuuuucuuuuuuugaaauaaaauagccugucuuucagaucucaaaggcucuuuucagagccaccaaaaaaaaaaaaaaaaaaaaaaaaaaaaaaaaaaaaaaaaaaaaaaaaaaaaaaaaaaaaaaaaaaaaaaaaaaaaaaaaaaaaaaaaaaaaaaaaaaaaa

SEQ ID NO: 14704 - RNA, 1892 nt, Artificial Sequence
  HMPV/TN/92-4__ABM67072.1 fusion glycoprotein mRNA gc (variant)
aggagagucccgcagucggcguccagcggcucugcuuguucgugugugugucguugcaggccuuauucaagcuuaccaugagcuggaagguggucaucaucuucucccugcucaucacgccccagcacggccugaaggagagcuaccuggaggaguccugcagcaccaucaccgagggguaccucuccgugcugcgcaccggcugguacaccaacguguucacccuggaggucggggacguggagaaccucacgugcagcgacggccccucccugaucaagaccgagcuggaccuccucaagagcgcccugcgggagcugaagaccguguccgccgaccagcuggcgcgcgaggagcagaucgagaaccccgggagcggcuccuucguccugggcgccaucgcccucgggguggccgccgcggccgccgugaccgccggcgucgcgaucgccaagacgauccggcuggagagcgaggugaccgccaucaacaacgcccugaagaagaccaacgaggccguguccacccucgggaacggcguccgcgugcuggcgacggccgugcgggagcugaaggacuucguccucaagaaccugacccgcgccaucaacaagaacaagugcgacauccccgaccugaagauggccgugagcuucucccaguucaaccggcgcuuccucaacgugguccggcaguucagcgacaacgccgggaucacccccgcgaucucccuggaccugaugaccgacgccgagcucgcccgcgccgugccgaacaugcccacgagcgccggccagaucaagcugaugcuggagaaccgggcgauggugcgccggaagggcuucgggauccucaucggcgucuacggguccagcgugaucuacauggugcagcugcccaucuucggcgucaucgacacccccugcuggaucgugaaggccgccccgagcugcuccgagaagaagggcaacuacgccugccugcuccgcgaggaccaggggugguacugccagaacgccggcagcaccgucuacuaccccaacgagaaggacugcgagacccgcggggaccacguguucugcgacacggcggccggcaucaacguggccgagcaguccaaggagugcaacaucaacaucagcaccaccaacuaccccugcaaggucuccaccgggcggcaccccaucagcaugguggcccuguccccgcugggcgcgcucguggccugcuacaagggcgucagcugcuccaucgggagcaaccgggugggcaucaucaagcagcugaacaaggggugcuccuacaucacgaaccaggacgccgacaccgugaccaucgacaacaccgucuaccagcugagcaagguggagggcgagcagcacgugaucaaggggcgccccgucuccagcuccuucgaccccaucaaguuccccgagaaccaguuccagguggcccucgaccagguguucgagaacaucgagaacagccaggcccuggucgaccaguccaaccggauccugagcuccgcggagaagggcaacacgggcuucaucaucgugaucauccucaucgccgugcuggggagcagcaugauccuggucuccaucuucaucaucaucaagaagaccaagaagccgaccggcgccccgcccgagcucagcggggugaccaacaacggcuucaucccccacaacugaggacuagucccuguucccagagcccacuuuuuuuucuuuuuuugaaauaaaauagccugucuuucagaucucaaaggcucuuuucagagccaccaaaaaaaaaaaaaaaaaaaaaaaaaaaaaaaaaaaaaaaaaaaaaaaaaaaaaaaaaaaaaaaaaaaaaaaaaaaaaaaaaaaaaaaaaaaaaaaaaaaaa

SEQ ID NO: 14705 - RNA, 1892 nt, Artificial Sequence
  HMPV/TN/92-4__ABM67072.1 fusion glycoprotein mRNA gc (variant)
aggagagucccgcagucggcguccagcggcucugcuuguucgugugugugucguugcaggccuuauucaagcuuaccaugagcuggaagguggucaucaucuucucccugcucaucacgccccagcacggccugaaggagagcuaccuggaggaguccugcagcaccaucaccgagggguaccucuccgugcugcgcaccggcugguacaccaacguguucacccugcccgucggggacguggagaaccucacgugcagcgacggccccucccugaucaagaccgagcuggaccuccucaagagcgcccugcgggagcugaagaccguguccgccgaccagcuggcgcgcgaggagcagaucgagaaccccgggagcggcuccuucguccugggcgccaucgcccucgggguggccgccgcggccgccgugaccgccggcgucgcgaucgccaagacgauccggcuggagagcgaggugaccgccaucaacaacgcccugaagaagaccaacgaggccguguccacccucgggaacggcguccgcgugcuggcgacggccgugcgggagcugaaggacuucgucagcaagaaccucacccgcgccaucaacaagaacaagugcgacaucgacgaccugaagauggccguguccuucagccaguucaaccggcgcuuccugaacgugguccggcaguucuccgacaacgccgggaucacccccgcgaucagccucgaccugaugaccgacgccgagcuggcccgcgccgugccgaacaugcccacguccgccggccagaucaagcucaugcuggagaaccgggcgauggugcgccggaagggcuucgggauccugaucggcgucuacgggagcagcgugaucuacauggugcagcuccccaucuucggcgucaucgacacccccugcuggaucgugaaggccgccccguccugcagcgagaagaagggcaacuacgccugccugcugcgcgaggaccaggggugguacugccagaacgccggcuccaccgucuacuaccccaacgagaaggacugcgagacccgcggggaccacguguucugcgacacggcggccggcaucaacguggccgagcagagcaaggagugcaacaucaacaucuccaccaccaacuaccccugcaaggucagcaccgggcggcaccccaucuccaugguggcccucagcccgcugggcgcgcugguggccugcuacaagggcgucuccugcagcaucggguccaaccgggugggcaucaucaagcagcucaacaaggggugcagcuacaucacgaaccaggacgccgacaccgugaccaucgacaacaccgucuaccagcuguccaagguggagggcgagcagcacgugaucaaggggcgccccgucagcuccagcuucgaccccaucaaguuccccgaggaccaguuccagguggcccuggaccagguguucgagaacaucgagaacucccaggcccucgucgaccagagcaaccggauccuguccagcgcggagaagggcaacacgggcuucaucaucgugaucauccugaucgccgugcucgggagcuccaugauccuggucagcaucuucaucaucaucaagaagaccaagaagccgaccggcgccccgcccgagcuguccggggugaccaacaacggcuucaucccccacaacugaggacuagucccuguucccagagcccacuuuuuuuucuuuuuuugaaauaaaauagccugucuuucagaucucaaaggcucuuuucagagccaccaaaaaaaaaaaaaaaaaaaaaaaaaaaaaaaaaaaaaaaaaaaaaaaaaaaaaaaaaaaaaaaaaaaaaaaaaaaaaaaaaaaaaaaaaaaaaaaaaaaaa

SEQ ID NO: 14706 - RNA, 1892 nt, Artificial Sequence
  HMPV/TN/92-4__ABM67072.1 fusion glycoprotein mRNA gc (variant)
aggagagucccgcagucggcguccagcggcucugcuuguucgugugugugucguugcaggccuuauucaagcuuaccaugagcuggaagguggucaucaucuucucccugcucaucacgccccagcacggccugaaggagagcuaccuggaggaguccugcagcaccaucaccgagggguaccucuccgugcugcgcaccggcugguacaccaacguguucacccugcccgucggggacguggagaaccucacgugcagcgacggccccucccugaucaagaccgagcuggaccuccucaagagcgcccugcgggagcugaagaccguguccgccgaccagcuggcgcgcgaggagcagaucgagaaccccgggagcggcuccuucguccugggcgccaucgcccucgggguggccgccgcggccgccgugaccgccggcgucgcgaucgccaagacgauccggcuggagagcgaggugaccgccaucaacaacgcccugaagaagaccaacgaggccguguccacccucgggaacggcguccgcgugcuggcgacggccgugcgggagcugaaggacuucgucagcaagaaccucacccgcgccaucaacaagaacaagugcgacaucgacgaccugaagauggccguguccuucagccaguucaaccggcgcuuccugaacgugguccggcaguucuccgacaacgccgggaucacccccgcgaucagccucgaccugaugaccgacgccgagcuggcccgcgccgugccgaacaugcccacguccgccggccagaucaagcucaugcuggagaaccgggcgauggugcgccggaagggcuucgggauccugaucggcgucuacgggagcagcgugaucuacauggugcagcuccccaucuucggcgucaucgacacccccugcuggaucgugaaggccgccccguccugcagcgagaagaagggcaacuacgccugccugcugcgcgaggaccaggggugguacugccagaacgccggcuccaccgucuacuaccccaacgagaaggacugcgagacccgcggggaccacguguucugcgacacggcggccggcaucaacguggccgagcagagcaaggagugcaacaucaacaucuccaccaccaacuaccccugcaaggucagcaccgggcggcaccccaucuccaugguggcccucagcccgcugggcgcgcugguggccugcuacaagggcgucuccugcagcaucggguccaaccgggugggcaucaucaagcagcucaacaaggggugcagcuacaucacgaaccaggacgccgacaccgugaccaucgacaacaccgucuaccagcuguccaagguggagggcgagcagcacgugaucaaggggcgccccgucagcuccagcuucgaccccaucaaguuccccgagaaccaguuccagguggcccuggaccagguguucgagaacaucgagaacucccaggcccucgucgaccagagcaaccggauccuguccagcgcggagaagggcaacacgggcuucaucaucgugaucauccugaucgccgugcucgggagcuccaugauccuggucagcaucuucaucaucaucaagaagaccaagaagccgaccggcgccccgcccgagcuguccggggugaccaacaacggcuucaucccccacaacugaggacuagucccuguucccagagcccacuuuuuuuucuuuuuuugaaauaaaauagccugucuuucagaucucaaaggcucuuuucagagccaccaaaaaaaaaaaaaaaaaaaaaaaaaaaaaaaaaaaaaaaaaaaaaaaaaaaaaaaaaaaaaaaaaaaaaaaaaaaaaaaaaaaaaaaaaaaaaaaaaaaaa

SEQ ID NO: 14707 - RNA, 1892 nt, Artificial Sequence
  HMPV/TN/92-4__ABM67072.1 fusion glycoprotein mRNA gc (variant)
aggagagucccgcagucggcguccagcggcucugcuuguucgugugugugucguugcaggccuuauucaagcuuaccaugagcuggaagguggucaucaucuucucccugcucaucacgccccagcacggccugaaggagagcuaccuggaggaguccugcagcaccaucaccgagggguaccucuccgugcugcgcaccggcugguacaccaacguguucacccuggaggucggggacguggagaaccucacgugcagcgacggcccgucccugaucaagaccgagcuggaccuccucaagagcgcccugcgggagcugaagaccguguccgccgaccagcuggcgcgcgaggagcagaucgagaaccccgggagcggcuccuucguccugggcgccaucgcccucgggguggccgccgcggccgccgugaccgccggcgucgcgaucgccaagacgauccggcuggagagcgaggugaccgccaucaacaacgcccugaagaagaccaacgaggccguguccacccucgggaacggcguccgcgugcuggcgacggccgugcgggagcugaaggacuucgucagcaagaaccucacccgcgccaucaacaagaacaagugcgacaucgacgaccugaagauggccguguccuucagccaguucaaccggcgcuuccugaacgugguccggcaguucuccgacaacgccgggaucacccccgcgaucagccucgaccugaugaccgacgccgagcuggcccgcgccgugcccaacaugccgacguccgccggccagaucaagcucaugcuggagaaccgggcgauggugcgccggaagggcuucgggauccugaucggcgucuacgggagcagcgugaucuacauggugcagcuccccaucuucggcgucaucgacacccccugcuggaucgugaaggccgcccccuccugcagcgagaagaagggcaacuacgccugccugcugcgcgaggaccaggggugguacugccagaacgccggcuccaccgucuacuacccgaacgagaaggacugcgagacccgcggggaccacguguucugcgacacggcggccggcaucaacguggccgagcagagcaaggagugcaacaucaacaucuccaccaccaacuaccccugcaaggucagcaccgggcggcaccccaucuccaugguggcccucagcccccugggcgcgcugguggccugcuacaagggcgucuccugcagcaucggguccaaccgggugggcaucaucaagcagcucaacaaggggugcagcuacaucacgaaccaggacgccgacaccgugaccaucgacaacaccgucuaccagcuguccaagguggagggcgagcagcacgugaucaaggggcgcccggucagcuccagcuucgaccccaucaaguuccccgaggaccaguuccagguggcccuggaccagguguucgagaacaucgagaacucccaggcccucgucgaccagagcaaccggauccuguccagcgcggagaagggcaacacgggcuucaucaucgugaucauccugaucgccgugcucgggagcuccaugauccuggucagcaucuucaucaucaucaagaagaccaagaagcccaccggcgccccgcccgagcuguccggggugaccaacaacggcuucaucccccacaacugaggacuagucccuguucccagagcccacuuuuuuuucuuuuuuugaaauaaaauagccugucuuucagaucucaaaggcucuuuucagagccaccaaaaaaaaaaaaaaaaaaaaaaaaaaaaaaaaaaaaaaaaaaaaaaaaaaaaaaaaaaaaaaaaaaaaaaaaaaaaaaaaaaaaaaaaaaaaaaaaaaaaa

SEQ ID NO: 14708 - RNA, 1892 nt, Artificial Sequence
  HMPV/TN/92-4__ABM67072.1 fusion glycoprotein mRNA gc (variant)
aggagagucccgcagucggcguccagcggcucugcuuguucgugugugugucguugcaggccuuauucaagcuuaccaugagcuggaagguggucaucaucuucucccugcucaucacgccccagcacggccugaaggagagcuaccuggaggaguccugcagcaccaucaccgagggguaccucuccgugcugcgcaccggcugguacaccaacguguucacccuggaggucggggaccucgagaaccugacgugcagcgacggcccgucccugaucaagaccgagcucgaccugaccaagagcgcccugcgggagcucaagaccguguccgccgaccagcuggcgcgcgaggagcagaucgagaaccccgggagcggcuccuucgugcugggcgccaucgcccucggggucgccgccgcggccgccgugacggccggcguggcgaucgccaagaccauccggcuggagagcgaggucaccgccaucaacaacgcccugaagaagaccaacgaggccguguccacgcucgggaacggcgugcgcguccuggcgaccgccgugcgggagcugaaggacuucgugagcaagaaccucacccgcgccaucaacaagaacaagugcgacaucgacgaccugaagauggccgucuccuucagccaguucaaccggcgcuuccugaacguggugcggcaguucuccgacaacgccgggaucacccccgcgaucagccucgaccugaugacggacgccgagcuggcccgcgccguccccaacaugccgaccuccgccggccagaucaagcucaugcuggagaaccgggcgauggugcgccggaagggcuucgggauccugaucggcguguacgggagcagcgucaucuacauggugcagcuccccaucuucggcgugaucgacacccccugcuggaucgucaaggccgcccccuccugcagcgagaagaagggcaacuacgccugccugcugcgcgaggaccaggggugguacugccagaacgccggcuccaccguguacuacccgaacgagaaggacugcgagacgcgcggggaccacgucuucugcgacaccgcggccggcaucaacguggccgagcagagcaaggagugcaacaucaacaucuccaccaccaacuaccccugcaaggugagcacggggcggcaccccaucuccauggucgcccucagcccccugggcgcgcugguggccugcuacaagggcguguccugcagcaucggguccaaccgggucggcaucaucaagcagcucaacaaggggugcagcuacaucaccaaccaggacgccgacaccgugaccaucgacaacacgguguaccagcuguccaaggucgagggcgagcagcacgugaucaaggggcgcccggugagcuccagcuucgaccccaucaaguuccccgaggaccaguuccaggucgcccuggaccagguguucgagaacaucgagaacucccaggcccucguggaccagagcaaccggauccuguccagcgcggagaagggcaacaccggcuucaucaucgucaucauccugaucgccgugcucgggagcuccaugauccuggugagcaucuucaucaucaucaagaagaccaagaagcccaccggcgccccgcccgagcuguccggggucacgaacaacggcuucaucccccacaacugaggacuagucccuguucccagagcccacuuuuuuuucuuuuuuugaaauaaaauagccugucuuucagaucucaaaggcucuuuucagagccaccaaaaaaaaaaaaaaaaaaaaaaaaaaaaaaaaaaaaaaaaaaaaaaaaaaaaaaaaaaaaaaaaaaaaaaaaaaaaaaaaaaaaaaaaaaaaaaaaaaaaa

SEQ ID NO: 14709 - RNA, 1892 nt, Artificial Sequence
  HMPV/TN/92-4__ABM67072.1 fusion glycoprotein mRNA gc (variant)
aggagagucccgcagucggcguccagcggcucugcuuguucgugugugugucguugcaggccuuauucaagcuuaccaugagcuggaagguggucaucaucuucucccugcucaucacgccccagcacggccugaaggagagcuaccuggaggaguccugcagcaccaucaccgagggguaccucuccgugcugcgcaccggcugguacaccaacguguucacccuggaggucggggacguggagaaccucacgugcagcgacggcccgucccugaucaagaccgagcuggaccucaccaagagcgcccugcgggagcugaagaccguguccgccgaccagcucgcgcgcgaggagcagaucgagaaccccgggagcggcuccuucguccugggcgccaucgcccuggggguggccgccgcggccgccgugacggccggcgucgcgaucgccaagaccauccggcucgagagcgaggugaccgccaucaacaacgcccugaagaagaccaacgaggccguguccacgcuggggaacggcguccgcgugcucgcgaccgccgugcgggagcugaaggacuucguccugaagaaccucacccgcgccaucaacaagaacaagugcgacaucgacgaccugaagauggccgugagcuucucccaguucaaccggcgcuuccugaacgugguccggcaguucagcgacaacgccgggaucacccccgcgaucucccucgaccugaugacggacgccgagcuggcccgcgccgugcccaacaugccgaccagcgccggccagaucaagcucaugcuggagaaccgggcgauggugcgccggaagggcuucgggauccugaucggcgucuacggguccagcgugaucuacauggugcagcuccccaucuucggcgucaucgacacccccugcuggaucgugaaggccgcccccagcugcuccgagaagaagggcaacuacgccugccugcugcgcgaggaccaggggugguacugccagaacgccggcagcaccgucuacuacccgaacgagaaggacugcgagacgcgcggggaccacguguucugcgacaccgcggccggcaucaacguggccgagcaguccaaggagugcaacaucaacaucagcaccaccaacuaccccugcaaggucuccacggggcggcaccccaucagcaugguggcccucagcccccugggcgcgcugguggccugcuacaagggcgucuccugcuccaucgggagcaaccgggugggcaucaucaagcagcucaacaaggggugcuccuacaucaccaaccaggacgccgacaccgugaccaucgacaacacggucuaccagcugagcaagguggagggcgagcagcacgugaucaaggggcgcccggucuccagcuccuucgaccccaucaaguuccccgaggaccaguuccagguggcccuggaccagguguucgagaacaucgagaacagccaggcccucgucgaccaguccaaccggauccugagcuccgcggagaagggcaacaccggcuucaucaucgugaucauccugaucgccgugcucgggagcagcaugauccuggucuccaucuucaucaucaucaagaagaccaagaagcccaccggcgccccgcccgagcugagcggggugacgaacaacggcuucaucccccacaacugaggacuagucccuguucccagagcccacuuuuuuuucuuuuuuugaaauaaaauagccugucuuucagaucucaaaggcucuuuucagagccaccaaaaaaaaaaaaaaaaaaaaaaaaaaaaaaaaaaaaaaaaaaaaaaaaaaaaaaaaaaaaaaaaaaaaaaaaaaaaaaaaaaaaaaaaaaaaaaaaaaaaa

SEQ ID NO: 14710 - RNA, 1892 nt, Artificial Sequence
  HMPV/TN/92-4__ABM67072.1 fusion glycoprotein mRNA gc (variant)
aggagagucccgcagucggcguccagcggcucugcuuguucgugugugugucguugcaggccuuauucaagcuuaccaugagcuggaagguggucaucaucuucucccugcucaucacgccccagcacggccugaaggagagcuaccuggaggaguccugcagcaccaucaccgagggguaccucuccgugcugcgcaccggcugguacaccaacguguucacccuggaggucggggacguggagaaccucacgugcagcgacggcccgucccugaucaagaccgagcuggaccucaccaagagcgcccugcgggagcugaagaccguguccgccgaccagcucgcgcgcgaggagcagaucgagaaccccgggagcggcuccuucguccugggcgccaucgcccuggggguggccgccgcggccgccgugacggccggcgucgcgaucgccaagaccauccggcucgagagcgaggugaccgccaucaacaacgcccugaagaagaccaacgaggccguguccacgcuggggaacggcguccgcgugcucgcgaccgccgugcgggagcugaaggacuucgucagcaagaaccuguggcgcgccaucaacaagaacaagugcgacaucgacgaccucaagauggccguguccuucagccaguucaaccggcgcuuccugaacgugguccggcaguucuccgacaacgccgggaucacccccgcgaucagccuggaccucaugaccgacgccgagcuggcccgcgccgugcccaacaugccgacguccgccggccagaucaagcugaugcucgagaaccgggcgauggugcgccggaagggcuucgggauccugaucggcgucuacgggagcagcgugaucuacauggugcagcugcccaucuucggcgucaucgacacccccugcuggaucgugaaggccgcccccuccugcagcgagaagaagggcaacuacgccugccuccugcgcgaggaccaggggugguacugccagaacgccggcuccaccgucuacuacccgaacgagaaggacugcgagacccgcggggaccacguguucugcgacacggcggccggcaucaacguggccgagcagagcaaggagugcaacaucaacaucuccaccaccaacuaccccugcaaggucagcaccgggcggcaccccaucuccaugguggcccugagcccccucggcgcgcugguggccugcuacaagggcgucuccugcagcaucggguccaaccgggugggcaucaucaagcagcugaacaaggggugcagcuacaucacgaaccaggacgccgacaccgugaccaucgacaacaccgucuaccagcucuccaagguggagggcgagcagcacgugaucaaggggcgcccggucagcuccagcuucgaccccaucaaguuccccgaggaccaguuccagguggcccuggaccagguguucgagaacaucgagaacucccaggcccuggucgaccagagcaaccggauccucuccagcgcggagaagggcaacacgggcuucaucaucgugaucauccugaucgccgugcuggggagcuccaugauccucgucagcaucuucaucaucaucaagaagaccaagaagcccaccggcgccccgcccgagcuguccggggugaccaacaacggcuucaucccccacaacugaggacuagucccuguucccagagcccacuuuuuuuucuuuuuuugaaauaaaauagccugucuuucagaucucaaaggcucuuuucagagccaccaaaaaaaaaaaaaaaaaaaaaaaaaaaaaaaaaaaaaaaaaaaaaaaaaaaaaaaaaaaaaaaaaaaaaaaaaaaaaaaaaaaaaaaaaaaaaaaaaaaaa

SEQ ID NO: 14711 - RNA, 1892 nt, Artificial Sequence
  HMPV/TN/92-4__ABM67072.1 fusion glycoprotein mRNA gc (variant)
aggagagucccgcagucggcguccagcggcucugcuuguucgugugugugucguugcaggccuuauucaagcuuaccaugagcuggaagguggucaucaucuucucccugcucaucacgccccagcacggccugaaggagagcuaccuggaggaguccugcagcaccaucaccgagggguaccucuccgugcugcgcaccggcugguacaccaacguguucacccuggaggucggggaccucgagaaccugacgugcagcgacggcccgucccugaucaagaccgagcucgaccugcugaaguccgcccuccgggagcugaagaccguguccgccgaccagcuggcgcgcgaggagcagaucgagaaccccgggagcggcuccuucgugcucggcgccaucgcccugggggucgccgccgcggccgccgugaccgccggcguggcgaucgccaagacgauccggcuggagagcgaggucaccgccaucaacaacgcccucaagaagaccaacgaggccguguccacccuggggaacggcgugcgcguccuggcgacggccgugcgggagcucaaggacuucgugcugaagaaccuguggcgcgccaucaacaagaacaagugcgacaucgacgaccucaagauggccgucagcuucucccaguucaaccggcgcuuccugaacguggugcggcaguucagcgacaacgccgggaucacccccgcgaucucccuggaccucaugaccgacgccgagcuggcccgcgccguccccaacaugccgaccagcgccggccagaucaagcugaugcucgagaaccgggcgauggugcgccggaagggcuucgggauccugaucggcguguacggguccagcgucaucuacauggugcagcugcccaucuucggcgugaucgacacgcccugcuggaucgucaaggccgcccccagcugcuccgagaagaagggcaacuacgccugccuccugcgcgaggaccaggggugguacugccagaacgccggcagcaccguguacuacccgaacgagaaggacugcgagacccgcggggaccacgucuucugcgacaccgcggccggcaucaacguggccgagcaguccaaggagugcaacaucaacaucagcacgaccaacuaccccugcaagguguccaccgggcggcaccccaucagcauggucgcccugagcccccucggcgcgcugguggccugcuacaagggcgugagcugcuccaucgggagcaaccgggucggcaucaucaagcagcugaacaaggggugcuccuacaucaccaaccaggacgccgacacggugaccaucgacaacaccguguaccagcucagcaaggucgagggcgagcagcacgugaucaaggggcgcccgguguccagcuccuucgaccccaucaaguuccccgaggaccaguuccaggucgcccuggaccagguguucgagaacaucgagaacagccaggcccugguggaccaguccaaccggauccucagcuccgcggagaagggcaacaccggcuucaucaucgucaucauccugaucgccgugcuggggagcagcaugauccucguguccaucuucaucaucaucaagaagacgaagaagcccaccggcgccccgcccgagcugagcggggucaccaacaacggcuucaucccccacaacugaggacuagucccuguucccagagcccacuuuuuuuucuuuuuuugaaauaaaauagccugucuuucagaucucaaaggcucuuuucagagccaccaaaaaaaaaaaaaaaaaaaaaaaaaaaaaaaaaaaaaaaaaaaaaaaaaaaaaaaaaaaaaaaaaaaaaaaaaaaaaaaaaaaaaaaaaaaaaaaaaaaaa

SEQ ID NO: 14712 - RNA, 1892 nt, Artificial Sequence
  HMPV/TN/92-4__ABM67072.1 fusion glycoprotein mRNA gc (variant)
aggagagucccgcagucggcguccagcggcucugcuuguucgugugugugucguugcaggccuuauucaagcuuaccaugagcuggaagguggucaucaucuucucccugcucaucacgccccagcacggccugaaggagagcuaccuggaggaguccugcagcaccaucaccgagggguaccucuccgugcugcgcaccggcugguacaccaacguguucacccugcccgucggggacguggagaaccucacgugcagcgacggccccucccugaucaagaccgagcuggaccucaccaagagcgcccugcgggagcugaagaccguguccgccgaccagcucgcgcgcgaggagcagaucgagaaccccgggagcggcuccuucguccugggcgccaucgcccuggggguggccgccgcggccgccgugacggccggcgucgcgaucgccaagaccauccggcucgagagcgaggugaccgccaucaacaacgcccugaagaagaccaacgaggccguguccacgcuggggaacggcguccgcgugcucgcgaccgccgugcgggagcugaaggacuucgucagcaagaaccugacccgcgccaucaacaagaacaagugcgacaucgacgaccucaagauggccguguccuucagccaguucaaccggcgcuuccugaacgugguccggcaguucuccgacaacgccgggaucacccccgcgaucagccuggaccucaugacggacgccgagcuggcccgcgccgugccgaacaugcccaccuccgccggccagaucaagcugaugcucgagaaccgggcgauggugcgccggaagggcuucgggauccugaucggcgucuacgggagcagcgugaucuacauggugcagcugcccaucuucggcgucaucgacacccccugcuggaucgugaaggccgccccguccugcagcgagaagaagggcaacuacgccugccuccugcgcgaggaccaggggugguacugccagaacgccggcuccaccgucuacuaccccaacgagaaggacugcgagacgcgcggggaccacguguucugcgacaccgcggccggcaucaacguggccgagcagagcaaggagugcaacaucaacaucuccaccaccaacuaccccugcaaggucagcacggggcggcaccccaucuccaugguggcccugagcccgcucggcgcgcugguggccugcuacaagggcgucuccugcagcaucggguccaaccgggugggcaucaucaagcagcugaacaaggggugcagcuacaucaccaaccaggacgccgacaccgugaccaucgacaacacggucuaccagcucuccaagguggagggcgagcagcacgugaucaaggggcgccccgucagcuccagcuucgaccccaucaaguuccccgaggaccaguuccagguggcccuggaccagguguucgagaacaucgagaacucccaggcccuggucgaccagagcaaccggauccucuccagcgcggagaagggcaacaccggcuucaucaucgugaucauccugaucgccgugcuggggagcuccaugauccucgucagcaucuucaucaucaucaagaagaccaagaagccgaccggcgccccgcccgagcuguccggggugacgaacaacggcuucaucccccacaacugaggacuagucccuguucccagagcccacuuuuuuuucuuuuuuugaaauaaaauagccugucuuucagaucucaaaggcucuuuucagagccaccaaaaaaaaaaaaaaaaaaaaaaaaaaaaaaaaaaaaaaaaaaaaaaaaaaaaaaaaaaaaaaaaaaaaaaaaaaaaaaaaaaaaaaaaaaaaaaaaaaaaa

SEQ ID NO: 14713 - RNA, 1892 nt, Artificial Sequence
  HMPV/TN/92-4__ABM67072.1 fusion glycoprotein mRNA gc (variant)
aggagagucccgcagucggcguccagcggcucugcuuguucgugugugugucguugcaggccuuauucaagcuuaccaugagcuggaagguggucaucaucuucucccugcucaucacgccccagcacggccugaaggagagcuaccuggaggaguccugcagcaccaucaccgagggguaccucuccgugcugcgcaccggcugguacaccaacguguucacccuggaggucggggacguggagaaccucacgugcagcgacggccccucccugaucaagaccgagcuggaccucaccaagagcgcccugcgggagcugaagaccguguccgccgaccagcucgcgcgcgaggagcagaucgagaaccccgggagcggcuccuucguccugggcgccaucgcccuggggguggccgccgcggccgccgugacggccggcgucgcgaucgccaagaccauccggcucgagagcgaggugaccgccaucaacaacgcccugaagaagaccaacgaggccguguccacgcuggggaacggcguccgcgugcucgcgaccgccgugcgggagcugaaggacuucgucagcaagaaccugacccgcgccaucaacaagaacaagugcgacauccccgaccucaagauggccguguccuucagccaguucaaccggcgcuuccugaacgugguccggcaguucuccgacaacgccgggaucacccccgcgaucagccuggaccucaugacggacgccgagcuggcccgcgccgugccgaacaugcccaccuccgccggccagaucaagcugaugcucgagaaccgggcgauggugcgccggaagggcuucgggauccugaucggcgucuacgggagcagcgugaucuacauggugcagcugcccaucuucggcgucaucgacacccccugcuggaucgugaaggccgccccguccugcagcgagaagaagggcaacuacgccugccuccugcgcgaggaccaggggugguacugccagaacgccggcuccaccgucuacuaccccaacgagaaggacugcgagacgcgcggggaccacguguucugcgacaccgcggccggcaucaacguggccgagcagagcaaggagugcaacaucaacaucuccaccaccaacuaccccugcaaggucagcacggggcggcaccccaucuccaugguggcccugagcccgcucggcgcgcugguggccugcuacaagggcgucuccugcagcaucggguccaaccgggugggcaucaucaagcagcugaacaaggggugcagcuacaucaccaaccaggacgccgacaccgugaccaucgacaacacggucuaccagcucuccaagguggagggcgagcagcacgugaucaaggggcgccccgucagcuccagcuucgaccccaucaaguuccccgaggaccaguuccagguggcccuggaccagguguucgagaacaucgagaacucccaggcccuggucgaccagagcaaccggauccucuccagcgcggagaagggcaacaccggcuucaucaucgugaucauccugaucgccgugcuggggagcuccaugauccucgucagcaucuucaucaucaucaagaagaccaagaagccgaccggcgccccgcccgagcuguccggggugacgaacaacggcuucaucccccacaacugaggacuagucccuguucccagagcccacuuuuuuuucuuuuuuugaaauaaaauagccugucuuucagaucucaaaggcucuuuucagagccaccaaaaaaaaaaaaaaaaaaaaaaaaaaaaaaaaaaaaaaaaaaaaaaaaaaaaaaaaaaaaaaaaaaaaaaaaaaaaaaaaaaaaaaaaaaaaaaaaaaaaa

SEQ ID NO: 14714 - RNA, 1892 nt, Artificial Sequence
  HMPV/TN/92-4__ABM67072.1 fusion glycoprotein mRNA gc (variant)
aggagagucccgcagucggcguccagcggcucugcuuguucgugugugugucguugcaggccuuauucaagcuuaccaugagcuggaagguggucaucaucuucucccugcucaucacgccccagcacggccugaaggagagcuaccuggaggaguccugcagcaccaucaccgagggguaccucuccgugcugcgcaccggcugguacaccaacguguucacccuggaggucggggacguggagaaccucacgugcagcgacggccccucccugaucaagaccgagcuggaccucaccaagagcgcccugcgggagcugaagaccguguccgccgaccagcucgcgcgcgaggagcagaucgagaaccccgggagcggcuccuucguccugggcgccaucgcccuggggguggccgccgcggccgccgugacggccggcgucgcgaucgccaagaccauccggcucgagagcgaggugaccgccaucaacaacgcccugaagaagaccaacgaggccguguccacgcuggggaacggcguccgcgugcucgcgaccgccgugcgggagcugaaggacuucgucagcaagaaccugacccgcgccaucaacaagaacaagugccccaucgacgaccucaagauggccguguccuucagccaguucaaccggcgcuuccugaacgugguccggcaguucuccgacaacgccgggaucacccccgcgaucagccuggaccucaugacggacgccgagcuggcccgcgccgugccgaacaugcccaccuccgccggccagaucaagcugaugcucgagaaccgggcgauggugcgccggaagggcuucgggauccugaucggcgucuacgggagcagcgugaucuacauggugcagcugcccaucuucggcgucaucgacacccccugcuggaucgugaaggccgccccguccugcagcgagaagaagggcaacuacgccugccuccugcgcgaggaccaggggugguacugccagaacgccggcuccaccgucuacuaccccaacgagaaggacugcgagacgcgcggggaccacguguucugcgacaccgcggccggcaucaacguggccgagcagagcaaggagugcaacaucaacaucuccaccaccaacuaccccugcaaggucagcacggggcggcaccccaucuccaugguggcccugagcccgcucggcgcgcugguggccugcuacaagggcgucuccugcagcaucggguccaaccgggugggcaucaucaagcagcugaacaaggggugcagcuacaucaccaaccaggacgccgacaccgugaccaucgacaacacggucuaccagcucuccaagguggagggcgagcagcacgugaucaaggggcgccccgucagcuccagcuucgaccccaucaaguuccccgaggaccaguuccagguggcccuggaccagguguucgagaacaucgagaacucccaggcccuggucgaccagagcaaccggauccucuccagcgcggagaagggcaacaccggcuucaucaucgugaucauccugaucgccgugcuggggagcuccaugauccucgucagcaucuucaucaucaucaagaagaccaagaagccgaccggcgccccgcccgagcuguccggggugacgaacaacggcuucaucccccacaacugaggacuagucccuguucccagagcccacuuuuuuuucuuuuuuugaaauaaaauagccugucuuucagaucucaaaggcucuuuucagagccaccaaaaaaaaaaaaaaaaaaaaaaaaaaaaaaaaaaaaaaaaaaaaaaaaaaaaaaaaaaaaaaaaaaaaaaaaaaaaaaaaaaaaaaaaaaaaaaaaaaaaa

SEQ ID NO: 14715 - RNA, 1892 nt, Artificial Sequence
  HMPV/TN/92-4__ABM67072.1 fusion glycoprotein mRNA gc (variant)
aggagagucccgcagucggcguccagcggcucugcuuguucgugugugugucguugcaggccuuauucaagcuuaccaugagcuggaagguggucaucaucuucucccugcucaucacgccccagcacggccugaaggagagcuaccuggaggaguccugcagcaccaucaccgagggguaccucuccgugcugcgcaccggcugguacaccaacguguucacccuggaggucggggacguggagaaccucacgugcagcgacggccccucccugaucaagaccgagcuggaccucaccaagagcgcccugcgggagcugaagaccguguccgccgaccagcucgcgcgcgaggagcagaucgagaaccccgggagcggcuccuucguccugggcgccaucgcccuggggguggccgccgcggccgccgugacggccggcgucgcgaucgccaagaccauccggcuccccagcgaggugaccgccaucaacaacgcccugaagaagaccaacgaggccguguccacgcuggggaacggcguccgcgugcucgcgaccgccgugcgggagcugaaggacuucgucagcaagaaccugacccgcgccaucaacaagaacaagugcgacaucgacgaccucaagauggccguguccuucagccaguucaaccggcgcuuccugaacgugguccggcaguucuccgacaacgccgggaucacccccgcgaucagccuggaccucaugacggacgccgagcuggcccgcgccgugccgaacaugcccaccuccgccggccagaucaagcugaugcucgagaaccgggcgauggugcgccggaagggcuucgggauccugaucggcgucuacgggagcagcgugaucuacauggugcagcugcccaucuucggcgucaucgacacccccugcuggaucgugaaggccgccccguccugcagcgagaagaagggcaacuacgccugccuccugcgcgaggaccaggggugguacugccagaacgccggcuccaccgucuacuaccccaacgagaaggacugcgagacgcgcggggaccacguguucugcgacaccgcggccggcaucaacguggccgagcagagcaaggagugcaacaucaacaucuccaccaccaacuaccccugcaaggucagcacggggcggcaccccaucuccaugguggcccugagcccgcucggcgcgcugguggccugcuacaagggcgucuccugcagcaucggguccaaccgggugggcaucaucaagcagcugaacaaggggugcagcuacaucaccaaccaggacgccgacaccgugaccaucgacaacacggucuaccagcucuccaagguggagggcgagcagcacgugaucaaggggcgccccgucagcuccagcuucgaccccaucaaguuccccgaggaccaguuccagguggcccuggaccagguguucgagaacaucgagaacucccaggcccuggucgaccagagcaaccggauccucuccagcgcggagaagggcaacaccggcuucaucaucgugaucauccugaucgccgugcuggggagcuccaugauccucgucagcaucuucaucaucaucaagaagaccaagaagccgaccggcgccccgcccgagcuguccggggugacgaacaacggcuucaucccccacaacugaggacuagucccuguucccagagcccacuuuuuuuucuuuuuuugaaauaaaauagccugucuuucagaucucaaaggcucuuuucagagccaccaaaaaaaaaaaaaaaaaaaaaaaaaaaaaaaaaaaaaaaaaaaaaaaaaaaaaaaaaaaaaaaaaaaaaaaaaaaaaaaaaaaaaaaaaaaaaaaaaaaaa

SEQ ID NO: 14716 - RNA, 1892 nt, Artificial Sequence
  HMPV/TN/92-4__ABM67072.1 fusion glycoprotein mRNA gc (variant)
aggagagucccgcagucggcguccagcggcucugcuuguucgugugugugucguugcaggccuuauucaagcuuaccaugagcuggaagguggucaucaucuucucccugcucaucacgccccagcacggccugaaggagagcuaccuggaggaguccugcagcaccaucaccgagggguaccucuccgugcugcgcaccggcugguacaccaacguguucacccuggaggucggggacguggagaaccucacgugcagcgacggccccucccugaucaagaccgagcuggaccucaccaagagcgcccugcgggagcugaagaccguguccgccgaccagcucgcgcgcgaggagcagaucgagaaccccgggagcggcuccuucguccugggcgccaucgcccuggggguggccgccgcggccgccgugacggccggcgucgcgaucgccaagaccauccggcucgagagcgaggugaccgccaucaacaacgcccugaagaagaccaacgaggccguguccacgcuggggaacggcguccgcgugcucgcgaccgccgugcgggagcugaaggacuucgucagcaagaaccugacccgcgccaucaacaagaacaagugcgacaucgacgaccucaagauggccguguccuucagccaguucaaccggcgcuuccugaacgugguccggcaguucuccgacaacgccgggaucacccccgcgaucagccuggaccucaugacggacgccgagcuggcccgcgccgugcccaacaugccgaccuccgccggccagaucaagcugaugcucgagaaccgggcgauggugcgccggaagggcuucgggauccugaucggcgucuacgggagcagcgugaucuacauggugcagcugcccaucuucggcgucaucgacacccccugcuggaucgugaaggccgcccccuccugcagcgagaagaagggcaacuacgccugccuccugcgcgaggaccaggggugguacugccagaacgccggcuccaccgucuacuacccgaacgagaaggacugcgagacgcgcggggaccacguguucugcgacaccgcggccggcaucaacguggccgagcagagcaaggagugcaacaucaacaucuccaccaccaacuaccccugcaaggucagcacggggcggcaccccaucuccaugguggcccugagcccccucggcgcgcugguggccugcuacaagggcgucuccugcagcaucggguccaaccgggugggcaucaucaagcagcugaacaaggggugcagcuacaucaccaaccaggacgccgacaccgugaccaucgacaacacggucuaccagcucuccaagguggagggcgagcagcacgugaucaaggggcgcccggucagcuccagcuucccgcccaucaaguuccccgaggaccaguuccagguggcccuggaccagguguucgagaacaucgagaacucccaggcccuggucgaccagagcaaccggauccucuccagcgcggagaagggcaacaccggcuucaucaucgugaucauccugaucgccgugcuggggagcuccaugauccucgucagcaucuucaucaucaucaagaagaccaagaagcccaccggcgccccgcccgagcuguccggggugacgaacaacggcuucaucccccacaacugaggacuagucccuguucccagagcccacuuuuuuuucuuuuuuugaaauaaaauagccugucuuucagaucucaaaggcucuuuucagagccaccaaaaaaaaaaaaaaaaaaaaaaaaaaaaaaaaaaaaaaaaaaaaaaaaaaaaaaaaaaaaaaaaaaaaaaaaaaaaaaaaaaaaaaaaaaaaaaaaaaaaa

SEQ ID NO: 14717 - RNA, 1892 nt, Artificial Sequence
  HMPV/TN/92-4__ABM67072.1 fusion glycoprotein mRNA gc (variant)
aggagagucccgcagucggcguccagcggcucugcuuguucgugugugugucguugcaggccuuauucaagcuuaccaugagcuggaagguggucaucaucuucucccugcucaucacgccccagcacggccugaaggagagcuaccuggaggaguccugcagcaccaucaccgagggguaccucuccgugcugcgcaccggcugguacaccaacguguucacccuggaggucggggacguggagaaccucacgugcagcgacggcccgucccugaucaagaccgagcuggaccucaccaagagcgcccugcgggagcugaagaccguguccgccgaccagcucgcgcgcgaggagcagaucgagaaccccgggagcggcuccuucguccugggcgccaucgcccuggggguggccgccgcggccgccgugacggccggcgucgcgaucgccaagaccauccggcucgagagcgaggugaccgccaucaacaacgcccugaagaagaccaacgaggccguguccacgcuggggaacggcguccgcgugcucgcgaccgccgugcgggagcugaaggacuucgucagcaagaaccugacccgcgccaucaacaagaacaagugcgacaucgacgaccucaagauggccguguccuucagccaguucaaccggcgcuuccugaacgugguccggcaguucuccgacaacgccgggaucacccccgcgaucagccuggaccucaugacggacgccgagcuggcccgcgccgugcccaacaugccgaccuccgccggccagaucaagcugaugcucgagaaccgggcgauggugcgccggaagggcuucgggauccugaucggcgucuacgggagcagcgugaucuacauggugcagcugcccaucuucggcgucaucgacacccccugcuggaucgugaaggccgcccccuccugcagcgagaagaagggcaacuacgccugccuccugcgcgaggaccaggggugguacugccagaacgccggcuccaccgucuacuacccgaacgagaaggacugcgagacgcgcggggaccacguguucugcgacaccgcggccggcaucaacguggccgagcagagcaaggagugcaacaucaacaucuccaccaccaacuaccccugcaaggucagcacggggcggcaccccaucuccaugguggcccugagcccccucggcgcgcugguggccugcuacaagggcgucuccugcagcaucggguccaaccgggugggcaucaucaagcagcugaacaaggggugcagcuacaucaccaaccaggacgccgacaccgugaccaucgacaacacggucuaccagcucuccaagguggagggcgagcagcacgugaucaaggggcgcccggucagcuccagcuucgaccccaucaaguuccccgagaaccaguuccagguggcccuggaccagguguucgagaacaucgagaacucccaggcccuggucgaccagagcaaccggauccucuccagcgcggagaagggcaacaccggcuucaucaucgugaucauccugaucgccgugcuggggagcuccaugauccucgucagcaucuucaucaucaucaagaagaccaagaagcccaccggcgccccgcccgagcuguccggggugacgaacaacggcuucaucccccacaacugaggacuagucccuguucccagagcccacuuuuuuuucuuuuuuugaaauaaaauagccugucuuucagaucucaaaggcucuuuucagagccaccaaaaaaaaaaaaaaaaaaaaaaaaaaaaaaaaaaaaaaaaaaaaaaaaaaaaaaaaaaaaaaaaaaaaaaaaaaaaaaaaaaaaaaaaaaaaaaaaaaaaa

SEQ ID NO: 14718 - RNA, 1892 nt, Artificial Sequence
  HMPV/TN/92-4__ABM67072.1 fusion glycoprotein mRNA gc (variant)
aggagagucccgcagucggcguccagcggcucugcuuguucgugugugugucguugcaggccuuauucaagcuuaccaugagcuggaagguggucaucaucuucucccugcucaucacgccccagcacggccugaaggagagcuaccuggaggaguccugcagcaccaucaccgagggguaccucuccgugcugcgcaccggcugguacaccaacguguucacccuggaggucggggacguggagaaccucacgugcagcgacggcccgucccugaucaagaccgagcuggaccucaccaagagcgcccugcgggagcugaagaccguguccgccgaccagcucgcgcgcgaggagcagaucgagaaccccgggagcggcuccuucguccugggcgccaucgcccuggggguggccgccgcggccgccgugacggccggcgucgcgaucgccaagaccauccggcucgagagcgaggugaccgccaucaacaacgcccugaagaagaccaacgaggccguguccacgcuggggaacggcguccgcgugcucgcgaccgccgugcgggagcugaaggacuucgucagcaagaaccugacccgcgccaucaacaagaacaagugcgacaucgacgaccucaagauggccguguccuucagccaguucaaccggcgcuuccugaacgugguccggcaguucuccgacaacgccgggaucacccccgcgaucagccuggaccucaugacggacgccgagcuggcccgcgccgugcccaacaugccgaccuccgccggccagaucaagcugaugcucgagaaccgggcgauggugcgccggaagggcuucgggauccugaucggcgucuacgggagcagcgugaucuacauggugcagcugcccaucuucggcgucaucgacacccccugcuggaucgugaaggccgcccccuccugcagcgagaagaagggcaacuacgccugccuccugcgcgaggaccaggggugguacugccagaacgccggcuccaccgucuacuacccgaacgagaaggacugcgagacgcgcggggaccacguguucugcgacaccgcggccggcaucaacguggccgagcagagcaaggagugcaacaucaacaucuccaccaccaacuaccccugcaaggucagcacggggcggcaccccaucuccaugguggcccugagcccccucggcgcgcugguggccugcuacaagggcgucuccugcagcaucggguccaaccgggugggcaucaucaagcagcugaacaaggggugcagcuacaucaccaaccaggacgccgacaccgugaccaucgacaacacggucuaccagcucuccaagguggagggcgagcagcacgugaucaaggggcgcccggucagcuccagcuucgaccccaucaaguucccccaggaccaguuccagguggcccuggaccagguguucgagaacaucgagaacucccaggcccuggucgaccagagcaaccggauccucuccagcgcggagaagggcaacaccggcuucaucaucgugaucauccugaucgccgugcuggggagcuccaugauccucgucagcaucuucaucaucaucaagaagaccaagaagcccaccggcgccccgcccgagcuguccggggugacgaacaacggcuucaucccccacaacugaggacuagucccuguucccagagcccacuuuuuuuucuuuuuuugaaauaaaauagccugucuuucagaucucaaaggcucuuuucagagccaccaaaaaaaaaaaaaaaaaaaaaaaaaaaaaaaaaaaaaaaaaaaaaaaaaaaaaaaaaaaaaaaaaaaaaaaaaaaaaaaaaaaaaaaaaaaaaaaaaaaaa

SEQ ID NO: 14719 - RNA, 1892 nt, Artificial Sequence
  HMPV/TN/92-4__ABM67072.1 fusion glycoprotein mRNA gc (variant)
aggagagucccgcagucggcguccagcggcucugcuuguucgugugugugucguugcaggccuuauucaagcuuaccaugagcuggaagguggucaucaucuucucccugcucaucacgccccagcacggccugaaggagagcuaccuggaggaguccugcagcaccaucaccgagggguaccucuccgugcugcgcaccggcugguacaccaacguguucacccuggaggucggggacguggagaaccucacgugcagcgacggcccgucccugaucaagaccgagcuggaccucaccaagagcgcccugcgggagcugaagaccguguccgccgaccagcucgcgcgcgaggagcagaucgagaaccccgggagcggcuccuucguccugggcgccaucgcccuggggguggccgccgcggccgccgugacggccggcgucgcgaucgccaagaccauccggcucgagagcgaggugaccgccaucaacaacgcccugaagaagaccaacgaggccguguccacgcuggggaacggcguccgcgugcucgcgaccgccgugcgggagcugaaggacuucgucagcaagaaccugacccgcgccaucaacaagaacaagugcgacaucgacgaccucaagauggccguguccuucagccaguggaaccggcgcuuccugaacgugguccggcaguucuccgacaacgccgggaucacccccgcgaucagccuggaccucaugacggacgccgagcuggcccgcgccgugcccaacaugccgaccuccgccggccagaucaagcugaugcucgagaaccgggcgauggugcgccggaagggcuucgggauccugaucggcgucuacgggagcagcgugaucuacauggugcagcugcccaucuucggcgucaucgacacccccugcuggaucgugaaggccgcccccuccugcagcgagaagaagggcaacuacgccugccuccugcgcgaggaccaggggugguacugccagaacgccggcuccaccgucuacuacccgaacgagaaggacugcgagacgcgcggggaccacguguucugcgacaccgcggccggcaucaacguggccgagcagagcaaggagugcaacaucaacaucuccaccaccaacuaccccugcaaggucagcacggggcggcaccccaucuccaugguggcccugagcccccucggcgcgcugguggccugcuacaagggcgucuccugcagcaucggguccaaccgggugggcaucaucaagcagcugaacaaggggugcagcuacaucaccaaccaggacgccgacaccgugaccaucgacaacacggucuaccagcucuccaagguggagggcgagcagcacgugaucaaggggcgcccggucagcuccagcuucgaccccaucaaguuccccgaggaccaguuccagguggcccuggaccagguguucgagaacaucgagaacucccaggcccuggucgaccagagcaaccggauccucuccagcgcggagaagggcaacaccggcuucaucaucgugaucauccugaucgccgugcuggggagcuccaugauccucgucagcaucuucaucaucaucaagaagaccaagaagcccaccggcgccccgcccgagcuguccggggugacgaacaacggcuucaucccccacaacugaggacuagucccuguucccagagcccacuuuuuuuucuuuuuuugaaauaaaauagccugucuuucagaucucaaaggcucuuuucagagccaccaaaaaaaaaaaaaaaaaaaaaaaaaaaaaaaaaaaaaaaaaaaaaaaaaaaaaaaaaaaaaaaaaaaaaaaaaaaaaaaaaaaaaaaaaaaaaaaaaaaaa

SEQ ID NO: 14720 - RNA, 1892 nt, Artificial Sequence
  HMPV/NL/1/99__AAQ90145.1 fusion glycoprotein mRNA gc (F0)
aggagagucccgcagucggcguccagcggcucugcuuguucgugugugugucguugcaggccuuauucaagcuuaccaugagcuggaaggugaugaucaucaucucccugcucaucacgccccagcacggccugaaggagagcuaccuggaggaguccugcagcaccaucaccgagggguaccucuccguccugcgcaccggcugguacaccaacguguucacccuggaggugggggacgucgagaaccucacgugcaccgacggcccgagccugaucaagaccgagcuggaccucaccaaguccgcccugcgggagcugaagacggugagcgccgaccagcucgcgcgcgaggagcagaucgagaacccccggcagucccgcuucgugcugggggccaucgcccugggcgucgccaccgccgcggccgugaccgccggcaucgccaucgcgaagaccauccggcucgagagcgaggugaacgccaucaagggggcccugaagcagacgaacgaggccgucuccacccugggcaacggggugcgcgugcucgccaccgcgguccgggagcugaaggaguucgugagcaagaaccugaccuccgccaucaaccgcaacaagugcgacaucgccgaccucaagauggccgugagcuucucccaguucaaccggcgcuuccugaacgucgugcggcaguucagcgacaacgccggcaucacgcccgcgaucucccuggaccucaugaccgacgccgagcuggcccgcgccgugagcuacaugcccaccuccgccgggcagaucaagcugaugcucgagaaccgggcgaugguccgccggaagggcuucggcauccugaucgggguguacggcagcagcgugaucuacaugguccagcugccgaucuucggggugaucgacacccccugcuggaucaucaaggccgcccccuccugcagcgagaagaacggcaacuacgccugccuccugcgcgaggaccagggcugguacugcaagaacgccggguccacgguguacuaccccaacgagaaggacugcgagacccggggcgaccacgucuucugcgacaccgcggccgggaucaacguggccgagcagagccgcgagugcaacaucaacaucuccaccacgaacuacccgugcaaggucagcaccggccggcaccccaucuccaugguggcccugagcccccucggggcgcugguggccugcuacaagggcgucuccugcagcaucggcuccaacuggguggggaucaucaagcagcugcccaagggcugcagcuacaucaccaaccaggacgccgacaccgugacgaucgacaacaccgucuaccagcucuccaagguggagggggagcagcacgugaucaagggccgcccggucagcuccagcuucgaccccaucaaguuccccgaggaccaguucaacguggcccuggaccagguguucgaguccaucgagaacagccaggcccuggucgaccaguccaacaagauccucaacagcgcggagaaggggaacaccggcuucaucaucguggugauccuggucgccgugcugggccucaccaugaucagcguguccaucaucaucaucaucaagaagacgcggaagcccaccggggccccgcccgagcugaacggcgucaccaacgggggcuucaucccccacagcugaggacuagucccuguucccagagcccacuuuuuuuucuuuuuuugaaauaaaauagccugucuuucagaucucaaaggcucuuuucagagccaccaaaaaaaaaaaaaaaaaaaaaaaaaaaaaaaaaaaaaaaaaaaaaaaaaaaaaaaaaaaaaaaaaaaaaaaaaaaaaaaaaaaaaaaaaaaaaaaaaaaaa

SEQ ID NO: 14721 - RNA, 1892 nt, Artificial Sequence
  HMPV/Sabana__AEA02280.1 fusion glycoprotein mRNA gc (F0)
aggagagucccgcagucggcguccagcggcucugcuuguucgugugugugucguugcaggccuuauucaagcuuaccaugagcuggaaggugaugaucaucaucucccugcucaucacgccccagcacggccugaaggagagcuaccuggaggaguccugcagcaccaucaccgagggguaccucuccguccugcgcaccggcugguacaccaacguguucacccuggaggugggggacgucgagaaccucacgugcaccgacggcccgagccugaucaagaccgagcuggaccucaccaaguccgcccugcgggagcugaagacggugagcgccgaccagcucgcgcgcgaggagcagaucgagaacccccggcagucccgcuucgugcugggggccaucgcccugggcgucgccaccgccgcggccgugaccgccggcaucgccaucgcgaagaccauccggcucgagagcgaggugaacgccaucaagggggcccugaagacgaccaacgaggccgucuccacccugggcaacggggugcgcgugcucgccaccgcgguccgggagcugaaggaguucgugagcaagaaccugacguccgccaucaacaagaacaagugcgacaucgccgaccucaagauggccgugagcuucucccaguucaaccgccgguuccugaacgucgugcgccaguucagcgacaacgccggcaucacccccgcgaucucccuggaccucaugaacgacgccgagcuggcccgggccgugagcuacaugcccaccuccgccgggcagaucaagcugaugcucgagaaccgcgcgaugguccggcgcaagggcuucggcauccugaucgggguguacggcagcagcgugaucuacaugguccagcugccgaucuucggggugaucaacacccccugcuggaucaucaaggccgcccccuccugcagcgagaaggacggcaacuacgccugccuccugcgggaggaccagggcugguacugcaagaacgccggguccacgguguacuaccccaacgagaaggacugcgagacccgcggcgaccacgucuucugcgacaccgcggccgggaucaacguggccgagcagagccgggagugcaacaucaacaucuccaccacgaacuacccgugcaaggucagcaccggccgccaccccaucuccaugguggcccugagcccccucggggcgcugguggccugcuacaagggcgucuccugcagcaccggcuccaaccagguggggaucaucaagcagcugcccaagggcugcagcuacaucaccaaccaggacgccgacacggugaccaucgacaacaccgucuaccagcucuccaagguggagggggagcagcacgugaucaagggccggccggucagcuccagcuucgaccccauccgcuuccccgaggaccaguucaacguggcccuggaccagguguucgaguccaucgagaacagccaggcccuggucgaccaguccaacaagauccucaacagcgcggagaaggggaacaccggcuucaucaucgugaucauccugaucgccgugcugggccucacgaugaucagcgucuccaucaucaucaucaucaagaagacccggaagcccaccggggccccgcccgagcugaacggcgugaccaacgggggcuucaucccccacagcugaggacuagucccuguucccagagcccacuuuuuuuucuuuuuuugaaauaaaauagccugucuuucagaucucaaaggcucuuuucagagccaccaaaaaaaaaaaaaaaaaaaaaaaaaaaaaaaaaaaaaaaaaaaaaaaaaaaaaaaaaaaaaaaaaaaaaaaaaaaaaaaaaaaaaaaaaaaaaaaaaaaaa

SEQ ID NO: 14722 - RNA, 1892 nt, Artificial Sequence
  HMPV/TN/92-4__ABM67072.1 fusion glycoprotein mRNA human (F0)
aggagagucccgcagucggcguccagcggcucugcuuguucgugugugugucguugcaggccuuauucaagcuuaccaugagcuggaagguggucaucauuuucucccugcucauaacaccccagcacggccuuaaagagucuuaccuggaagagucaugcaguaccaucacugaaggguauuugagcguuuuaagaacgggaugguacaccaacguguuuacacuggagguaggugacguggaaaaucuaacuuguuccgauggcccuucucucauuaagaccgagcuggaccuuacaaaaucggcccugagggaguugaagaccgucucagcugaucaacucgcacgggaggaacagaucgaaaacccacgccagagccgauucgugcugggggccauugcgcugggaguugcugccgcagccgcugugacugcaggcgucgccaucgcuaaaacaauacgucucgagagugaggugaccgccaucaauaacgcguuaaagaagacgaaugaagcaguauccacucuggguaacgggguuagagugcuugccaccgcugucagggaguugaaagacuuugugucuaagaaucugacacgggccauuaacaaaaauaagugcgauaucgacgaucuaaaaauggcagugagcuucucccaguuuaaccgcagauuccucaaugucguuaggcaauuuucagacaacgcuggaauuacuccggccaucagucuggaucuuaugaccgacgcggaacuggcccgggcagugcccaauaugccuacaagcgcuggccagauaaaguugaugcucgagaaccgcgccaugguacgaagaaagggcuucgggauucugaucggaguguaugguucuuccgucauuuacauggugcaguuaccaaucuuuggcguuaucgauacccccuguuggauugugaaagcugccccuucaugcagcgaaaagaaagggaauuaugcaugucugcucagggaggaccagggaugguacugccaaaacgccggcaguacggucuauuacccaaacgagaaggauugugaaacucggggugaccauguguucugcgacacagcugcggggauaaauguagcagagcagucuaaagaauguaacaucaauauuuccaccacuaacuaccccugcaagguuagcacaggacgucacccuaucucgaugguggcccuuucuccacugggcgcuuuggucgccuguuauaaaggcguguccugcucaauagggaguaaucgcgucggaauuaucaagcagcuaaacaaggguugcagcuacaucaccaaucaggaugcagacacggugaccauugauaacacaguuuaucaacuguccaaaguggagggcgaacagcauguaaucaaggggagaccggucucuagcucauuugaccccauuaaauucccugaggaucaguuuaauguggcccucgaccaaguuuucgagaacauagaaaauagucaggcucugguggaucaguccaacaggauccuuagcucugccgagaagggaaauacuggcuucauuaucgucaucauucugauagcaguguuggguucaaguaugauccucguaagcauuuuuaucauuaucaaaaagaccaagaaaccaacaggggcgcccccugaacuguccggcgugacuaacaauggauucauaccacacaacugaggacuagucccuguucccagagcccacuuuuuuuucuuuuuuugaaauaaaauagccugucuuucagaucucaaaggcucuuuucagagccaccaaaaaaaaaaaaaaaaaaaaaaaaaaaaaaaaaaaaaaaaaaaaaaaaaaaaaaaaaaaaaaaaaaaaaaaaaaaaaaaaaaaaaaaaaaaaaaaaaaaaa

SEQ ID NO: 14723 - RNA, 1892 nt, Artificial Sequence
  HMPV/TN/92-4__ABM67072.1 fusion glycoprotein mRNA human (variant)
aggagagucccgcagucggcguccagcggcucugcuuguucgugugugugucguugcaggccuuauucaagcuuaccaugagcuggaagguggucaucauuuucucccugcucauaacaccccagcacggccuuaaagagucuuaccuggaagagucaugcaguaccaucacugaaggguauuugagcguuuuaagaacgggaugguacaccaacguguuuacacuggagguaggugacguggaaaaucuaacuuguuccgauggcccuucucucauuaagaccgagcuggaccuuacaaaaucggcccugagggaguugaagaccgucucagcugaucaacucgcacgggaggaacagaucgaaaacccagggagcggaaguuucgugcugggcgccauugcgcuggguguugcugccgcagccgcugugacugcaggggucgccaucugcaaaacaauacgccucgaguccgaggugaccgcuaucaauaacgccuuaaagaagacgaaugaagcgguaucuacucugggaaacggcguucgagugcuugcauuugccguccgugaguugaaagacuucgugagcaagaaucugaccagagcucuaaacaaaaauaagugugauauugacgaucucaaaauggccguguccuuuucacaguucaacaggcgguuucugaaugucguucgccaguucagugacaacgcaggcaucacaccggcuauuagccuugaucugaugacugacgccgaauuggcgagagccgugcccaauaugccuaccucugcagggcaaaucaagcucaugcuggagaacagggcuaugguacggcgcaagggauuugguauauuaugcggcguguauggguccucagucauuuacauggugcagcugccaaucuucggaguuauugauacacccuguuggaucgugaaagccgcuccuagcugcagugaaaagaaaggcaauuaugccugucuccuucgagaggaccaggguugguacugccagaacgcagggucuaccgucuauuacccaaacgagaaggauugugaaacgagaggagaccauguguuuugcgacacugccgcuggcaucaauguagcggagcaauccaaagaauguaacauuaauauaagcacaaccaacuaccccugcaagguuucgacuggcaggcacccuaucucuaugguggcacuguccccauugggggcccuagucgcuugcuauaaaggagugucauguaguauugguagcaaucgggucggcaucauaaagcagcugaacaaggggugcuccuacauuacaaaucaggaugccgacaccgugacgaucgauaacaccguuuaucagcucucuaaaguggagggagaacaacauguaaucaagggccguccggucagcucaaguuucgaccccauuaaauuuccugaggaucaguucaauguggcacuggaccagguuuucgagaacaucgaaaauucccaagcccuuguggaucagagcaaccgcauucugucuucagcugagaaggguaauacaggguuuauaaucgucauuaucuugaucgccgugcucggcaguagcaugauucugguauccauauucaucauuaucaaaaagacuaagaaaccaaccggagcacccccugaauuaucuggcgugacaaacaauggguuuauuccacacaacugaggacuagucccuguucccagagcccacuuuuuuuucuuuuuuugaaauaaaauagccugucuuucagaucucaaaggcucuuuucagagccaccaaaaaaaaaaaaaaaaaaaaaaaaaaaaaaaaaaaaaaaaaaaaaaaaaaaaaaaaaaaaaaaaaaaaaaaaaaaaaaaaaaaaaaaaaaaaaaaaaaaaa

SEQ ID NO: 14724 - RNA, 1892 nt, Artificial Sequence
  HMPV/TN/92-4__ABM67072.1 fusion glycoprotein mRNA human (variant)
aggagagucccgcagucggcguccagcggcucugcuuguucgugugugugucguugcaggccuuauucaagcuuaccaugagcuggaagguggucaucauuuucucccugcucauaacaccccagcacggccuuaaagagucuuaccuggaagagucaugcaguaccaucacugaaggguauuugagcguuuuaagaacgggaugguacaccaacguguuuacacuggagguaggugacguggaaaaucuaacuuguuccgauggcccuucucucauuaagaccgagcuggaccuuacaaaaucggcccugagggaguugaagaccgucucagcugaucaacucgcacgggaggaacagaucgaaaacccagggagcggaaguuucgugcugggcgccauugcgcuggguguugcugccgcagccgcugugacugcaggggucgccaucugcaaaacaauacgccucgaguccgaggugaccgcuaucaauaacgccuuaaagaagacgaaugaagcgguaucuacucugggaaacggcguucgagugcuugcaaccgccguccgugaguugaaagacuuugugagcaagaaucugacaagagcuauuaacaaaaauaagugugauaucgacgaucuaaaaauggccguguccuucucacaguuuaacaggcgguuccucaaugucguucgccaguuuagugacaacgcaggcauuacuccggcuaucagccuggaucuuaugaccgacgccgaacuggcgagagccgugcccaauaugccuacaucugcagggcaaauaaaguugaugcucgagaacagggcuaugguacggcgcaagggauucgguauucugugcggcguguauggguccucagucaucuacauggugcaguuaccaauuuuuggaguuaucgauacccccuguuggaucgugaaagccgcuccuagcugcagugaaaagaaaggcaauuaugccugucugcuccgagaggaccaggguugguacugccagaacgcagggucuacggucuauuacccaaacgagaaggauugugaaacuagaggagaccauguguucugcgacacagccgcuggcauuaauguagcggagcaauccaaagaauguaacauaaauaucagcaccacuaacuaccccugcaagguuucgacaggcaggcacccuauuucuaugguggcacuuuccccacugggggccuuggucgcuugcuauaaaggagugucauguaguaucgguagcaaucgggucggcauaauuaagcagcuaaacaaggggugcuccuacaucaccaaucaggaugccgacacggugaccaucgauaacacaguuuaucagcugucuaaaguggagggagaacaacauguaauuaagggccguccggucagcucaaguuuugaccccaucaaauucccugagcaccaguggcauguggcacucgaucagguuuuugagaauauugaaaacucccaagcccugguggaccagagcaaucgcauacuuucuucagcugagaaggguaacacuggguucaucauugucaucauccugauugccguguugggcaguagcaugauacucguauccaucuucauuaucauuaaaaagaccaagaaaccaacaggagcacccccugaacugucuggcgugacuaauaacggguuuaucccacacaauugaggacuagucccuguucccagagcccacuuuuuuuucuuuuuuugaaauaaaauagccugucuuucagaucucaaaggcucuuuucagagccaccaaaaaaaaaaaaaaaaaaaaaaaaaaaaaaaaaaaaaaaaaaaaaaaaaaaaaaaaaaaaaaaaaaaaaaaaaaaaaaaaaaaaaaaaaaaaaaaaaaaaa

SEQ ID NO: 14725 - RNA, 1892 nt, Artificial Sequence
  HMPV/TN/92-4__ABM67072.1 fusion glycoprotein mRNA human (variant)
aggagagucccgcagucggcguccagcggcucugcuuguucgugugugugucguugcaggccuuauucaagcuuaccaugagcuggaagguggucaucauuuucucccugcucauaacaccccagcacggccuuaaagagucuuaccuggaagagucaugcaguaccaucacugaaggguauuugagcguuuuaagaacgggaugguacaccaacguguuuacacuggagguaggugacguggaaaaucuaacuuguuccgauggcccuucucucauuaagaccgagcuggaccuucugaaaucggccuugagggagcucaagacagucucagcugaucaacuggcacgggaggaacagaucgaaaacccagggagcggaaguuucgugcugggcgccauugcgcucgguguugcugccgcagccgcugugaccgcaggggucgccaucgcuaaaacuauacgcuuagaguccgaggugacagccaucaauaacgcgcugaagaagaccaaugaagcaguaucuacgcuuggaaacggcguucgaguguuggccacugcuguccgugagcugaaagacuuugugagcaagaaucuaaccagagccauuaacaaaaauaagugcgauaucccggaccucaaaauggcaguguccuucucacaguuuaacaggcgguuccugaaugucguucgccaguuuagugauaacgcuggcauuacacccgccaucagccuugaccugaugacugaugcggaauuggccagagcagugccuaauaugccaaccucugcugggcaaauaaagcucaugcuggagaacagggccaugguacggcgcaagggauucgguauuuuaaucggcguguauggguccucagucauuuacauggugcagcugcccaucuuuggaguuaucgacacaccuuguuggauugugaaagcugccccaagcugcagugaaaagaaaggcaauuaugcaugucuccuucgagaggaucaggguugguacugccagaacgccgggucuaccgucuauuaccccaacgagaaggacugugaaacgagaggagaucauguguucugcgacacugcugcgggcauaaauguagcagagcaauccaaagaauguaacaucaauauuagcacaaccaacuacccuugcaagguuucgacuggcaggcacccaaucucuaugguggcccuguccccguugggggcucuagucgccuguuauaaaggagugucaugcaguauagguagcaaucgggucggcauuaucaagcagcugaacaaggggugcuccuacaucacaaaucaggacgcagauaccgugacgauugacaacaccguuuaucagcucucuaaaguggagggagaacaacauguaaucaagggccgucccgucagcucaaguuuugauccuauuaaauucccagaggaccaguuucagguggcccuggaucaaguuuucgagaauauagaaaacucccaggcucuuguggaccagagcaaucgcauccugucuucagccgagaaggguaacacaggguucauuaucgucaucauuuugauagcagugcucggcaguagcaugauccugguauccauuuuuaucauuaucaaaaagacuaagaaacccaccggagcgccuccagaauuaucuggcgugacaaauaacggguucauaccccacaauugaggacuagucccuguucccagagcccacuuuuuuuucuuuuuuugaaauaaaauagccugucuuucagaucucaaaggcucuuuucagagccaccaaaaaaaaaaaaaaaaaaaaaaaaaaaaaaaaaaaaaaaaaaaaaaaaaaaaaaaaaaaaaaaaaaaaaaaaaaaaaaaaaaaaaaaaaaaaaaaaaaaaa

SEQ ID NO: 14726 - RNA, 1892 nt, Artificial Sequence
  HMPV/TN/92-4__ABM67072.1 fusion glycoprotein mRNA human (variant)
aggagagucccgcagucggcguccagcggcucugcuuguucgugugugugucguugcaggccuuauucaagcuuaccaugagcuggaagguggucaucauuuucucccugcucauaacaccccagcacggccuuaaagagucuuaccuggaagagucaugcaguaccaucacugaaggguauuugagcguuuuaagaacgggaugguacaccaacguguuuacacuggagguaggugacguggaaaaucuaacuuguuccgauggcccuucucucauuaagaccgagcuggaccuucugaaaucggccuugagggagcucaagacagucucagcugaucaacuggcacgggaggaacagaucgaaaacccagggagcggaaguuucgugcugggcgccauugcgcucgguguugcugccgcagccgcugugaccgcaggggucgccaucgcuaaaacuauacgcuuagaguccgaggugacagccaucaauaacgcgcugaagaagaccaaugaagcaguaucuacgcuuggaaacggcguucgaguguuggccacugcuguccgugagcugaaagacuuugugagcaagaaucuaaccagagccauuaacaaaaauaagugcgauaucccggaccucaaaauggcaguguccuucucacaguuuaacaggcgguuccugaaugucguucgccaguuuagugauaacgcuggcauuacacccgccaucagccuugaccugaugacugaugcggaauuggccagagcagugccuaauaugccaaccucugcugggcaaauaaagcucaugcuggagaacagggccaugguacggcgcaagggauucgguauuuuaaucggcguguauggguccucagucauuuacauggugcagcugcccaucuuuggaguuaucgacacaccuuguuggauugugaaagcugccccaagcugcagugaaaagaaaggcaauuaugcaugucuccuucgagaggaucaggguugguacugccagaacgccgggucuaccgucuauuaccccaacgagaaggacugugaaacgagaggagaucauguguucugcgacacugcugcgggcauaaauguagcagagcaauccaaagaauguaacaucaauauuagcacaaccaacuacccuugcaagguuucgacuggcaggcacccaaucucuaugguggcccuguccccguugggggcucuagucgccuguuauaaaggagugucaugcaguauagguagcaaucgggucggcauuaucaagcagcugaacaaggggugcuccuacaucacaaaucaggacgcagauaccgugacgauugacaacaccguuuaucagcucucuaaaguggagggagaacaacauguaaucaagggccgucccgucagcucaaguuuugauccuauuaaauucccagagaaucaguuucagguggcccuggaccaaguuuucgagaacauagaaaauucccaggcucuuguggaucagagcaaccgcauccugucuucagccgagaaggguaauacaggguucauuaucgucaucauuuugauagcagugcucggcaguagcaugauccugguauccauuuuuaucauuaucaaaaagacuaagaaacccaccggagcgccuccagaauuaucuggcgugacaaacaauggguucauaccccacaacugaggacuagucccuguucccagagcccacuuuuuuuucuuuuuuugaaauaaaauagccugucuuucagaucucaaaggcucuuuucagagccaccaaaaaaaaaaaaaaaaaaaaaaaaaaaaaaaaaaaaaaaaaaaaaaaaaaaaaaaaaaaaaaaaaaaaaaaaaaaaaaaaaaaaaaaaaaaaaaaaaaaaa

SEQ ID NO: 14727 - RNA, 1892 nt, Artificial Sequence
  HMPV/TN/92-4__ABM67072.1 fusion glycoprotein mRNA human (variant)
aggagagucccgcagucggcguccagcggcucugcuuguucgugugugugucguugcaggccuuauucaagcuuaccaugagcuggaagguggucaucauuuucucccugcucauaacaccccagcacggccuuaaagagucuuaccuggaagagucaugcaguaccaucacugaaggguauuugagcguuuuaagaacgggaugguacaccaacguguuuacacuggagguaggugacguggaaaaucuaacuuguuccgauggcccuucucucauuaagaccgagcuggaccuucugaaaucggccuugagggagcucaagacagucucagcugaucaacuggcacgggaggaacagaucgaaaacccagggagcggaaguuucgugcugggcgccauugcgcucgguguugcugccgcagccgcugugaccgcaggggucgccaucgcuaaaacuauacgcuuagaguccgaggugacagccaucaauaacgcgcugaagaagaccaaugaagcaguaucuacgcuuggaaacggcguucgaguguuggccacugcuguccgugagcugaaagacuuugugcuaaagaaucucaccagagccauuaacaaaaauaagugcgauaucccggaccugaaaauggcagugagcuucucccaguuuaacaggcgguuccuuaaugucguucgccaguuuucagauaacgcuggcauuacacccgccaucagucuggacuugaugacugaugcggaacucgccagagcagugccuaauaugccaaccagcgcugggcaaauaaagcugauguuagagaacagggccaugguacggcgcaagggauucgguauucugaucggcguguaugggucuuccgucauuuacauggugcagcuccccaucuuuggaguuaucgacacaccuuguuggauugugaaagcugccccaucaugcagcgaaaagaaaggcaauuaugcaugucuucugcgagaggaucaggguugguacugccagaacgccgggaguaccgucuauuaccccaacgagaaggacugugaaacgagaggagaucauguguucugcgacacugcugcgggcauaaauguagcagagcaaucuaaagaauguaacaucaauauuuccacaaccaacuacccuugcaagguuagcacuggcaggcacccaaucucgaugguggccuugucuccgcuaggggcucuggucgccuguuauaaaggaguguccugcucaauagguaguaaucgggucggcauuaucaagcagcucaacaaggggugcagcuacaucacaaaucaggacgcagauaccgugacgauugacaacaccguuuaucagcuguccaaaguggagggagaacaacauguaaucaagggccgucccgucucuagcucauuugauccuauuaaauucccagaggaccaguuucagguggcccuugaucaaguuuucgagaauauagaaaacagucaggcucugguggaccaguccaaucgcaucuugagcucugccgagaaggguaacacaggguucauuaucgucaucauucucauagcagugcugggcucaaguaugaucuuaguaagcauuuuuaucauuaucaaaaagacuaagaaacccaccggagcgccuccagaacuguccggcgugacaaauaacggguucauaccccacaauugaggacuagucccuguucccagagcccacuuuuuuuucuuuuuuugaaauaaaauagccugucuuucagaucucaaaggcucuuuucagagccaccaaaaaaaaaaaaaaaaaaaaaaaaaaaaaaaaaaaaaaaaaaaaaaaaaaaaaaaaaaaaaaaaaaaaaaaaaaaaaaaaaaaaaaaaaaaaaaaaaaaaa

SEQ ID NO: 14728 - RNA, 1892 nt, Artificial Sequence
  HMPV/TN/92-4__ABM67072.1 fusion glycoprotein mRNA human (variant)
aggagagucccgcagucggcguccagcggcucugcuuguucgugugugugucguugcaggccuuauucaagcuuaccaugagcuggaagguggucaucauuuucucccugcucauaacaccccagcacggccuuaaagagucuuaccuggaagagucaugcaguaccaucacugaaggguauuugagcguuuuaagaacgggaugguacaccaacguguuuacacuggagguaggugacguggaaaaucuaacuuguuccgauggcccuucucucauuaagaccgagcuggaccuucugaaaucggccuugagggagcucaagacagucucagcugaucaacuggcacgggaggaacagaucgaaaacccagggagcggaaguuucgugcugggcgccauugcgcucgguguugcugccgcagccgcugugaccgcaggggucgccaucgcuaaaacuauacgcuuagaguccgaggugacagccaucaauaacgcgcugaagaagaccaaugaagcaguaucuacgcuuggaaacggcguucgaguguuggccacugcuguccgugagcugaaagacuuugugcuaaagaaucucaccagagccauuaacaaaaauaagugcgauaucccggaccugaaaauggcagugagcuucucccaguuuaacaggcgguuccuuaaugucguucgccaguuuucagauaacgcuggcauuacacccgccaucagucuggacuugaugacugaugcggaacucgccagagcagugccuaauaugccaaccagcgcugggcaaauaaagcugauguuagagaacagggccaugguacggcgcaagggauucgguauucugaucggcguguaugggucuuccgucauuuacauggugcagcuccccaucuuuggaguuaucgacacaccuuguuggauugugaaagcugccccaucaugcagcgaaaagaaaggcaauuaugcaugucuucugcgagaggaucaggguugguacugccagaacgccgggaguaccgucuauuaccccaacgagaaggacugugaaacgagaggagaucauguguucugcgacacugcugcgggcauaaauguagcagagcaaucuaaagaauguaacaucaauauuuccacaaccaacuacccuugcaagguuagcacuggcaggcacccaaucucgaugguggccuugucuccgcuaggggcucuggucgccuguuauaaaggaguguccugcucaauagguaguaaucgggucggcauuaucaagcagcucaacaaggggugcagcuacaucacaaaucaggacgcagauaccgugacgauugacaacaccguuuaucagcuguccaaaguggagggagaacaacauguaaucaagggccgucccgucucuagcucauuugauccuauuaaauucccagagaaucaguuucagguggcccuugaccaaguuuucgagaacauagaaaauagucaggcucugguggaucaguccaaccgcaucuugagcucugccgagaaggguaauacaggguucauuaucgucaucauucucauagcagugcugggcucaaguaugaucuuaguaagcauuuuuaucauuaucaaaaagacuaagaaacccaccggagcgccuccagaacuguccggcgugacaaacaauggguucauaccccacaacugaggacuagucccuguucccagagcccacuuuuuuuucuuuuuuugaaauaaaauagccugucuuucagaucucaaaggcucuuuucagagccaccaaaaaaaaaaaaaaaaaaaaaaaaaaaaaaaaaaaaaaaaaaaaaaaaaaaaaaaaaaaaaaaaaaaaaaaaaaaaaaaaaaaaaaaaaaaaaaaaaaaaa

SEQ ID NO: 14729 - RNA, 1892 nt, Artificial Sequence
  HMPV/TN/92-4__ABM67072.1 fusion glycoprotein mRNA human (variant)
aggagagucccgcagucggcguccagcggcucugcuuguucgugugugugucguugcaggccuuauucaagcuuaccaugagcuggaagguggucaucauuuucucccugcucauaacaccccagcacggccuuaaagagucuuaccuggaagagucaugcaguaccaucacugaaggguauuugagcguuuuaagaacgggaugguacaccaacguguuuacacugccuguaggugacguggagaaucuaacuuguuccgauggcccaucucucauuaagaccgaacuggaccuucugaaaucggccuugagggagcucaagacagucucagcugaucaacuggcacgggaggaacagaucgagaacccggggagcggaaguuucgugcugggcgccauugcgcucgguguugcugccgcagccgcugugaccgcaggggucgccaucgcuaaaacuauacgcuuagaauccgaggugacagccaucaauaacgcgcugaagaagaccaaugaggcaguaucuacgcuuggaaacggcguucgaguguuggccacugcuguccgugaacugaaagacuuugugagcaagaaucuaaccagagccauuaacaaaaauaagugcgauaucgacgaucucaaaauggcaguguccuucucacaguuuaacaggcgguuccugaaugucguucgccaguuuagugacaacgcuggcauuacacccgccaucagccuugaucugaugacugacgcggaguuggccagagcagugccuaauaugccaaccucugcugggcaaauaaagcucaugcuggaaaacagggccaugguacggcgcaagggauucgguauuuuaaucggcguguauggguccucagucauuuacauggugcagcugcccaucuuuggaguuaucgauacaccuuguuggauugugaaagcugccccaagcugcagugagaagaaaggcaauuaugcaugucuccuucgagaagaccaggguugguacugccagaacgccgggucuaccgucuauuaccccaacgagaaggauugugagacgagaggagaccauguguucugcgacacugcugcgggcauaaauguagcagaacaauccaaagaguguaacaucaauauuagcacaaccaacuacccuugcaagguuucgacuggcaggcacccaaucucuaugguggcccuguccccguugggggcucuagucgccuguuauaaaggagugucaugcaguauagguagcaaucgggucggcauuaucaagcagcugaacaaggggugcuccuacaucacaaaucaggaugcagacaccgugacgauugauaacaccguuuaucagcucucuaaaguggaaggagagcaacauguaaucaagggccgucccgucagcucaaguuuugacccuauuaaauucccagaagaucaguuucagguggcccuggaccaaguuuucgagaauauagagaacucccaggcucuuguggaucagagcaaucgcauccugucuucagccgaaaaggguaacacaggguucauuaucgucaucauuuugauagcagugcucggcaguagcaugauccugguauccauuuuuaucauuaucaaaaagacuaagaaacccaccggagcgccuccagaguuaucuggcgugacaaauaacggguucauaccccacaauugaggacuagucccuguucccagagcccacuuuuuuuucuuuuuuugaaauaaaauagccugucuuucagaucucaaaggcucuuuucagagccaccaaaaaaaaaaaaaaaaaaaaaaaaaaaaaaaaaaaaaaaaaaaaaaaaaaaaaaaaaaaaaaaaaaaaaaaaaaaaaaaaaaaaaaaaaaaaaaaaaaaaa

SEQ ID NO: 14730 - RNA, 1892 nt, Artificial Sequence
  HMPV/TN/92-4__ABM67072.1 fusion glycoprotein mRNA human (variant)
aggagagucccgcagucggcguccagcggcucugcuuguucgugugugugucguugcaggccuuauucaagcuuaccaugagcuggaagguggucaucauuuucucccugcucauaacaccccagcacggccuuaaagagucuuaccuggaagagucaugcaguaccaucacugaaggguauuugagcguuuuaagaacgggaugguacaccaacguguuuacacugccuguaggugacguggagaaucuaacuuguuccgauggcccaucucucauuaagaccgaacuggaccuucugaaaucggccuugagggagcucaagacagucucagcugaucaacuggcacgggaggaacagaucgagaacccggggagcggaaguuucgugcugggcgccauugcgcucgguguugcugccgcagccgcugugaccgcaggggucgccaucgcuaaaacuauacgcuuagaauccgaggugacagccaucaauaacgcgcugaagaagaccaaugaggcaguaucuacgcuuggaaacggcguucgaguguuggccacugcuguccgugaacugaaagacuuugugagcaagaaucuaaccagagccauuaacaaaaauaagugcgauaucgacgaucucaaaauggcaguguccuucucacaguuuaacaggcgguuccugaaugucguucgccaguuuagugacaacgcuggcauuacacccgccaucagccuugaucugaugacugacgcggaguuggccagagcagugccuaauaugccaaccucugcugggcaaauaaagcucaugcuggaaaacagggccaugguacggcgcaagggauucgguauuuuaaucggcguguauggguccucagucauuuacauggugcagcugcccaucuuuggaguuaucgauacaccuuguuggauugugaaagcugccccaagcugcagugagaagaaaggcaauuaugcaugucuccuucgagaagaccaggguugguacugccagaacgccgggucuaccgucuauuaccccaacgagaaggauugugagacgagaggagaccauguguucugcgacacugcugcgggcauaaauguagcagaacaauccaaagaguguaacaucaauauuagcacaaccaacuacccuugcaagguuucgacuggcaggcacccaaucucuaugguggcccuguccccguugggggcucuagucgccuguuauaaaggagugucaugcaguauagguagcaaucgggucggcauuaucaagcagcugaacaaggggugcuccuacaucacaaaucaggaugcagacaccgugacgauugauaacaccguuuaucagcucucuaaaguggaaggagagcaacauguaaucaagggccgucccgucagcucaaguuuugacccuauuaaauucccagaaaaucaguuucagguggcccuggaucaaguuuucgagaacauagaaaauucccaggcucuuguggaccagagcaaccgcauccugucuucagccgagaaggguaauacaggguucauuaucgucaucauuuugauagcagugcucggcaguagcaugauccugguauccauuuuuaucauuaucaaaaagacuaagaaacccaccggagcgccuccagaguuaucuggcgugacaaacaauggguucauaccccacaacugaggacuagucccuguucccagagcccacuuuuuuuucuuuuuuugaaauaaaauagccugucuuucagaucucaaaggcucuuuucagagccaccaaaaaaaaaaaaaaaaaaaaaaaaaaaaaaaaaaaaaaaaaaaaaaaaaaaaaaaaaaaaaaaaaaaaaaaaaaaaaaaaaaaaaaaaaaaaaaaaaaaaa

SEQ ID NO: 14731 - RNA, 1892 nt, Artificial Sequence
  HMPV/TN/92-4__ABM67072.1 fusion glycoprotein mRNA human (variant)
aggagagucccgcagucggcguccagcggcucugcuuguucgugugugugucguugcaggccuuauucaagcuuaccaugagcuggaagguggucaucauuuucucccugcucauaacaccccagcacggccuuaaagagucuuaccuggaagagucaugcaguaccaucacugaaggguauuugagcguuuuaagaacgggaugguacaccaacguguuuacacuggagguaggugacguggaaaaucuaacuuguuccgauggcccuucucucauuaagaccgagcuggaccuucugaaaucggccuugagggagcucaagacagucucagcugaucaacuggcacgggaggaacagaucgaaaacccagggagcggaaguuucgugcugggcgccauugcgcucgguguugcugccgcagccgcugugaccgcaggggucgccaucgcuaaaacuauacgcuuagaguccgaggugacagccaucaauaacgcgcugaagaagaccaaugaagcaguaucuacgcuuggaaacggcguucgaguguuggccacugcuguccgugagcugaaagacuuugugagcaagaaucuaaccagagccauuaacaaaaauaagugcgauaucgacgaucucaaaauggcaguguccuucucacaguuuaacaggcgguuccugaaugucguucgccaguuuagugacaacgcuggcauuacaccggccaucagccuugaucugaugacugacgcggaauuggccagagcagugcccaauaugccuaccucugcugggcaaauaaagcucaugcuggagaacagggccaugguacggcgcaagggauucgguauuuuaaucggcguguauggguccucagucauuuacauggugcagcugccaaucuuuggaguuaucgauacacccuguuggauugugaaagcugccccuagcugcagugaaaagaaaggcaauuaugcaugucuccuucgagaggaccaggguugguacugccagaacgccgggucuaccgucuauuacccaaacgagaaggauugugaaacgagaggagaccauguguucugcgacacugcugcgggcauaaauguagcagagcaauccaaagaauguaacaucaauauuagcacaaccaacuaccccugcaagguuucgacuggcaggcacccuaucucuaugguggcccuguccccauugggggcucuagucgccuguuauaaaggagugucaugcaguauagguagcaaucgggucggcauuaucaagcagcugaacaaggggugcuccuacaucacaaaucaggaugcagacaccgugacgauugauaacaccguuuaucagcucucuaaaguggagggagaacaacauguaaucaagggccguccggucagcucaaguuuugaccccauuaaauucccugaggaucaguuucagguggcccuggaccaaguuuucgagaauauagaaaacucccaggcucuuguggaucagagcaaucgcauccugucuucagccgagaaggguaacacaggguucauuaucgucaucauuuugauagcagugcucggcaguagcaugauccugguauccauuuuuaucauuaucaaaaagacuaagaaaccaaccggagcgcccccugaauuaucuggcgugacaaauaacggguucauaccacacaauugaggacuagucccuguucccagagcccacuuuuuuuucuuuuuuugaaauaaaauagccugucuuucagaucucaaaggcucuuuucagagccaccaaaaaaaaaaaaaaaaaaaaaaaaaaaaaaaaaaaaaaaaaaaaaaaaaaaaaaaaaaaaaaaaaaaaaaaaaaaaaaaaaaaaaaaaaaaaaaaaaaaaa

SEQ ID NO: 14732 - RNA, 1892 nt, Artificial Sequence
  HMPV/TN/92-4__ABM67072.1 fusion glycoprotein mRNA human (variant)
aggagagucccgcagucggcguccagcggcucugcuuguucgugugugugucguugcaggccuuauucaagcuuaccaugagcuggaagguggucaucauuuucucccugcucauaacaccccagcacggccuuaaagagucuuaccuggaagagucaugcaguaccaucacugaaggguauuugagcguuuuaagaacgggaugguacaccaacguguuuacacuggagguaggugaccuagaaaaucucacuuguuccgauggcccuucucugauuaagaccgagcuugaccugacaaaaucggccuugagggagcucaagaccgugucagcugaucaacuggcacgggaggaacagaucgaaaacccagggagcggaaguuucguccugggcgccauugcgcucgguguggcugccgcagccgcuguuacugcagggguggccaucgcuaaaacaauacgcuuagaguccgaggucaccgccaucaauaacgcgcugaagaagacgaaugaagcagugucuacucuuggaaacggcguacgaguuuuggccaccgcugugcgugagcugaaagacuuugucagcaagaaucuaacaagagccauuaacaaaaauaagugcgauaucgacgaucucaaaauggcaguguccuucucacaguuuaacaggcgguuccugaaugugguccgccaguuuagugacaacgcuggcauuacuccggccaucagccuugaucugaugaccgacgcggaauuggccagagcaguucccaauaugccuacaucugcugggcaaauaaagcucaugcuggagaacagggccauggugcggcgcaagggauucgguauuuuaaucggcguauauggguccucagugauuuacaugguccagcugccaaucuuuggagugaucgauacccccuguuggauuguuaaagcugccccuagcugcagugaaaagaaaggcaauuaugcaugucuccuucgagaggaccaggguugguacugccagaacgccgggucuacgguguauuacccaaacgagaaggauugugaaacuagaggagaccaugucuucugcgacacagcugcgggcauaaauguggcagagcaauccaaagaauguaacaucaauauuagcaccacuaacuaccccugcaagguaucgacaggcaggcacccuaucucuaugguugcccuguccccauugggggcucuaguggccuguuauaaaggagucucaugcaguauagguagcaaucgggugggcauuaucaagcagcugaacaaggggugcuccuacaucaccaaucaggaugcagacacggucaccauugauaacacaguguaucagcucucuaaaguugagggagaacaacaugugaucaagggccguccgguaagcucaaguuuugaccccauuaaauucccugaggaucaguuucaggucgcccuggaccaaguguucgagaauauagaaaacucccaggcucuuguugaucagagcaaucgcauccugucuucagccgagaaggguaacacuggguucauuaucgugaucauuuugauagcaguccucggcaguagcaugauccugguguccauuuuuaucauuaucaaaaagaccaagaaaccaacaggagcgcccccugaauuaucuggcguaacuaauaacggguucauaccacacaauugaggacuagucccuguucccagagcccacuuuuuuuucuuuuuuugaaauaaaauagccugucuuucagaucucaaaggcucuuuucagagccaccaaaaaaaaaaaaaaaaaaaaaaaaaaaaaaaaaaaaaaaaaaaaaaaaaaaaaaaaaaaaaaaaaaaaaaaaaaaaaaaaaaaaaaaaaaaaaaaaaaaaa

SEQ ID NO: 14733 - RNA, 1892 nt, Artificial Sequence
  HMPV/TN/92-4__ABM67072.1 fusion glycoprotein mRNA human (variant)
aggagagucccgcagucggcguccagcggcucugcuuguucgugugugugucguugcaggccuuauucaagcuuaccaugagcuggaagguggucaucauuuucucccugcucauaacaccccagcacggccuuaaagagucuuaccuggaagagucaugcaguaccaucacugaaggguauuugagcguuuuaagaacgggaugguacaccaacguguuuacacuggagguaggugacguggaaaaucuaacuuguuccgauggcccuucucucauuaagaccgagcuggaccuuacaaaaucggcccugagggaguugaagaccgucucagcugaucaacucgcacgggaggaacagaucgaaaacccagggagcggaaguuucgugcugggcgccauugcgcuggguguugcugccgcagccgcugugacugcaggggucgccaucgcuaaaacaauacgccucgaguccgaggugaccgccaucaauaacgcguuaaagaagacgaaugaagcaguaucuacucugggaaacggcguucgagugcuugccaccgcuguccgugaguugaaagacuuugugcugaagaaucuaacaagagccauuaacaaaaauaagugcgauaucgacgaucucaaaauggcagugagcuucucccaguuuaacaggcgguuccugaaugucguucgccaguuuucagacaacgcuggcauuacuccggccaucagucuugaucugaugaccgacgcggaauuggccagagcagugcccaauaugccuacaagcgcugggcaaauaaagcucaugcuggagaacagggccaugguacggcgcaagggauucgguauuuuaaucggcguguaugggucuuccgucauuuacauggugcagcugccaaucuuuggaguuaucgauacccccuguuggauugugaaagcugccccuucaugcagcgaaaagaaaggcaauuaugcaugucuccuucgagaggaccaggguugguacugccagaacgccgggaguacggucuauuacccaaacgagaaggauugugaaacuagaggagaccauguguucugcgacacagcugcgggcauaaauguagcagagcaaucuaaagaauguaacaucaauauuuccaccacuaacuaccccugcaagguuagcacaggcaggcacccuaucucgaugguggcccugucuccauugggggcucuagucgccuguuauaaaggaguguccugcucaauagguaguaaucgggucggcauuaucaagcagcugaacaaggggugcagcuacaucaccaaucaggaugcagacacggugaccauugauaacacaguuuaucagcucuccaaaguggagggagaacaacauguaaucaagggccguccggucucuagcucauuugaccccauuaaauucccugaggaucaguuucagguggcccuggaccaaguuuucgagaauauagaaaacagucaggcucuuguggaucaguccaaucgcauccugagcucugccgagaaggguaacacuggguucauuaucgucaucauuuugauagcagugcucggcucaaguaugauccugguaagcauuuuuaucauuaucaaaaagaccaagaaaccaacaggagcgcccccugaauuauccggcgugacuaauaacggguucauaccacacaauugaggacuagucccuguucccagagcccacuuuuuuuucuuuuuuugaaauaaaauagccugucuuucagaucucaaaggcucuuuucagagccaccaaaaaaaaaaaaaaaaaaaaaaaaaaaaaaaaaaaaaaaaaaaaaaaaaaaaaaaaaaaaaaaaaaaaaaaaaaaaaaaaaaaaaaaaaaaaaaaaaaaaa

SEQ ID NO: 14734 - RNA, 1892 nt, Artificial Sequence
  HMPV/TN/92-4__ABM67072.1 fusion glycoprotein mRNA human (variant)
aggagagucccgcagucggcguccagcggcucugcuuguucgugugugugucguugcaggccuuauucaagcuuaccaugagcuggaagguggucaucauuuucucccugcucauaacaccccagcacggccuuaaagagucuuaccuggaagagucaugcaguaccaucacugaaggguauuugagcguuuuaagaacgggaugguacaccaacguguuuacacuggagguaggugacguggaaaaucuaacuuguuccgauggcccuucucucauuaagaccgagcuggaccuuacaaaaucggcccugagggaguugaagaccgucucagcugaucaacucgcacgggaggaacagaucgaaaacccagggagcggaaguuucgugcugggcgccauugcgcuggguguugcugccgcagccgcugugacugcaggggucgccaucgcuaaaacaauacgccucgaguccgaggugaccgccaucaauaacgcguuaaagaagacgaaugaagcaguaucuacucugggaaacggcguucgagugcuugccaccgcuguccgugaguugaaagacuuugugagcaagaaucuguggagagccauuaacaaaaauaagugcgauaucgacgaucuaaaaauggcaguguccuucucacaguuuaacaggcgguuccucaaugucguucgccaguuuagugacaacgcuggcauuacaccggccaucagccuggaucuuaugacugacgcggaacuggccagagcagugcccaauaugccuaccucugcugggcaaauaaaguugaugcucgagaacagggccaugguacggcgcaagggauucgguauucugaucggcguguauggguccucagucauuuacauggugcaguuaccaaucuuuggaguuaucgauacacccuguuggauugugaaagcugccccuagcugcagugaaaagaaaggcaauuaugcaugucugcuccgagaggaccaggguugguacugccagaacgccgggucuaccgucuauuacccaaacgagaaggauugugaaacgagaggagaccauguguucugcgacacugcugcgggcauaaauguagcagagcaauccaaagaauguaacaucaauauuagcacaaccaacuaccccugcaagguuucgacuggcaggcacccuaucucuaugguggcccuuuccccacugggggcuuuggucgccuguuauaaaggagugucaugcaguauagguagcaaucgggucggcauuaucaagcagcuaaacaaggggugcuccuacaucacaaaucaggaugcagacaccgugacgauugauaacaccguuuaucagcugucuaaaguggagggagaacaacauguaaucaagggccguccggucagcucaaguuuugaccccauuaaauucccugaggaucaguuucagguggcccucgaccaaguuuucgagaauauagaaaacucccaggcucugguggaucagagcaaucgcauccuuucuucagccgagaaggguaacacaggguucauuaucgucaucauucugauagcaguguugggcaguagcaugauccucguauccauuuuuaucauuaucaaaaagacuaagaaaccaaccggagcgcccccugaacugucuggcgugacaaauaacggguucauaccacacaauugaggacuagucccuguucccagagcccacuuuuuuuucuuuuuuugaaauaaaauagccugucuuucagaucucaaaggcucuuuucagagccaccaaaaaaaaaaaaaaaaaaaaaaaaaaaaaaaaaaaaaaaaaaaaaaaaaaaaaaaaaaaaaaaaaaaaaaaaaaaaaaaaaaaaaaaaaaaaaaaaaaaaa

SEQ ID NO: 14735 - RNA, 1892 nt, Artificial Sequence
  HMPV/TN/92-4__ABM67072.1 fusion glycoprotein mRNA human (variant)
aggagagucccgcagucggcguccagcggcucugcuuguucgugugugugucguugcaggccuuauucaagcuuaccaugagcuggaagguggucaucauuuucucccugcucauaacaccccagcacggccuuaaagagucuuaccuggaagagucaugcaguaccaucacugaaggguauuugagcguuuuaagaacgggaugguacaccaacguguuuacacuggagguaggugaccuagaaaaucucacuuguuccgauggcccuucucugauuaagaccgagcuugaccuguugaaaucggcccucagggagcugaagacagugucagcugaucaacuggcacgggaggaacagaucgaaaacccagggagcggaaguuucguccucggcgccauugcguuagguguggcugccgcagccgcuguuaccgcagggguggccaucgcuaaaacuauacgccuggaguccgaggucacagccaucaauaacgcgcuuaagaagaccaaugaagcagugucuacguugggaaacggcguacgaguucuggccacugcugugcgugagcuaaaagacuuuguccucaagaaucuguggagagccauuaacaaaaauaagugcgauaucgacgaucuuaaaauggcagugagcuucucccaguuuaacaggcgguuccugaaugugguccgccaguuuucagacaacgcuggcauuaccccggccaucaguuuggaucucaugacagacgcggaacuggccagagcaguucccaauaugccuacuagcgcugggcaaauaaaguuaaugcuggagaacagggccauggugcggcgcaagggauucgguauucucaucggcguauaugggucuuccgugauuuacaugguccagcuuccaaucuuuggagugaucgauacccccuguuggauuguuaaagcugccccuucaugcagcgaaaagaaaggcaauuaugcaugucuguugcgagaggaccaggguugguacugccagaacgccgggaguacaguguauuacccaaacgagaaggauugugaaaccagaggagaccaugucuucugcgacacggcugcgggcauaaauguggcagagcaaucuaaagaauguaacaucaauauuuccacuacaaacuaccccugcaagguaagcaccggcaggcacccuaucucgaugguugcccuaucuccacugggggcucucguggccuguuauaaaggagucuccugcucaauagguaguaaucgggugggcauuaucaagcagcugaacaaggggugcagcuacaucacuaaucaggaugcagacacagucaccauugauaacacgguguaucagcuuuccaaaguugagggagaacaacaugugaucaagggccguccgguaucuagcucauuugaccccauuaaauucccugaggaucaguuucaggucgcccuggaccaaguguucgagaauauagaaaacagucaggcuuugguugaucaguccaaucgcauccucagcucugccgagaaggguaacaccggguucauuaucgugaucauucugauagcagucuuaggcucaaguaugauccuggugagcauuuuuaucauuaucaaaaagacaaagaaaccaacuggagcgcccccugaacuauccggcguaaccaauaacggguucauaccacacaauugaggacuagucccuguucccagagcccacuuuuuuuucuuuuuuugaaauaaaauagccugucuuucagaucucaaaggcucuuuucagagccaccaaaaaaaaaaaaaaaaaaaaaaaaaaaaaaaaaaaaaaaaaaaaaaaaaaaaaaaaaaaaaaaaaaaaaaaaaaaaaaaaaaaaaaaaaaaaaaaaaaaaa

SEQ ID NO: 14736 - RNA, 1892 nt, Artificial Sequence
  HMPV/TN/92-4__ABM67072.1 fusion glycoprotein mRNA human (variant)
aggagagucccgcagucggcguccagcggcucugcuuguucgugugugugucguugcaggccuuauucaagcuuaccaugagcuggaagguggucaucauuuucucccugcucauaacaccccagcacggccuuaaagagucuuaccuggaagagucaugcaguaccaucacugaaggguauuugagcguuuuaagaacgggaugguacaccaacguguuuacacugccuguaggugacguggagaaucuaacuuguuccgauggcccaucucucauuaagaccgaacuggaccuuacaaaaucggcccugagggaguugaagaccgucucagcugaucaacucgcacgggaggaacagaucgagaacccggggagcggaaguuucgugcugggcgccauugcgcuggguguugcugccgcagccgcugugacugcaggggucgccaucgcuaaaacaauacgccucgaauccgaggugaccgccaucaauaacgcguuaaagaagacgaaugaggcaguaucuacucugggaaacggcguucgagugcuugccaccgcuguccgugaauugaaagacuuugugagcaagaaucugacaagagccauuaacaaaaauaagugcgauaucgacgaucuaaaaauggcaguguccuucucacaguuuaacaggcgguuccucaaugucguucgccaguuuagugacaacgcuggcauuacucccgccaucagccuggaucuuaugaccgacgcggagcuggccagagcagugccuaauaugccaacaucugcugggcaaauaaaguugaugcucgaaaacagggccaugguacggcgcaagggauucgguauucugaucggcguguauggguccucagucauuuacauggugcaguuacccaucuuuggaguuaucgauaccccuuguuggauugugaaagcugccccaagcugcagugagaagaaaggcaauuaugcaugucugcuccgagaagaccaggguugguacugccagaacgccgggucuacggucuauuaccccaacgagaaggauugugagacuagaggagaccauguguucugcgacacagcugcgggcauaaauguagcagaacaauccaaagaguguaacaucaauauuagcaccacuaacuacccuugcaagguuucgacaggcaggcacccaaucucuaugguggcccuuuccccgcugggggcuuuggucgccuguuauaaaggagugucaugcaguauagguagcaaucgggucggcauuaucaagcagcuaaacaaggggugcuccuacaucaccaaucaggaugcagacacggugaccauugauaacacaguuuaucagcugucuaaaguggaaggagagcaacauguaaucaagggccgucccgucagcucaaguuuugacccuauuaaauucccagaagaucaguuucagguggcccucgaccaaguuuucgagaauauagagaacucccaggcucugguggaucagagcaaucgcauccuuucuucagccgaaaaggguaacacuggguucauuaucgucaucauucugauagcaguguugggcaguagcaugauccucguauccauuuuuaucauuaucaaaaagaccaagaaacccacaggagcgccuccagagcugucuggcgugacuaauaacggguucauaccccacaauugaggacuagucccuguucccagagcccacuuuuuuuucuuuuuuugaaauaaaauagccugucuuucagaucucaaaggcucuuuucagagccaccaaaaaaaaaaaaaaaaaaaaaaaaaaaaaaaaaaaaaaaaaaaaaaaaaaaaaaaaaaaaaaaaaaaaaaaaaaaaaaaaaaaaaaaaaaaaaaaaaaaaa

SEQ ID NO: 14737 - RNA, 1892 nt, Artificial Sequence
  HMPV/TN/92-4__ABM67072.1 fusion glycoprotein mRNA human (variant)
aggagagucccgcagucggcguccagcggcucugcuuguucgugugugugucguugcaggccuuauucaagcuuaccaugagcuggaagguggucaucauuuucucccugcucauaacaccccagcacggccuuaaagagucuuaccuggaagagucaugcaguaccaucacugaaggguauuugagcguuuuaagaacgggaugguacaccaacguguuuacacuggagguaggugacguggaaaaucuaacuuguuccgauggcccuucucucauuaagaccgagcuggaccuuacaaaaucggcccugagggaguugaagaccgucucagcugaucaacucgcacgggaggaacagaucgaaaacccagggagcggaaguuucgugcugggcgccauugcgcuggguguugcugccgcagccgcugugacugcaggggucgccaucgcuaaaacaauacgccucgaguccgaggugaccgccaucaauaacgcguuaaagaagacgaaugaagcaguaucuacucugggaaacggcguucgagugcuugccaccgcuguccgugaguugaaagacuuugugagcaagaaucugacaagagccauuaacaaaaauaagugcgauaucccggaccuaaaaauggcaguguccuucucacaguuuaacaggcgguuccucaaugucguucgccaguuuagugauaacgcuggcauuacucccgccaucagccuggaccuuaugaccgaugcggaacuggccagagcagugccuaauaugccaacaucugcugggcaaauaaaguugaugcucgagaacagggccaugguacggcgcaagggauucgguauucugaucggcguguauggguccucagucauuuacauggugcaguuacccaucuuuggaguuaucgacaccccuuguuggauugugaaagcugccccaagcugcagugaaaagaaaggcaauuaugcaugucugcuccgagaggaucaggguugguacugccagaacgccgggucuacggucuauuaccccaacgagaaggacugugaaacuagaggagaucauguguucugcgacacagcugcgggcauaaauguagcagagcaauccaaagaauguaacaucaauauuagcaccacuaacuacccuugcaagguuucgacaggcaggcacccaaucucuaugguggcccuuuccccgcugggggcuuuggucgccuguuauaaaggagugucaugcaguauagguagcaaucgggucggcauuaucaagcagcuaaacaaggggugcuccuacaucaccaaucaggacgcagauacggugaccauugacaacacaguuuaucagcugucuaaaguggagggagaacaacauguaaucaagggccgucccgucagcucaaguuuugauccuauuaaauucccagaggaccaguuucagguggcccucgaucaaguuuucgagaauauagaaaacucccaggcucugguggaccagagcaaucgcauccuuucuucagccgagaaggguaacacuggguucauuaucgucaucauucugauagcaguguugggcaguagcaugauccucguauccauuuuuaucauuaucaaaaagaccaagaaacccacaggagcgccuccagaacugucuggcgugacuaauaacggguucauaccccacaauugaggacuagucccuguucccagagcccacuuuuuuuucuuuuuuugaaauaaaauagccugucuuucagaucucaaaggcucuuuucagagccaccaaaaaaaaaaaaaaaaaaaaaaaaaaaaaaaaaaaaaaaaaaaaaaaaaaaaaaaaaaaaaaaaaaaaaaaaaaaaaaaaaaaaaaaaaaaaaaaaaaaaa

SEQ ID NO: 14738 - RNA, 1892 nt, Artificial Sequence
  HMPV/TN/92-4__ABM67072.1 fusion glycoprotein mRNA human (variant)
aggagagucccgcagucggcguccagcggcucugcuuguucgugugugugucguugcaggccuuauucaagcuuaccaugagcuggaagguggucaucauuuucucccugcucauaacaccccagcacggccuuaaagagucuuaccuggaagagucaugcaguaccaucacugaaggguauuugagcguuuuaagaacgggaugguacaccaacguguuuacacuggagguaggugacguggaaaaucuaacuuguuccgauggcccuucucucauuaagaccgagcuggaccuuacaaaaucggcccugagggaguugaagaccgucucagcugaucaacucgcacgggaggaacagaucgaaaacccagggagcggaaguuucgugcugggcgccauugcgcuggguguugcugccgcagccgcugugacugcaggggucgccaucgcuaaaacaauacgccucgaguccgaggugaccgccaucaauaacgcguuaaagaagacgaaugaagcaguaucuacucugggaaacggcguucgagugcuugccaccgcuguccgugaguugaaagacuuugugagcaagaaucugacaagagccauuaacaaaaauaagugcccgaucgaugaccuaaaaauggcaguguccuucucacaguuuaacaggcgguuccucaaugucguucgccaguuuagugauaacgcuggcauuacucccgccaucagccuggaccuuaugaccgaugcggaacuggccagagcagugccuaauaugccaacaucugcugggcaaauaaaguugaugcucgagaacagggccaugguacggcgcaagggauucgguauucugaucggcguguauggguccucagucauuuacauggugcaguuacccaucuuuggaguuaucgacaccccuuguuggauugugaaagcugccccaagcugcagugaaaagaaaggcaauuaugcaugucugcuccgagaggaucaggguugguacugccagaacgccgggucuacggucuauuaccccaacgagaaggacugugaaacuagaggagaucauguguucugcgacacagcugcgggcauaaauguagcagagcaauccaaagaauguaacaucaauauuagcaccacuaacuacccuugcaagguuucgacaggcaggcacccaaucucuaugguggcccuuuccccgcugggggcuuuggucgccuguuauaaaggagugucaugcaguauagguagcaaucgggucggcauuaucaagcagcuaaacaaggggugcuccuacaucaccaaucaggacgcagauacggugaccauugacaacacaguuuaucagcugucuaaaguggagggagaacaacauguaaucaagggccgucccgucagcucaaguuuugauccuauuaaauucccagaggaccaguuucagguggcccucgaucaaguuuucgagaauauagaaaacucccaggcucugguggaccagagcaaucgcauccuuucuucagccgagaaggguaacacuggguucauuaucgucaucauucugauagcaguguugggcaguagcaugauccucguauccauuuuuaucauuaucaaaaagaccaagaaacccacaggagcgccuccagaacugucuggcgugacuaauaacggguucauaccccacaauugaggacuagucccuguucccagagcccacuuuuuuuucuuuuuuugaaauaaaauagccugucuuucagaucucaaaggcucuuuucagagccaccaaaaaaaaaaaaaaaaaaaaaaaaaaaaaaaaaaaaaaaaaaaaaaaaaaaaaaaaaaaaaaaaaaaaaaaaaaaaaaaaaaaaaaaaaaaaaaaaaaaaa

SEQ ID NO: 14739 - RNA, 1892 nt, Artificial Sequence
  HMPV/TN/92-4__ABM67072.1 fusion glycoprotein mRNA human (variant)
aggagagucccgcagucggcguccagcggcucugcuuguucgugugugugucguugcaggccuuauucaagcuuaccaugagcuggaagguggucaucauuuucucccugcucauaacaccccagcacggccuuaaagagucuuaccuggaagagucaugcaguaccaucacugaaggguauuugagcguuuuaagaacgggaugguacaccaacguguuuacacuggagguaggugacguggaaaaucuaacuuguuccgauggcccuucucucauuaagaccgagcuggaccuuacaaaaucggcccugagggaguugaagaccgucucagcugaucaacucgcacgggaggaacagaucgaaaacccagggagcggaaguuucgugcugggcgccauugcgcuggguguugcugccgcagccgcugugacugcaggggucgccaucgcuaaaacaauacgccucccguccgaggugaccgccaucaauaacgcguuaaagaagacgaaugaggcaguaucuacucugggaaacggcguucgagugcuugccaccgcuguccgugaauugaaagacuuugugagcaagaaucugacaagagccauuaacaaaaauaagugcgauaucgacgaucuaaaaauggcaguguccuucucacaguuuaacaggcgguuccucaaugucguucgccaguuuagugacaacgcuggcauuacucccgccaucagccuggaucuuaugaccgacgcggagcuggccagagcagugccuaauaugccaacaucugcugggcaaauaaaguugaugcucgaaaacagggccaugguacggcgcaagggauucgguauucugaucggcguguauggguccucagucauuuacauggugcaguuacccaucuuuggaguuaucgauaccccuuguuggauugugaaagcugccccaagcugcagugagaagaaaggcaauuaugcaugucugcuccgagaagaccaggguugguacugccagaacgccgggucuacggucuauuaccccaacgagaaggauugugagacuagaggagaccauguguucugcgacacagcugcgggcauaaauguagcagaacaauccaaagaguguaacaucaauauuagcaccacuaacuacccuugcaagguuucgacaggcaggcacccaaucucuaugguggcccuuuccccgcugggggcuuuggucgccuguuauaaaggagugucaugcaguauagguagcaaucgggucggcauuaucaagcagcuaaacaaggggugcuccuacaucaccaaucaggaugcagacacggugaccauugauaacacaguuuaucagcugucuaaaguggaaggagagcaacauguaaucaagggccgucccgucagcucaaguuuugacccuauuaaauucccagaagaucaguuucagguggcccucgaccaaguuuucgagaauauagagaacucccaggcucugguggaucagagcaaucgcauccuuucuucagccgaaaaggguaacacuggguucauuaucgucaucauucugauagcaguguugggcaguagcaugauccucguauccauuuuuaucauuaucaaaaagaccaagaaacccacaggagcgccuccagagcugucuggcgugacuaauaacggguucauaccccacaauugaggacuagucccuguucccagagcccacuuuuuuuucuuuuuuugaaauaaaauagccugucuuucagaucucaaaggcucuuuucagagccaccaaaaaaaaaaaaaaaaaaaaaaaaaaaaaaaaaaaaaaaaaaaaaaaaaaaaaaaaaaaaaaaaaaaaaaaaaaaaaaaaaaaaaaaaaaaaaaaaaaaaa

SEQ ID NO: 14740 - RNA, 1892 nt, Artificial Sequence
  HMPV/TN/92-4__ABM67072.1 fusion glycoprotein mRNA human (variant)
aggagagucccgcagucggcguccagcggcucugcuuguucgugugugugucguugcaggccuuauucaagcuuaccaugagcuggaagguggucaucauuuucucccugcucauaacaccccagcacggccuuaaagagucuuaccuggaagagucaugcaguaccaucacugaaggguauuugagcguuuuaagaacgggaugguacaccaacguguuuacacuggagguaggugacguggaaaaucuaacuuguuccgauggcccuucucucauuaagaccgagcuggaccuuacaaaaucggcccugagggaguugaagaccgucucagcugaucaacucgcacgggaggaacagaucgaaaacccagggagcggaaguuucgugcugggcgccauugcgcuggguguugcugccgcagccgcugugacugcaggggucgccaucgcuaaaacaauacgccucgaguccgaggugaccgccaucaauaacgcguuaaagaagacgaaugaagcaguaucuacucugggaaacggcguucgagugcuugccaccgcuguccgugaguugaaagacuuugugagcaagaaucugacaagagccauuaacaaaaauaagugcgauaucgacgaucuaaaaauggcaguguccuucucacaguuuaacaggcgguuccucaaugucguucgccaguuuagugacaacgcuggcauuacuccggccaucagccuggaucuuaugaccgacgcggaacuggccagagcagugcccaauaugccuacaucugcugggcaaauaaaguugaugcucgagaacagggccaugguacggcgcaagggauucgguauucugaucggcguguauggguccucagucauuuacauggugcaguuaccaaucuuuggaguuaucgauacccccuguuggauugugaaagcugccccuagcugcagugaaaagaaaggcaauuaugcaugucugcuccgagaggaccaggguugguacugccagaacgccgggucuacggucuauuacccaaacgagaaggauugugaaacuagaggagaccauguguucugcgacacagcugcgggcauaaauguagcagagcaauccaaagaauguaacaucaauauuagcaccacuaacuaccccugcaagguuucgacaggcaggcacccuaucucuaugguggcccuuuccccacugggggcuuuggucgccuguuauaaaggagugucaugcaguauagguagcaaucgggucggcauuaucaagcagcuaaacaaggggugcuccuacaucaccaaucaggaugcagacacggugaccauugauaacacaguuuaucagcugucuaaaguggagggagaacaacauguaaucaagggccguccggucagcucaaguuuucccccuauuaaauucccagaggaccaguuucagguggcccucgaucaaguuuucgagaauauagaaaacucccaggcucugguggaccagagcaaucgcauccuuucuucagccgagaaggguaacacuggguucauuaucgucaucauucugauagcaguguugggcaguagcaugauccucguauccauuuuuaucauuaucaaaaagaccaagaaacccacaggagcgccuccagaacugucuggcgugacuaauaacggguucauaccccacaauugaggacuagucccuguucccagagcccacuuuuuuuucuuuuuuugaaauaaaauagccugucuuucagaucucaaaggcucuuuucagagccaccaaaaaaaaaaaaaaaaaaaaaaaaaaaaaaaaaaaaaaaaaaaaaaaaaaaaaaaaaaaaaaaaaaaaaaaaaaaaaaaaaaaaaaaaaaaaaaaaaaaaa

SEQ ID NO: 14741 - RNA, 1892 nt, Artificial Sequence
  HMPV/TN/92-4__ABM67072.1 fusion glycoprotein mRNA human (variant)
aggagagucccgcagucggcguccagcggcucugcuuguucgugugugugucguugcaggccuuauucaagcuuaccaugagcuggaagguggucaucauuuucucccugcucauaacaccccagcacggccuuaaagagucuuaccuggaagagucaugcaguaccaucacugaaggguauuugagcguuuuaagaacgggaugguacaccaacguguuuacacuggagguaggugacguggaaaaucuaacuuguuccgauggcccuucucucauuaagaccgagcuggaccuuacaaaaucggcccugagggaguugaagaccgucucagcugaucaacucgcacgggaggaacagaucgaaaacccagggagcggaaguuucgugcugggcgccauugcgcuggguguugcugccgcagccgcugugacugcaggggucgccaucgcuaaaacaauacgccucgaguccgaggugaccgccaucaauaacgcguuaaagaagacgaaugaagcaguaucuacucugggaaacggcguucgagugcuugccaccgcuguccgugaguugaaagacuuugugagcaagaaucugacaagagccauuaacaaaaauaagugcgauaucgacgaucuaaaaauggcaguguccuucucacaguuuaacaggcgguuccucaaugucguucgccaguuuagugacaacgcuggcauuacuccggccaucagccuggaucuuaugaccgacgcggaacuggccagagcagugcccaauaugccuacaucugcugggcaaauaaaguugaugcucgagaacagggccaugguacggcgcaagggauucgguauucugaucggcguguauggguccucagucauuuacauggugcaguuaccaaucuuuggaguuaucgauacccccuguuggauugugaaagcugccccuagcugcagugaaaagaaaggcaauuaugcaugucugcuccgagaggaccaggguugguacugccagaacgccgggucuacggucuauuacccaaacgagaaggauugugaaacuagaggagaccauguguucugcgacacagcugcgggcauaaauguagcagagcaauccaaagaauguaacaucaauauuagcaccacuaacuaccccugcaagguuucgacaggcaggcacccuaucucuaugguggcccuuuccccacugggggcuuuggucgccuguuauaaaggagugucaugcaguauagguagcaaucgggucggcauuaucaagcagcuaaacaaggggugcuccuacaucaccaaucaggaugcagacacggugaccauugauaacacaguuuaucagcugucuaaaguggagggagaacaacauguaaucaagggccguccggucagcucaaguuuugaccccauuaaauucccugagaaucaguuucagguggcccucgaucaaguuuucgagaacauagaaaauucccaggcucugguggaccagagcaaccgcauccuuucuucagccgagaaggguaauacuggguucauuaucgucaucauucugauagcaguguugggcaguagcaugauccucguauccauuuuuaucauuaucaaaaagaccaagaaaccaacaggagcgcccccugaacugucuggcgugacuaacaauggguucauaccacacaacugaggacuagucccuguucccagagcccacuuuuuuuucuuuuuuugaaauaaaauagccugucuuucagaucucaaaggcucuuuucagagccaccaaaaaaaaaaaaaaaaaaaaaaaaaaaaaaaaaaaaaaaaaaaaaaaaaaaaaaaaaaaaaaaaaaaaaaaaaaaaaaaaaaaaaaaaaaaaaaaaaaaaa

SEQ ID NO: 14742 - RNA, 1892 nt, Artificial Sequence
  HMPV/TN/92-4__ABM67072.1 fusion glycoprotein mRNA human (variant)
aggagagucccgcagucggcguccagcggcucugcuuguucgugugugugucguugcaggccuuauucaagcuuaccaugagcuggaagguggucaucauuuucucccugcucauaacaccccagcacggccuuaaagagucuuaccuggaagagucaugcaguaccaucacugaaggguauuugagcguuuuaagaacgggaugguacaccaacguguuuacacuggagguaggugacguggaaaaucuaacuuguuccgauggcccuucucucauuaagaccgagcuggaccuuacaaaaucggcccugagggaguugaagaccgucucagcugaucaacucgcacgggaggaacagaucgaaaacccagggagcggaaguuucgugcugggcgccauugcgcuggguguugcugccgcagccgcugugacugcaggggucgccaucgcuaaaacaauacgccucgaguccgaggugaccgccaucaauaacgcguuaaagaagacgaaugaagcaguaucuacucugggaaacggcguucgagugcuugccaccgcuguccgugaguugaaagacuuugugagcaagaaucugacaagagccauuaacaaaaauaagugcgauaucgacgaucuaaaaauggcaguguccuucucacaguuuaacaggcgguuccucaaugucguucgccaguuuagugacaacgcuggcauuacuccggccaucagccuggaucuuaugaccgacgcggaacuggccagagcagugcccaauaugccuacaucugcugggcaaauaaaguugaugcucgagaacagggccaugguacggcgcaagggauucgguauucugaucggcguguauggguccucagucauuuacauggugcaguuaccaaucuuuggaguuaucgauacccccuguuggauugugaaagcugccccuagcugcagugaaaagaaaggcaauuaugcaugucugcuccgagaggaccaggguugguacugccagaacgccgggucuacggucuauuacccaaacgagaaggauugugaaacuagaggagaccauguguucugcgacacagcugcgggcauaaauguagcagagcaauccaaagaauguaacaucaauauuagcaccacuaacuaccccugcaagguuucgacaggcaggcacccuaucucuaugguggcccuuuccccacugggggcuuuggucgccuguuauaaaggagugucaugcaguauagguagcaaucgggucggcauuaucaagcagcuaaacaaggggugcuccuacaucaccaaucaggaugcagacacggugaccauugauaacacaguuuaucagcugucuaaaguggagggagaacaacauguaaucaagggccguccggucagcucaaguuuugaccccauuaaauucccucaggaucaguuucaaguggcccucgaccagguuuucgagaauauagagaacucccaggcucugguggaucagagcaaucgcauccuuucuucagccgaaaaggguaacacuggguucauuaucgucaucauucugauagcaguguugggcaguagcaugauccucguauccauuuuuaucauuaucaaaaagaccaagaaaccaacaggagcgcccccugagcugucuggcgugacuaauaacggguucauaccacacaauugaggacuagucccuguucccagagcccacuuuuuuuucuuuuuuugaaauaaaauagccugucuuucagaucucaaaggcucuuuucagagccaccaaaaaaaaaaaaaaaaaaaaaaaaaaaaaaaaaaaaaaaaaaaaaaaaaaaaaaaaaaaaaaaaaaaaaaaaaaaaaaaaaaaaaaaaaaaaaaaaaaaaa

SEQ ID NO: 14743 - RNA, 1892 nt, Artificial Sequence
  HMPV/TN/92-4__ABM67072.1 fusion glycoprotein mRNA human (variant)
aggagagucccgcagucggcguccagcggcucugcuuguucgugugugugucguugcaggccuuauucaagcuuaccaugagcuggaagguggucaucauuuucucccugcucauaacaccccagcacggccuuaaagagucuuaccuggaagagucaugcaguaccaucacugaaggguauuugagcguuuuaagaacgggaugguacaccaacguguuuacacuggagguaggugacguggaaaaucuaacuuguuccgauggcccuucucucauuaagaccgagcuggaccuuacaaaaucggcccugagggaguugaagaccgucucagcugaucaacucgcacgggaggaacagaucgaaaacccagggagcggaaguuucgugcugggcgccauugcgcuggguguugcugccgcagccgcugugacugcaggggucgccaucgcuaaaacaauacgccucgaguccgaggugaccgccaucaauaacgcguuaaagaagacgaaugaagcaguaucuacucugggaaacggcguucgagugcuugccaccgcuguccgugaguugaaagacuuugugagcaagaaucugacaagagccauuaacaaaaauaagugcgauaucgacgaucuaaaaauggcaguguccuucucacaguggaacaggcgguuucucaaugucguucgccaguucagugacaacgcuggcauuacuccggccaucagccuggaucuuaugaccgacgcggaacuggccagagcagugcccaauaugccuacaucugcugggcaaauaaaguugaugcucgagaacagggccaugguacggcgcaagggauuugguauucugaucggcguguauggguccucagucauuuacauggugcaguuaccaaucuucggaguuaucgauacccccuguuggauugugaaagcugccccuagcugcagugaaaagaaaggcaauuaugcaugucugcuccgagaggaccaggguugguacugccagaacgccgggucuacggucuauuacccaaacgagaaggauugugaaacuagaggagaccauguguuuugcgacacagcugcgggcauaaauguagcagagcaauccaaagaauguaacaucaauauuagcaccacuaacuaccccugcaagguuucgacaggcaggcacccuaucucuaugguggcccuuuccccacugggggcuuuggucgccuguuauaaaggagugucaugcaguauagguagcaaucgggucggcauuaucaagcagcuaaacaaggggugcuccuacaucaccaaucaggaugcagacacggugaccauugauaacacaguuuaucagcugucuaaaguggagggagaacaacauguaaucaagggccguccggucagcucaaguuucgaccccauuaaauuuccugaggaucaguuccagguggcccucgaccaaguuuuugagaauauagaaaacucccaggcucugguggaucagagcaaucgcauccuuucuucagccgagaaggguaacacuggguucauuaucgucaucauucugauagcaguguugggcaguagcaugauccucguauccauuuucaucauuaucaaaaagaccaagaaaccaacaggagcgcccccugaacugucuggcgugacuaauaacggguuuauaccacacaauugaggacuagucccuguucccagagcccacuuuuuuuucuuuuuuugaaauaaaauagccugucuuucagaucucaaaggcucuuuucagagccaccaaaaaaaaaaaaaaaaaaaaaaaaaaaaaaaaaaaaaaaaaaaaaaaaaaaaaaaaaaaaaaaaaaaaaaaaaaaaaaaaaaaaaaaaaaaaaaaaaaaaa

SEQ ID NO: 14744 - RNA, 1892 nt, Artificial Sequence
  HMPV/NL/1/99__AAQ90145.1 fusion glycoprotein mRNA human (F0)
aggagagucccgcagucggcguccagcggcucugcuuguucgugugugugucguugcaggccuuauucaagcuuaccaugagcuggaaggugaugaucauuauaucccugcucaucacaccccagcacggccuuaaagagucuuaccuggaagagucaugcaguaccauuacugaaggguauuugagcgucuuaagaacgggaugguacaccaacguuuucacacuggaggugggugacguagaaaaucuaacuuguaccgauggcccuucccucaucaagacagagcuggaccuuaccaaaucugcccugagggaguugaagacugugucggcugaucaacucgcacgggaggaacagauugaaaacccacgccagucacgauuuguccugggggccaucgcgcugggaguggcuacagccgcagccguuaccgcuggcauagcaaucgccaaaacgauucgucucgagagcgaggugaaugcuaucaagggugccuuaaagcagacuaacgaagcggucaguacccuggggaauggagugagaguacuugcaacagccguuagggaguugaaagaauuuguguccaagaaccugacuucugcuauuaaucggaacaaaugcgacaucgccgaucuaaagauggcagucagcuuuucccaauucaaucgcagauuucucaacguggugaggcaguucucagacaaugcuggcauaaccccggccauuagucuggaucuuaugacagacgcggagcuggcccgggcagucagcuauaugcccaccucugcuggccagaucaaauugaugcucgaaaaccgcgccaugguucgaagaaagggguuugggauucugaucgguguguacggcuccucaguaaucuauauggugcaguuaccuauuuucggggucauagauacgccauguuggaucauuaaggcugcccccagcugcagugagaaaaauggaaacuacgcaugucugcucagggaggaccaaggcugguauugcaagaaugccgguucuacuguguacuacccuaacgaaaaagauugugagacacggggagaccauguuuucugcgauaccgcugcgggaaucaacguggcagaacagucccgugaguguaauauaaacauuagcacuacaaauuauccaugcaaggucucgaccggccgccaccccaucucuaugguggcccuuuccccucugggcgcuuugguagccuguuacaaagggguuucaugcaguaucggaagcaacuggguggguauuaucaagcagcuaccaaaaggcugcuccuauauuacgaaucaggacgcagacaccgucacaauagauaacacuguguaccaacugucuaaggucgaaggggagcagcaugugaucaagggaagaccgguuagcucaaguuucgaccccauuaaauuuccugaggaucaguucaauguggcccucgaccaaguauuugaauccaucgagaacagccaggcucuggucgaucagucuaauaagauccuuaacucagccgaaaaaggcaauaccgguuucauuauagugguuauccugguggcagucuuggggcucacaaugauuagugugagcaucauuaucauaaucaagaaaacuaggaagccaaccggcgcgcccccugagcugaacggaguaacaaauggcggguucauuccacacuccugaggacuagucccuguucccagagcccacuuuuuuuucuuuuuuugaaauaaaauagccugucuuucagaucucaaaggcucuuuucagagccaccaaaaaaaaaaaaaaaaaaaaaaaaaaaaaaaaaaaaaaaaaaaaaaaaaaaaaaaaaaaaaaaaaaaaaaaaaaaaaaaaaaaaaaaaaaaaaaaaaaaaa

SEQ ID NO: 14745 - RNA, 1892 nt, Artificial Sequence
  HMPV/Sabana__AEA02280.1 fusion glycoprotein mRNA human (F0)
aggagagucccgcagucggcguccagcggcucugcuuguucgugugugugucguugcaggccuuauucaagcuuaccaugagcuggaaggugaugaucauuauaucccugcucaucacaccccagcacggccuuaaagagucuuaccuggaagagucaugcaguaccauuacugaaggguauuugagcgucuuaagaacgggaugguacaccaacguuuucacacuggaggugggugacguagaaaaucuaacuuguaccgauggcccuucccucaucaagacagagcuggaccuuaccaaaucugcccugagggaguugaagacugugucggcugaucaacucgcacgggaggaacagauugaaaacccacgccagucacgauuuguccugggggccaucgcgcugggaguggcuacagccgcagccguuaccgcuggcauagcaaucgccaaaacgauucgucucgagagcgaggugaaugcuaucaagggugccuuaaagacuaccaacgaagcggucaguacacuggggaauggagugagaguacuugcaacugccguuagggaguugaaagaauuuguguccaagaaccugaccucugcuauuaauaaaaacaagugcgacaucgccgaucuaaaaauggcagucagcuuuucccaguucaaucggcgcuuucucaacguggugagacaauucucagacaaugcuggcauaacaccggccauuagucuggaucuuaugaacgacgcggagcuggccagggcagucagcuauaugcccaccucugcuggccagaucaaguugaugcucgaaaaucgggccaugguucgccgaaagggguuugggauucugaucgguguguacggcuccucaguaaucuauauggugcaguuaccuauuuucggggucauaaacacgccauguuggaucauuaaagcugcccccagcugcagugagaaggauggaaauuacgcaugucugcucagagaggaccagggcugguauugcaaaaacgccgguucuacuguguacuacccuaacgaaaaggauugugagacaaggggagaccauguuuucugcgauaccgcugcgggaaucaauguggcagaacaaucccgggaguguaacauaaauauuagcacuacaaacuauccaugcaaagucucgaccggccgucaccccaucucuaugguggcccuuuccccucugggcgcuuugguagccuguuacaaggggguuucaugcaguacgggaagcaaucagguggguaucauuaaacagcuaccaaagggcugcuccuauaucaccaaccaggacgcagacacagucacuauugauaauaccguguaccaacugucuaaggucgaaggggagcagcaugugauaaaaggacgcccgguuagcucaaguuucgaccccaucagauuuccugaggaucaguucaacguggcccucgaccaaguauuugaauccauugagaauagccaggcucuggucgaucagucuaacaagauccuuaauucagccgaaaaaggcaacacagguuucaucauugugauaauccugauugcaguuuuggggcucacuaugaucagugugagcauuaucauaaucauuaagaaaaccaggaagccaacaggcgcgcccccugagcugaauggagucaccaacggcggguucaucccacacuccugaggacuagucccuguucccagagcccacuuuuuuuucuuuuuuugaaauaaaauagccugucuuucagaucucaaaggcucuuuucagagccaccaaaaaaaaaaaaaaaaaaaaaaaaaaaaaaaaaaaaaaaaaaaaaaaaaaaaaaaaaaaaaaaaaaaaaaaaaaaaaaaaaaaaaaaaaaaaaaaaaaaaa

SEQ ID NO: 14746 - RNA, 1837 nt, Artificial Sequence
  HMPV/TN/92-4__ABM67072.1 fusion glycoprotein mRNA gc (F0)
aggagaaagcuuaccaugagcuggaagguggucaucaucuucucccugcucaucacgccccagcacggccugaaggagagcuaccuggaggaguccugcagcaccaucaccgagggguaccucuccgugcugcgcaccggcugguacaccaacguguucacccuggaggucggggacguggagaaccucacgugcagcgacggcccgucccugaucaagaccgagcuggaccucaccaagagcgcccugcgggagcugaagaccguguccgccgaccagcucgcgcgcgaggagcagaucgagaacccccggcagagccgcuucguccugggggccaucgcccugggcguggccgccgcggccgccgugacggccggcgucgcgaucgccaagaccauccggcucgaguccgaggugaccgccaucaacaacgcccugaagaagaccaacgaggccgugagcacgcuggggaacggcguccgcgugcucgcgaccgccgugcgggagcugaaggacuucgucuccaagaaccugacccgcgccaucaacaagaacaagugcgacaucgacgaccucaagauggccgugagcuucucccaguucaaccggcgcuuccugaacgugguccggcaguucagcgacaacgccgggaucacccccgcgaucucccuggaccucaugacggacgccgagcuggcccgcgccgugcccaacaugccgaccagcgccggccagaucaagcugaugcucgagaaccgggcgauggugcgccggaagggguucggcauccugaucggcgucuacggguccagcgugaucuacauggugcagcugcccaucuucggcgucaucgacacccccugcuggaucgugaaggccgcccccagcugcuccgagaagaaggggaacuacgccugccuccugcgcgaggaccagggcugguacugccagaacgccggcagcaccgucuacuacccgaacgagaaggacugcgagacgcgcggggaccacguguucugcgacaccgcggccggcaucaacguggccgagcaguccaaggagugcaacaucaacaucagcaccaccaacuaccccugcaaggucuccacggggcggcaccccaucagcaugguggcccugagcccccucggcgcgcugguggccugcuacaagggggucuccugcuccaucggcagcaaccgggugggcaucaucaagcagcugaacaaggggugcuccuacaucaccaaccaggacgccgacaccgugaccaucgacaacacggucuaccagcucagcaagguggagggcgagcagcacgugaucaaggggcgcccggucuccagcuccuucgaccccaucaaguuccccgaggaccaguucaacguggcccuggaccagguguucgagaacaucgagaacagccaggcccuggucgaccaguccaaccggauccucagcuccgcggagaagggcaacaccggguucaucaucgugaucauccugaucgccgugcugggcagcagcaugauccucgucuccaucuucaucaucaucaagaagaccaagaagcccaccggcgccccgcccgagcugagcggggugacgaacaacggcuucaucccccacaacugaggacuaguuauaagacugacuagcccgaugggccucccaacgggcccuccuccccuccuugcaccgagauuaauaaaaaaaaaaaaaaaaaaaaaaaaaaaaaaaaaaaaaaaaaaaaaaaaaaaaaaaaaaaaaaaaugcaucccccccccccccccccccccccccccccccaaaggcucuuuucagagccaccagaauu

SEQ ID NO: 14747 - RNA, 1837 nt, Artificial Sequence
  HMPV/TN/92-4__ABM67072.1 fusion glycoprotein mRNA gc (variant)
aggagaaagcuuaccaugagcuggaagguggucaucaucuucucccugcucaucacgccccagcacggccugaaggagagcuaccuggaggaguccugcagcaccaucaccgagggguaccucuccgugcugcgcaccggcugguacaccaacguguucacccuggaggucggggacguggagaaccucacgugcagcgacggcccgucccugaucaagaccgagcuggaccucaccaagagcgcccugcgggagcugaagaccguguccgccgaccagcucgcgcgcgaggagcagaucgagaaccccgggagcggcuccuucguccugggcgccaucgcccuggggguggccgccgcggccgccgugacggccggcgucgcgaucugcaagaccauccggcucgagagcgaggugaccgccaucaacaacgcccugaagaagaccaacgaggccguguccacgcuggggaacggcguccgcgugcucgccuucgcggugcgggagcugaaggacuucgucagcaagaaccugacccgcgcccucaacaagaacaagugcgacaucgacgaccugaagauggccguguccuucagccaguucaaccggcgcuuccugaacgugguccggcaguucuccgacaacgccgggaucacccccgccaucagccucgaccugaugaccgacgcggagcuggcccgcgccgugcccaacaugccgacguccgccggccagaucaagcucaugcuggagaaccgggccauggugcgccggaagggcuucgggauccugugcggcgucuacgggagcagcgugaucuacauggugcagcuccccaucuucggcgucaucgacacccccugcuggaucgugaaggcggcccccuccugcagcgagaagaagggcaacuacgccugccugcugcgcgaggaccaggggugguacugccagaacgccggcuccaccgucuacuacccgaacgagaaggacugcgagacccgcggggaccacguguucugcgacacggccgcgggcaucaacguggccgagcagagcaaggagugcaacaucaacaucuccaccaccaacuaccccugcaaggucagcaccgggcggcaccccaucuccaugguggcccucagcccccugggcgcccugguggcgugcuacaagggcgucuccugcagcaucggguccaaccgggugggcaucaucaagcagcucaacaaggggugcagcuacaucacgaaccaggacgccgacaccgugaccaucgacaacaccgucuaccagcuguccaagguggagggcgagcagcacgugaucaaggggcgcccggucagcuccagcuucgaccccaucaaguuccccgaggaccaguucaacguggcccuggaccagguguucgagaacaucgagaacucccaggcccucgucgaccagagcaaccggauccuguccagcgccgagaagggcaacacgggcuucaucaucgugaucauccugaucgcggugcucgggagcuccaugauccuggucagcaucuucaucaucaucaagaagaccaagaagcccaccggcgccccgcccgagcuguccggggugaccaacaacggcuucaucccccacaacugaggacuaguuauaagacugacuagcccgaugggccucccaacgggcccuccuccccuccuugcaccgagauuaauaaaaaaaaaaaaaaaaaaaaaaaaaaaaaaaaaaaaaaaaaaaaaaaaaaaaaaaaaaaaaaaaugcaucccccccccccccccccccccccccccccccaaaggcucuuuucagagccaccagaauu

SEQ ID NO: 14748 - RNA, 1837 nt, Artificial Sequence
  HMPV/TN/92-4__ABM67072.1 fusion glycoprotein mRNA gc (variant)
aggagaaagcuuaccaugagcuggaagguggucaucaucuucucccugcucaucacgccccagcacggccugaaggagagcuaccuggaggaguccugcagcaccaucaccgagggguaccucuccgugcugcgcaccggcugguacaccaacguguucacccuggaggucggggacguggagaaccucacgugcagcgacggcccgucccugaucaagaccgagcuggaccucaccaagagcgcccugcgggagcugaagaccguguccgccgaccagcucgcgcgcgaggagcagaucgagaaccccgggagcggcuccuucguccugggcgccaucgcccuggggguggccgccgcggccgccgugacggccggcgucgcgaucugcaagaccauccggcucgagagcgaggugaccgccaucaacaacgcccugaagaagaccaacgaggccguguccacgcuggggaacggcguccgcgugcucgccaccgcggugcgggagcugaaggacuucgucagcaagaaccugacccgcgccaucaacaagaacaagugcgacaucgacgaccucaagauggccguguccuucagccaguucaaccggcgcuuccugaacgugguccggcaguucuccgacaacgccgggaucacccccgccaucagccuggaccucaugacggacgcggagcuggcccgcgccgugcccaacaugccgaccuccgccggccagaucaagcugaugcucgagaaccgggccauggugcgccggaagggcuucgggauccugugcggcgucuacgggagcagcgugaucuacauggugcagcugcccaucuucggcgucaucgacacccccugcuggaucgugaaggcggcccccuccugcagcgagaagaagggcaacuacgccugccuccugcgcgaggaccaggggugguacugccagaacgccggcuccaccgucuacuacccgaacgagaaggacugcgagacgcgcggggaccacguguucugcgacaccgccgcgggcaucaacguggccgagcagagcaaggagugcaacaucaacaucuccaccaccaacuaccccugcaaggucagcacggggcggcaccccaucuccaugguggcccugagcccccucggcgcccugguggcgugcuacaagggcgucuccugcagcaucggguccaaccgggugggcaucaucaagcagcugaacaaggggugcagcuacaucaccaaccaggacgccgacaccgugaccaucgacaacacggucuaccagcucuccaagguggagggcgagcagcacgugaucaaggggcgcccggucagcuccagcuucgaccccaucaaguuccccgagcaccaguggcacguggcccuggaccagguguucgagaacaucgagaacucccaggcccuggucgaccagagcaaccggauccucuccagcgccgagaagggcaacaccggcuucaucaucgugaucauccugaucgcggugcuggggagcuccaugauccucgucagcaucuucaucaucaucaagaagaccaagaagcccaccggcgccccgcccgagcuguccggggugacgaacaacggcuucaucccccacaacugaggacuaguuauaagacugacuagcccgaugggccucccaacgggcccuccuccccuccuugcaccgagauuaauaaaaaaaaaaaaaaaaaaaaaaaaaaaaaaaaaaaaaaaaaaaaaaaaaaaaaaaaaaaaaaaaugcaucccccccccccccccccccccccccccccccaaaggcucuuuucagagccaccagaauu

SEQ ID NO: 14749 - RNA, 1837 nt, Artificial Sequence
  HMPV/TN/92-4__ABM67072.1 fusion glycoprotein mRNA gc (variant)
aggagaaagcuuaccaugagcuggaagguggucaucaucuucucccugcucaucacgccccagcacggccugaaggagagcuaccuggaggaguccugcagcaccaucaccgagggguaccucuccgugcugcgcaccggcugguacaccaacguguucacccuggaggucggggacguggagaaccucacgugcagcgacggccccucccugaucaagaccgagcuggaccuccucaagagcgcccugcgggagcugaagaccguguccgccgaccagcuggcgcgcgaggagcagaucgagaaccccgggagcggcuccuucguccugggcgccaucgcccucgggguggccgccgcggccgccgugaccgccggcgucgcgaucgccaagacgauccggcuggagagcgaggugaccgccaucaacaacgcccugaagaagaccaacgaggccguguccacccucgggaacggcguccgcgugcuggcgacggccgugcgggagcugaaggacuucgucagcaagaaccucacccgcgccaucaacaagaacaagugcgacauccccgaccugaagauggccguguccuucagccaguucaaccggcgcuuccugaacgugguccggcaguucuccgacaacgccgggaucacccccgcgaucagccucgaccugaugaccgacgccgagcuggcccgcgccgugccgaacaugcccacguccgccggccagaucaagcucaugcuggagaaccgggcgauggugcgccggaagggcuucgggauccugaucggcgucuacgggagcagcgugaucuacauggugcagcuccccaucuucggcgucaucgacacccccugcuggaucgugaaggccgccccguccugcagcgagaagaagggcaacuacgccugccugcugcgcgaggaccaggggugguacugccagaacgccggcuccaccgucuacuaccccaacgagaaggacugcgagacccgcggggaccacguguucugcgacacggcggccggcaucaacguggccgagcagagcaaggagugcaacaucaacaucuccaccaccaacuaccccugcaaggucagcaccgggcggcaccccaucuccaugguggcccucagcccgcugggcgcgcugguggccugcuacaagggcgucuccugcagcaucggguccaaccgggugggcaucaucaagcagcucaacaaggggugcagcuacaucacgaaccaggacgccgacaccgugaccaucgacaacaccgucuaccagcuguccaagguggagggcgagcagcacgugaucaaggggcgccccgucagcuccagcuucgaccccaucaaguuccccgaggaccaguuccagguggcccuggaccagguguucgagaacaucgagaacucccaggcccucgucgaccagagcaaccggauccuguccagcgcggagaagggcaacacgggcuucaucaucgugaucauccugaucgccgugcucgggagcuccaugauccuggucagcaucuucaucaucaucaagaagaccaagaagccgaccggcgccccgcccgagcuguccggggugaccaacaacggcuucaucccccacaacugaggacuaguuauaagacugacuagcccgaugggccucccaacgggcccuccuccccuccuugcaccgagauuaauaaaaaaaaaaaaaaaaaaaaaaaaaaaaaaaaaaaaaaaaaaaaaaaaaaaaaaaaaaaaaaaaugcaucccccccccccccccccccccccccccccccaaaggcucuuuucagagccaccagaauu

SEQ ID NO: 14750 - RNA, 1837 nt, Artificial Sequence
  HMPV/TN/92-4__ABM67072.1 fusion glycoprotein mRNA gc (variant)
aggagaaagcuuaccaugagcuggaagguggucaucaucuucucccugcucaucacgccccagcacggccugaaggagagcuaccuggaggaguccugcagcaccaucaccgagggguaccucuccgugcugcgcaccggcugguacaccaacguguucacccuggaggucggggacguggagaaccucacgugcagcgacggccccucccugaucaagaccgagcuggaccuccucaagagcgcccugcgggagcugaagaccguguccgccgaccagcuggcgcgcgaggagcagaucgagaaccccgggagcggcuccuucguccugggcgccaucgcccucgggguggccgccgcggccgccgugaccgccggcgucgcgaucgccaagacgauccggcuggagagcgaggugaccgccaucaacaacgcccugaagaagaccaacgaggccguguccacccucgggaacggcguccgcgugcuggcgacggccgugcgggagcugaaggacuucgucagcaagaaccucacccgcgccaucaacaagaacaagugcgacauccccgaccugaagauggccguguccuucagccaguucaaccggcgcuuccugaacgugguccggcaguucuccgacaacgccgggaucacccccgcgaucagccucgaccugaugaccgacgccgagcuggcccgcgccgugccgaacaugcccacguccgccggccagaucaagcucaugcuggagaaccgggcgauggugcgccggaagggcuucgggauccugaucggcgucuacgggagcagcgugaucuacauggugcagcuccccaucuucggcgucaucgacacccccugcuggaucgugaaggccgccccguccugcagcgagaagaagggcaacuacgccugccugcugcgcgaggaccaggggugguacugccagaacgccggcuccaccgucuacuaccccaacgagaaggacugcgagacccgcggggaccacguguucugcgacacggcggccggcaucaacguggccgagcagagcaaggagugcaacaucaacaucuccaccaccaacuaccccugcaaggucagcaccgggcggcaccccaucuccaugguggcccucagcccgcugggcgcgcugguggccugcuacaagggcgucuccugcagcaucggguccaaccgggugggcaucaucaagcagcucaacaaggggugcagcuacaucacgaaccaggacgccgacaccgugaccaucgacaacaccgucuaccagcuguccaagguggagggcgagcagcacgugaucaaggggcgccccgucagcuccagcuucgaccccaucaaguuccccgagaaccaguuccagguggcccuggaccagguguucgagaacaucgagaacucccaggcccucgucgaccagagcaaccggauccuguccagcgcggagaagggcaacacgggcuucaucaucgugaucauccugaucgccgugcucgggagcuccaugauccuggucagcaucuucaucaucaucaagaagaccaagaagccgaccggcgccccgcccgagcuguccggggugaccaacaacggcuucaucccccacaacugaggacuaguuauaagacugacuagcccgaugggccucccaacgggcccuccuccccuccuugcaccgagauuaauaaaaaaaaaaaaaaaaaaaaaaaaaaaaaaaaaaaaaaaaaaaaaaaaaaaaaaaaaaaaaaaaugcaucccccccccccccccccccccccccccccccaaaggcucuuuucagagccaccagaauu

SEQ ID NO: 14751 - RNA, 1837 nt, Artificial Sequence
  HMPV/TN/92-4__ABM67072.1 fusion glycoprotein mRNA gc (variant)
aggagaaagcuuaccaugagcuggaagguggucaucaucuucucccugcucaucacgccccagcacggccugaaggagagcuaccuggaggaguccugcagcaccaucaccgagggguaccucuccgugcugcgcaccggcugguacaccaacguguucacccuggaggucggggacguggagaaccucacgugcagcgacggccccucccugaucaagaccgagcuggaccuccucaagagcgcccugcgggagcugaagaccguguccgccgaccagcuggcgcgcgaggagcagaucgagaaccccgggagcggcuccuucguccugggcgccaucgcccucgggguggccgccgcggccgccgugaccgccggcgucgcgaucgccaagacgauccggcuggagagcgaggugaccgccaucaacaacgcccugaagaagaccaacgaggccguguccacccucgggaacggcguccgcgugcuggcgacggccgugcgggagcugaaggacuucguccucaagaaccugacccgcgccaucaacaagaacaagugcgacauccccgaccugaagauggccgugagcuucucccaguucaaccggcgcuuccucaacgugguccggcaguucagcgacaacgccgggaucacccccgcgaucucccuggaccugaugaccgacgccgagcucgcccgcgccgugccgaacaugcccacgagcgccggccagaucaagcugaugcuggagaaccgggcgauggugcgccggaagggcuucgggauccucaucggcgucuacggguccagcgugaucuacauggugcagcugcccaucuucggcgucaucgacacccccugcuggaucgugaaggccgccccgagcugcuccgagaagaagggcaacuacgccugccugcuccgcgaggaccaggggugguacugccagaacgccggcagcaccgucuacuaccccaacgagaaggacugcgagacccgcggggaccacguguucugcgacacggcggccggcaucaacguggccgagcaguccaaggagugcaacaucaacaucagcaccaccaacuaccccugcaaggucuccaccgggcggcaccccaucagcaugguggcccuguccccgcugggcgcgcucguggccugcuacaagggcgucagcugcuccaucgggagcaaccgggugggcaucaucaagcagcugaacaaggggugcuccuacaucacgaaccaggacgccgacaccgugaccaucgacaacaccgucuaccagcugagcaagguggagggcgagcagcacgugaucaaggggcgccccgucuccagcuccuucgaccccaucaaguuccccgaggaccaguuccagguggcccucgaccagguguucgagaacaucgagaacagccaggcccuggucgaccaguccaaccggauccugagcuccgcggagaagggcaacacgggcuucaucaucgugaucauccucaucgccgugcuggggagcagcaugauccuggucuccaucuucaucaucaucaagaagaccaagaagccgaccggcgccccgcccgagcucagcggggugaccaacaacggcuucaucccccacaacugaggacuaguuauaagacugacuagcccgaugggccucccaacgggcccuccuccccuccuugcaccgagauuaauaaaaaaaaaaaaaaaaaaaaaaaaaaaaaaaaaaaaaaaaaaaaaaaaaaaaaaaaaaaaaaaaugcaucccccccccccccccccccccccccccccccaaaggcucuuuucagagccaccagaauu

SEQ ID NO: 14752 - RNA, 1837 nt, Artificial Sequence
  HMPV/TN/92-4__ABM67072.1 fusion glycoprotein mRNA gc (variant)
aggagaaagcuuaccaugagcuggaagguggucaucaucuucucccugcucaucacgccccagcacggccugaaggagagcuaccuggaggaguccugcagcaccaucaccgagggguaccucuccgugcugcgcaccggcugguacaccaacguguucacccuggaggucggggacguggagaaccucacgugcagcgacggccccucccugaucaagaccgagcuggaccuccucaagagcgcccugcgggagcugaagaccguguccgccgaccagcuggcgcgcgaggagcagaucgagaaccccgggagcggcuccuucguccugggcgccaucgcccucgggguggccgccgcggccgccgugaccgccggcgucgcgaucgccaagacgauccggcuggagagcgaggugaccgccaucaacaacgcccugaagaagaccaacgaggccguguccacccucgggaacggcguccgcgugcuggcgacggccgugcgggagcugaaggacuucguccucaagaaccugacccgcgccaucaacaagaacaagugcgacauccccgaccugaagauggccgugagcuucucccaguucaaccggcgcuuccucaacgugguccggcaguucagcgacaacgccgggaucacccccgcgaucucccuggaccugaugaccgacgccgagcucgcccgcgccgugccgaacaugcccacgagcgccggccagaucaagcugaugcuggagaaccgggcgauggugcgccggaagggcuucgggauccucaucggcgucuacggguccagcgugaucuacauggugcagcugcccaucuucggcgucaucgacacccccugcuggaucgugaaggccgccccgagcugcuccgagaagaagggcaacuacgccugccugcuccgcgaggaccaggggugguacugccagaacgccggcagcaccgucuacuaccccaacgagaaggacugcgagacccgcggggaccacguguucugcgacacggcggccggcaucaacguggccgagcaguccaaggagugcaacaucaacaucagcaccaccaacuaccccugcaaggucuccaccgggcggcaccccaucagcaugguggcccuguccccgcugggcgcgcucguggccugcuacaagggcgucagcugcuccaucgggagcaaccgggugggcaucaucaagcagcugaacaaggggugcuccuacaucacgaaccaggacgccgacaccgugaccaucgacaacaccgucuaccagcugagcaagguggagggcgagcagcacgugaucaaggggcgccccgucuccagcuccuucgaccccaucaaguuccccgagaaccaguuccagguggcccucgaccagguguucgagaacaucgagaacagccaggcccuggucgaccaguccaaccggauccugagcuccgcggagaagggcaacacgggcuucaucaucgugaucauccucaucgccgugcuggggagcagcaugauccuggucuccaucuucaucaucaucaagaagaccaagaagccgaccggcgccccgcccgagcucagcggggugaccaacaacggcuucaucccccacaacugaggacuaguuauaagacugacuagcccgaugggccucccaacgggcccuccuccccuccuugcaccgagauuaauaaaaaaaaaaaaaaaaaaaaaaaaaaaaaaaaaaaaaaaaaaaaaaaaaaaaaaaaaaaaaaaaugcaucccccccccccccccccccccccccccccccaaaggcucuuuucagagccaccagaauu

SEQ ID NO: 14753 - RNA, 1837 nt, Artificial Sequence
  HMPV/TN/92-4__ABM67072.1 fusion glycoprotein mRNA gc (variant)
aggagaaagcuuaccaugagcuggaagguggucaucaucuucucccugcucaucacgccccagcacggccugaaggagagcuaccuggaggaguccugcagcaccaucaccgagggguaccucuccgugcugcgcaccggcugguacaccaacguguucacccugcccgucggggacguggagaaccucacgugcagcgacggccccucccugaucaagaccgagcuggaccuccucaagagcgcccugcgggagcugaagaccguguccgccgaccagcuggcgcgcgaggagcagaucgagaaccccgggagcggcuccuucguccugggcgccaucgcccucgggguggccgccgcggccgccgugaccgccggcgucgcgaucgccaagacgauccggcuggagagcgaggugaccgccaucaacaacgcccugaagaagaccaacgaggccguguccacccucgggaacggcguccgcgugcuggcgacggccgugcgggagcugaaggacuucgucagcaagaaccucacccgcgccaucaacaagaacaagugcgacaucgacgaccugaagauggccguguccuucagccaguucaaccggcgcuuccugaacgugguccggcaguucuccgacaacgccgggaucacccccgcgaucagccucgaccugaugaccgacgccgagcuggcccgcgccgugccgaacaugcccacguccgccggccagaucaagcucaugcuggagaaccgggcgauggugcgccggaagggcuucgggauccugaucggcgucuacgggagcagcgugaucuacauggugcagcuccccaucuucggcgucaucgacacccccugcuggaucgugaaggccgccccguccugcagcgagaagaagggcaacuacgccugccugcugcgcgaggaccaggggugguacugccagaacgccggcuccaccgucuacuaccccaacgagaaggacugcgagacccgcggggaccacguguucugcgacacggcggccggcaucaacguggccgagcagagcaaggagugcaacaucaacaucuccaccaccaacuaccccugcaaggucagcaccgggcggcaccccaucuccaugguggcccucagcccgcugggcgcgcugguggccugcuacaagggcgucuccugcagcaucggguccaaccgggugggcaucaucaagcagcucaacaaggggugcagcuacaucacgaaccaggacgccgacaccgugaccaucgacaacaccgucuaccagcuguccaagguggagggcgagcagcacgugaucaaggggcgccccgucagcuccagcuucgaccccaucaaguuccccgaggaccaguuccagguggcccuggaccagguguucgagaacaucgagaacucccaggcccucgucgaccagagcaaccggauccuguccagcgcggagaagggcaacacgggcuucaucaucgugaucauccugaucgccgugcucgggagcuccaugauccuggucagcaucuucaucaucaucaagaagaccaagaagccgaccggcgccccgcccgagcuguccggggugaccaacaacggcuucaucccccacaacugaggacuaguuauaagacugacuagcccgaugggccucccaacgggcccuccuccccuccuugcaccgagauuaauaaaaaaaaaaaaaaaaaaaaaaaaaaaaaaaaaaaaaaaaaaaaaaaaaaaaaaaaaaaaaaaaugcaucccccccccccccccccccccccccccccccaaaggcucuuuucagagccaccagaauu

SEQ ID NO: 14754 - RNA, 1837 nt, Artificial Sequence
  HMPV/TN/92-4__ABM67072.1 fusion glycoprotein mRNA gc (variant)
aggagaaagcuuaccaugagcuggaagguggucaucaucuucucccugcucaucacgccccagcacggccugaaggagagcuaccuggaggaguccugcagcaccaucaccgagggguaccucuccgugcugcgcaccggcugguacaccaacguguucacccugcccgucggggacguggagaaccucacgugcagcgacggccccucccugaucaagaccgagcuggaccuccucaagagcgcccugcgggagcugaagaccguguccgccgaccagcuggcgcgcgaggagcagaucgagaaccccgggagcggcuccuucguccugggcgccaucgcccucgggguggccgccgcggccgccgugaccgccggcgucgcgaucgccaagacgauccggcuggagagcgaggugaccgccaucaacaacgcccugaagaagaccaacgaggccguguccacccucgggaacggcguccgcgugcuggcgacggccgugcgggagcugaaggacuucgucagcaagaaccucacccgcgccaucaacaagaacaagugcgacaucgacgaccugaagauggccguguccuucagccaguucaaccggcgcuuccugaacgugguccggcaguucuccgacaacgccgggaucacccccgcgaucagccucgaccugaugaccgacgccgagcuggcccgcgccgugccgaacaugcccacguccgccggccagaucaagcucaugcuggagaaccgggcgauggugcgccggaagggcuucgggauccugaucggcgucuacgggagcagcgugaucuacauggugcagcuccccaucuucggcgucaucgacacccccugcuggaucgugaaggccgccccguccugcagcgagaagaagggcaacuacgccugccugcugcgcgaggaccaggggugguacugccagaacgccggcuccaccgucuacuaccccaacgagaaggacugcgagacccgcggggaccacguguucugcgacacggcggccggcaucaacguggccgagcagagcaaggagugcaacaucaacaucuccaccaccaacuaccccugcaaggucagcaccgggcggcaccccaucuccaugguggcccucagcccgcugggcgcgcugguggccugcuacaagggcgucuccugcagcaucggguccaaccgggugggcaucaucaagcagcucaacaaggggugcagcuacaucacgaaccaggacgccgacaccgugaccaucgacaacaccgucuaccagcuguccaagguggagggcgagcagcacgugaucaaggggcgccccgucagcuccagcuucgaccccaucaaguuccccgagaaccaguuccagguggcccuggaccagguguucgagaacaucgagaacucccaggcccucgucgaccagagcaaccggauccuguccagcgcggagaagggcaacacgggcuucaucaucgugaucauccugaucgccgugcucgggagcuccaugauccuggucagcaucuucaucaucaucaagaagaccaagaagccgaccggcgccccgcccgagcuguccggggugaccaacaacggcuucaucccccacaacugaggacuaguuauaagacugacuagcccgaugggccucccaacgggcccuccuccccuccuugcaccgagauuaauaaaaaaaaaaaaaaaaaaaaaaaaaaaaaaaaaaaaaaaaaaaaaaaaaaaaaaaaaaaaaaaaugcaucccccccccccccccccccccccccccccccaaaggcucuuuucagagccaccagaauu

SEQ ID NO: 14755 - RNA, 1837 nt, Artificial Sequence
  HMPV/TN/92-4__ABM67072.1 fusion glycoprotein mRNA gc (variant)
aggagaaagcuuaccaugagcuggaagguggucaucaucuucucccugcucaucacgccccagcacggccugaaggagagcuaccuggaggaguccugcagcaccaucaccgagggguaccucuccgugcugcgcaccggcugguacaccaacguguucacccuggaggucggggacguggagaaccucacgugcagcgacggcccgucccugaucaagaccgagcuggaccuccucaagagcgcccugcgggagcugaagaccguguccgccgaccagcuggcgcgcgaggagcagaucgagaaccccgggagcggcuccuucguccugggcgccaucgcccucgggguggccgccgcggccgccgugaccgccggcgucgcgaucgccaagacgauccggcuggagagcgaggugaccgccaucaacaacgcccugaagaagaccaacgaggccguguccacccucgggaacggcguccgcgugcuggcgacggccgugcgggagcugaaggacuucgucagcaagaaccucacccgcgccaucaacaagaacaagugcgacaucgacgaccugaagauggccguguccuucagccaguucaaccggcgcuuccugaacgugguccggcaguucuccgacaacgccgggaucacccccgcgaucagccucgaccugaugaccgacgccgagcuggcccgcgccgugcccaacaugccgacguccgccggccagaucaagcucaugcuggagaaccgggcgauggugcgccggaagggcuucgggauccugaucggcgucuacgggagcagcgugaucuacauggugcagcuccccaucuucggcgucaucgacacccccugcuggaucgugaaggccgcccccuccugcagcgagaagaagggcaacuacgccugccugcugcgcgaggaccaggggugguacugccagaacgccggcuccaccgucuacuacccgaacgagaaggacugcgagacccgcggggaccacguguucugcgacacggcggccggcaucaacguggccgagcagagcaaggagugcaacaucaacaucuccaccaccaacuaccccugcaaggucagcaccgggcggcaccccaucuccaugguggcccucagcccccugggcgcgcugguggccugcuacaagggcgucuccugcagcaucggguccaaccgggugggcaucaucaagcagcucaacaaggggugcagcuacaucacgaaccaggacgccgacaccgugaccaucgacaacaccgucuaccagcuguccaagguggagggcgagcagcacgugaucaaggggcgcccggucagcuccagcuucgaccccaucaaguuccccgaggaccaguuccagguggcccuggaccagguguucgagaacaucgagaacucccaggcccucgucgaccagagcaaccggauccuguccagcgcggagaagggcaacacgggcuucaucaucgugaucauccugaucgccgugcucgggagcuccaugauccuggucagcaucuucaucaucaucaagaagaccaagaagcccaccggcgccccgcccgagcuguccggggugaccaacaacggcuucaucccccacaacugaggacuaguuauaagacugacuagcccgaugggccucccaacgggcccuccuccccuccuugcaccgagauuaauaaaaaaaaaaaaaaaaaaaaaaaaaaaaaaaaaaaaaaaaaaaaaaaaaaaaaaaaaaaaaaaaugcaucccccccccccccccccccccccccccccccaaaggcucuuuucagagccaccagaauu

SEQ ID NO: 14756 - RNA, 1837 nt, Artificial Sequence
  HMPV/TN/92-4__ABM67072.1 fusion glycoprotein mRNA gc (variant)
aggagaaagcuuaccaugagcuggaagguggucaucaucuucucccugcucaucacgccccagcacggccugaaggagagcuaccuggaggaguccugcagcaccaucaccgagggguaccucuccgugcugcgcaccggcugguacaccaacguguucacccuggaggucggggaccucgagaaccugacgugcagcgacggcccgucccugaucaagaccgagcucgaccugaccaagagcgcccugcgggagcucaagaccguguccgccgaccagcuggcgcgcgaggagcagaucgagaaccccgggagcggcuccuucgugcugggcgccaucgcccucggggucgccgccgcggccgccgugacggccggcguggcgaucgccaagaccauccggcuggagagcgaggucaccgccaucaacaacgcccugaagaagaccaacgaggccguguccacgcucgggaacggcgugcgcguccuggcgaccgccgugcgggagcugaaggacuucgugagcaagaaccucacccgcgccaucaacaagaacaagugcgacaucgacgaccugaagauggccgucuccuucagccaguucaaccggcgcuuccugaacguggugcggcaguucuccgacaacgccgggaucacccccgcgaucagccucgaccugaugacggacgccgagcuggcccgcgccguccccaacaugccgaccuccgccggccagaucaagcucaugcuggagaaccgggcgauggugcgccggaagggcuucgggauccugaucggcguguacgggagcagcgucaucuacauggugcagcuccccaucuucggcgugaucgacacccccugcuggaucgucaaggccgcccccuccugcagcgagaagaagggcaacuacgccugccugcugcgcgaggaccaggggugguacugccagaacgccggcuccaccguguacuacccgaacgagaaggacugcgagacgcgcggggaccacgucuucugcgacaccgcggccggcaucaacguggccgagcagagcaaggagugcaacaucaacaucuccaccaccaacuaccccugcaaggugagcacggggcggcaccccaucuccauggucgcccucagcccccugggcgcgcugguggccugcuacaagggcguguccugcagcaucggguccaaccgggucggcaucaucaagcagcucaacaaggggugcagcuacaucaccaaccaggacgccgacaccgugaccaucgacaacacgguguaccagcuguccaaggucgagggcgagcagcacgugaucaaggggcgcccggugagcuccagcuucgaccccaucaaguuccccgaggaccaguuccaggucgcccuggaccagguguucgagaacaucgagaacucccaggcccucguggaccagagcaaccggauccuguccagcgcggagaagggcaacaccggcuucaucaucgucaucauccugaucgccgugcucgggagcuccaugauccuggugagcaucuucaucaucaucaagaagaccaagaagcccaccggcgccccgcccgagcuguccggggucacgaacaacggcuucaucccccacaacugaggacuaguuauaagacugacuagcccgaugggccucccaacgggcccuccuccccuccuugcaccgagauuaauaaaaaaaaaaaaaaaaaaaaaaaaaaaaaaaaaaaaaaaaaaaaaaaaaaaaaaaaaaaaaaaaugcaucccccccccccccccccccccccccccccccaaaggcucuuuucagagccaccagaauu

SEQ ID NO: 14757 - RNA, 1837 nt, Artificial Sequence
  HMPV/TN/92-4__ABM67072.1 fusion glycoprotein mRNA gc (variant)
aggagaaagcuuaccaugagcuggaagguggucaucaucuucucccugcucaucacgccccagcacggccugaaggagagcuaccuggaggaguccugcagcaccaucaccgagggguaccucuccgugcugcgcaccggcugguacaccaacguguucacccuggaggucggggacguggagaaccucacgugcagcgacggcccgucccugaucaagaccgagcuggaccucaccaagagcgcccugcgggagcugaagaccguguccgccgaccagcucgcgcgcgaggagcagaucgagaaccccgggagcggcuccuucguccugggcgccaucgcccuggggguggccgccgcggccgccgugacggccggcgucgcgaucgccaagaccauccggcucgagagcgaggugaccgccaucaacaacgcccugaagaagaccaacgaggccguguccacgcuggggaacggcguccgcgugcucgcgaccgccgugcgggagcugaaggacuucguccugaagaaccucacccgcgccaucaacaagaacaagugcgacaucgacgaccugaagauggccgugagcuucucccaguucaaccggcgcuuccugaacgugguccggcaguucagcgacaacgccgggaucacccccgcgaucucccucgaccugaugacggacgccgagcuggcccgcgccgugcccaacaugccgaccagcgccggccagaucaagcucaugcuggagaaccgggcgauggugcgccggaagggcuucgggauccugaucggcgucuacggguccagcgugaucuacauggugcagcuccccaucuucggcgucaucgacacccccugcuggaucgugaaggccgcccccagcugcuccgagaagaagggcaacuacgccugccugcugcgcgaggaccaggggugguacugccagaacgccggcagcaccgucuacuacccgaacgagaaggacugcgagacgcgcggggaccacguguucugcgacaccgcggccggcaucaacguggccgagcaguccaaggagugcaacaucaacaucagcaccaccaacuaccccugcaaggucuccacggggcggcaccccaucagcaugguggcccucagcccccugggcgcgcugguggccugcuacaagggcgucuccugcuccaucgggagcaaccgggugggcaucaucaagcagcucaacaaggggugcuccuacaucaccaaccaggacgccgacaccgugaccaucgacaacacggucuaccagcugagcaagguggagggcgagcagcacgugaucaaggggcgcccggucuccagcuccuucgaccccaucaaguuccccgaggaccaguuccagguggcccuggaccagguguucgagaacaucgagaacagccaggcccucgucgaccaguccaaccggauccugagcuccgcggagaagggcaacaccggcuucaucaucgugaucauccugaucgccgugcucgggagcagcaugauccuggucuccaucuucaucaucaucaagaagaccaagaagcccaccggcgccccgcccgagcugagcggggugacgaacaacggcuucaucccccacaacugaggacuaguuauaagacugacuagcccgaugggccucccaacgggcccuccuccccuccuugcaccgagauuaauaaaaaaaaaaaaaaaaaaaaaaaaaaaaaaaaaaaaaaaaaaaaaaaaaaaaaaaaaaaaaaaaugcaucccccccccccccccccccccccccccccccaaaggcucuuuucagagccaccagaauu

SEQ ID NO: 14758 - RNA, 1837 nt, Artificial Sequence
  HMPV/TN/92-4__ABM67072.1 fusion glycoprotein mRNA gc (variant)
aggagaaagcuuaccaugagcuggaagguggucaucaucuucucccugcucaucacgccccagcacggccugaaggagagcuaccuggaggaguccugcagcaccaucaccgagggguaccucuccgugcugcgcaccggcugguacaccaacguguucacccuggaggucggggacguggagaaccucacgugcagcgacggcccgucccugaucaagaccgagcuggaccucaccaagagcgcccugcgggagcugaagaccguguccgccgaccagcucgcgcgcgaggagcagaucgagaaccccgggagcggcuccuucguccugggcgccaucgcccuggggguggccgccgcggccgccgugacggccggcgucgcgaucgccaagaccauccggcucgagagcgaggugaccgccaucaacaacgcccugaagaagaccaacgaggccguguccacgcuggggaacggcguccgcgugcucgcgaccgccgugcgggagcugaaggacuucgucagcaagaaccuguggcgcgccaucaacaagaacaagugcgacaucgacgaccucaagauggccguguccuucagccaguucaaccggcgcuuccugaacgugguccggcaguucuccgacaacgccgggaucacccccgcgaucagccuggaccucaugaccgacgccgagcuggcccgcgccgugcccaacaugccgacguccgccggccagaucaagcugaugcucgagaaccgggcgauggugcgccggaagggcuucgggauccugaucggcgucuacgggagcagcgugaucuacauggugcagcugcccaucuucggcgucaucgacacccccugcuggaucgugaaggccgcccccuccugcagcgagaagaagggcaacuacgccugccuccugcgcgaggaccaggggugguacugccagaacgccggcuccaccgucuacuacccgaacgagaaggacugcgagacccgcggggaccacguguucugcgacacggcggccggcaucaacguggccgagcagagcaaggagugcaacaucaacaucuccaccaccaacuaccccugcaaggucagcaccgggcggcaccccaucuccaugguggcccugagcccccucggcgcgcugguggccugcuacaagggcgucuccugcagcaucggguccaaccgggugggcaucaucaagcagcugaacaaggggugcagcuacaucacgaaccaggacgccgacaccgugaccaucgacaacaccgucuaccagcucuccaagguggagggcgagcagcacgugaucaaggggcgcccggucagcuccagcuucgaccccaucaaguuccccgaggaccaguuccagguggcccuggaccagguguucgagaacaucgagaacucccaggcccuggucgaccagagcaaccggauccucuccagcgcggagaagggcaacacgggcuucaucaucgugaucauccugaucgccgugcuggggagcuccaugauccucgucagcaucuucaucaucaucaagaagaccaagaagcccaccggcgccccgcccgagcuguccggggugaccaacaacggcuucaucccccacaacugaggacuaguuauaagacugacuagcccgaugggccucccaacgggcccuccuccccuccuugcaccgagauuaauaaaaaaaaaaaaaaaaaaaaaaaaaaaaaaaaaaaaaaaaaaaaaaaaaaaaaaaaaaaaaaaaugcaucccccccccccccccccccccccccccccccaaaggcucuuuucagagccaccagaauu

SEQ ID NO: 14759 - RNA, 1837 nt, Artificial Sequence
  HMPV/TN/92-4__ABM67072.1 fusion glycoprotein mRNA gc (variant)
aggagaaagcuuaccaugagcuggaagguggucaucaucuucucccugcucaucacgccccagcacggccugaaggagagcuaccuggaggaguccugcagcaccaucaccgagggguaccucuccgugcugcgcaccggcugguacaccaacguguucacccuggaggucggggaccucgagaaccugacgugcagcgacggcccgucccugaucaagaccgagcucgaccugcugaaguccgcccuccgggagcugaagaccguguccgccgaccagcuggcgcgcgaggagcagaucgagaaccccgggagcggcuccuucgugcucggcgccaucgcccugggggucgccgccgcggccgccgugaccgccggcguggcgaucgccaagacgauccggcuggagagcgaggucaccgccaucaacaacgcccucaagaagaccaacgaggccguguccacccuggggaacggcgugcgcguccuggcgacggccgugcgggagcucaaggacuucgugcugaagaaccuguggcgcgccaucaacaagaacaagugcgacaucgacgaccucaagauggccgucagcuucucccaguucaaccggcgcuuccugaacguggugcggcaguucagcgacaacgccgggaucacccccgcgaucucccuggaccucaugaccgacgccgagcuggcccgcgccguccccaacaugccgaccagcgccggccagaucaagcugaugcucgagaaccgggcgauggugcgccggaagggcuucgggauccugaucggcguguacggguccagcgucaucuacauggugcagcugcccaucuucggcgugaucgacacgcccugcuggaucgucaaggccgcccccagcugcuccgagaagaagggcaacuacgccugccuccugcgcgaggaccaggggugguacugccagaacgccggcagcaccguguacuacccgaacgagaaggacugcgagacccgcggggaccacgucuucugcgacaccgcggccggcaucaacguggccgagcaguccaaggagugcaacaucaacaucagcacgaccaacuaccccugcaagguguccaccgggcggcaccccaucagcauggucgcccugagcccccucggcgcgcugguggccugcuacaagggcgugagcugcuccaucgggagcaaccgggucggcaucaucaagcagcugaacaaggggugcuccuacaucaccaaccaggacgccgacacggugaccaucgacaacaccguguaccagcucagcaaggucgagggcgagcagcacgugaucaaggggcgcccgguguccagcuccuucgaccccaucaaguuccccgaggaccaguuccaggucgcccuggaccagguguucgagaacaucgagaacagccaggcccugguggaccaguccaaccggauccucagcuccgcggagaagggcaacaccggcuucaucaucgucaucauccugaucgccgugcuggggagcagcaugauccucguguccaucuucaucaucaucaagaagacgaagaagcccaccggcgccccgcccgagcugagcggggucaccaacaacggcuucaucccccacaacugaggacuaguuauaagacugacuagcccgaugggccucccaacgggcccuccuccccuccuugcaccgagauuaauaaaaaaaaaaaaaaaaaaaaaaaaaaaaaaaaaaaaaaaaaaaaaaaaaaaaaaaaaaaaaaaaugcaucccccccccccccccccccccccccccccccaaaggcucuuuucagagccaccagaauu

SEQ ID NO: 14760 - RNA, 1837 nt, Artificial Sequence
  HMPV/TN/92-4__ABM67072.1 fusion glycoprotein mRNA gc (variant)
aggagaaagcuuaccaugagcuggaagguggucaucaucuucucccugcucaucacgccccagcacggccugaaggagagcuaccuggaggaguccugcagcaccaucaccgagggguaccucuccgugcugcgcaccggcugguacaccaacguguucacccugcccgucggggacguggagaaccucacgugcagcgacggccccucccugaucaagaccgagcuggaccucaccaagagcgcccugcgggagcugaagaccguguccgccgaccagcucgcgcgcgaggagcagaucgagaaccccgggagcggcuccuucguccugggcgccaucgcccuggggguggccgccgcggccgccgugacggccggcgucgcgaucgccaagaccauccggcucgagagcgaggugaccgccaucaacaacgcccugaagaagaccaacgaggccguguccacgcuggggaacggcguccgcgugcucgcgaccgccgugcgggagcugaaggacuucgucagcaagaaccugacccgcgccaucaacaagaacaagugcgacaucgacgaccucaagauggccguguccuucagccaguucaaccggcgcuuccugaacgugguccggcaguucuccgacaacgccgggaucacccccgcgaucagccuggaccucaugacggacgccgagcuggcccgcgccgugccgaacaugcccaccuccgccggccagaucaagcugaugcucgagaaccgggcgauggugcgccggaagggcuucgggauccugaucggcgucuacgggagcagcgugaucuacauggugcagcugcccaucuucggcgucaucgacacccccugcuggaucgugaaggccgccccguccugcagcgagaagaagggcaacuacgccugccuccugcgcgaggaccaggggugguacugccagaacgccggcuccaccgucuacuaccccaacgagaaggacugcgagacgcgcggggaccacguguucugcgacaccgcggccggcaucaacguggccgagcagagcaaggagugcaacaucaacaucuccaccaccaacuaccccugcaaggucagcacggggcggcaccccaucuccaugguggcccugagcccgcucggcgcgcugguggccugcuacaagggcgucuccugcagcaucggguccaaccgggugggcaucaucaagcagcugaacaaggggugcagcuacaucaccaaccaggacgccgacaccgugaccaucgacaacacggucuaccagcucuccaagguggagggcgagcagcacgugaucaaggggcgccccgucagcuccagcuucgaccccaucaaguuccccgaggaccaguuccagguggcccuggaccagguguucgagaacaucgagaacucccaggcccuggucgaccagagcaaccggauccucuccagcgcggagaagggcaacaccggcuucaucaucgugaucauccugaucgccgugcuggggagcuccaugauccucgucagcaucuucaucaucaucaagaagaccaagaagccgaccggcgccccgcccgagcuguccggggugacgaacaacggcuucaucccccacaacugaggacuaguuauaagacugacuagcccgaugggccucccaacgggcccuccuccccuccuugcaccgagauuaauaaaaaaaaaaaaaaaaaaaaaaaaaaaaaaaaaaaaaaaaaaaaaaaaaaaaaaaaaaaaaaaaugcaucccccccccccccccccccccccccccccccaaaggcucuuuucagagccaccagaauu

SEQ ID NO: 14761 - RNA, 1837 nt, Artificial Sequence
  HMPV/TN/92-4__ABM67072.1 fusion glycoprotein mRNA gc (variant)
aggagaaagcuuaccaugagcuggaagguggucaucaucuucucccugcucaucacgccccagcacggccugaaggagagcuaccuggaggaguccugcagcaccaucaccgagggguaccucuccgugcugcgcaccggcugguacaccaacguguucacccuggaggucggggacguggagaaccucacgugcagcgacggccccucccugaucaagaccgagcuggaccucaccaagagcgcccugcgggagcugaagaccguguccgccgaccagcucgcgcgcgaggagcagaucgagaaccccgggagcggcuccuucguccugggcgccaucgcccuggggguggccgccgcggccgccgugacggccggcgucgcgaucgccaagaccauccggcucgagagcgaggugaccgccaucaacaacgcccugaagaagaccaacgaggccguguccacgcuggggaacggcguccgcgugcucgcgaccgccgugcgggagcugaaggacuucgucagcaagaaccugacccgcgccaucaacaagaacaagugcgacauccccgaccucaagauggccguguccuucagccaguucaaccggcgcuuccugaacgugguccggcaguucuccgacaacgccgggaucacccccgcgaucagccuggaccucaugacggacgccgagcuggcccgcgccgugccgaacaugcccaccuccgccggccagaucaagcugaugcucgagaaccgggcgauggugcgccggaagggcuucgggauccugaucggcgucuacgggagcagcgugaucuacauggugcagcugcccaucuucggcgucaucgacacccccugcuggaucgugaaggccgccccguccugcagcgagaagaagggcaacuacgccugccuccugcgcgaggaccaggggugguacugccagaacgccggcuccaccgucuacuaccccaacgagaaggacugcgagacgcgcggggaccacguguucugcgacaccgcggccggcaucaacguggccgagcagagcaaggagugcaacaucaacaucuccaccaccaacuaccccugcaaggucagcacggggcggcaccccaucuccaugguggcccugagcccgcucggcgcgcugguggccugcuacaagggcgucuccugcagcaucggguccaaccgggugggcaucaucaagcagcugaacaaggggugcagcuacaucaccaaccaggacgccgacaccgugaccaucgacaacacggucuaccagcucuccaagguggagggcgagcagcacgugaucaaggggcgccccgucagcuccagcuucgaccccaucaaguuccccgaggaccaguuccagguggcccuggaccagguguucgagaacaucgagaacucccaggcccuggucgaccagagcaaccggauccucuccagcgcggagaagggcaacaccggcuucaucaucgugaucauccugaucgccgugcuggggagcuccaugauccucgucagcaucuucaucaucaucaagaagaccaagaagccgaccggcgccccgcccgagcuguccggggugacgaacaacggcuucaucccccacaacugaggacuaguuauaagacugacuagcccgaugggccucccaacgggcccuccuccccuccuugcaccgagauuaauaaaaaaaaaaaaaaaaaaaaaaaaaaaaaaaaaaaaaaaaaaaaaaaaaaaaaaaaaaaaaaaaugcaucccccccccccccccccccccccccccccccaaaggcucuuuucagagccaccagaauu

SEQ ID NO: 14762 - RNA, 1837 nt, Artificial Sequence
  HMPV/TN/92-4__ABM67072.1 fusion glycoprotein mRNA gc (variant)
aggagaaagcuuaccaugagcuggaagguggucaucaucuucucccugcucaucacgccccagcacggccugaaggagagcuaccuggaggaguccugcagcaccaucaccgagggguaccucuccgugcugcgcaccggcugguacaccaacguguucacccuggaggucggggacguggagaaccucacgugcagcgacggccccucccugaucaagaccgagcuggaccucaccaagagcgcccugcgggagcugaagaccguguccgccgaccagcucgcgcgcgaggagcagaucgagaaccccgggagcggcuccuucguccugggcgccaucgcccuggggguggccgccgcggccgccgugacggccggcgucgcgaucgccaagaccauccggcucgagagcgaggugaccgccaucaacaacgcccugaagaagaccaacgaggccguguccacgcuggggaacggcguccgcgugcucgcgaccgccgugcgggagcugaaggacuucgucagcaagaaccugacccgcgccaucaacaagaacaagugccccaucgacgaccucaagauggccguguccuucagccaguucaaccggcgcuuccugaacgugguccggcaguucuccgacaacgccgggaucacccccgcgaucagccuggaccucaugacggacgccgagcuggcccgcgccgugccgaacaugcccaccuccgccggccagaucaagcugaugcucgagaaccgggcgauggugcgccggaagggcuucgggauccugaucggcgucuacgggagcagcgugaucuacauggugcagcugcccaucuucggcgucaucgacacccccugcuggaucgugaaggccgccccguccugcagcgagaagaagggcaacuacgccugccuccugcgcgaggaccaggggugguacugccagaacgccggcuccaccgucuacuaccccaacgagaaggacugcgagacgcgcggggaccacguguucugcgacaccgcggccggcaucaacguggccgagcagagcaaggagugcaacaucaacaucuccaccaccaacuaccccugcaaggucagcacggggcggcaccccaucuccaugguggcccugagcccgcucggcgcgcugguggccugcuacaagggcgucuccugcagcaucggguccaaccgggugggcaucaucaagcagcugaacaaggggugcagcuacaucaccaaccaggacgccgacaccgugaccaucgacaacacggucuaccagcucuccaagguggagggcgagcagcacgugaucaaggggcgccccgucagcuccagcuucgaccccaucaaguuccccgaggaccaguuccagguggcccuggaccagguguucgagaacaucgagaacucccaggcccuggucgaccagagcaaccggauccucuccagcgcggagaagggcaacaccggcuucaucaucgugaucauccugaucgccgugcuggggagcuccaugauccucgucagcaucuucaucaucaucaagaagaccaagaagccgaccggcgccccgcccgagcuguccggggugacgaacaacggcuucaucccccacaacugaggacuaguuauaagacugacuagcccgaugggccucccaacgggcccuccuccccuccuugcaccgagauuaauaaaaaaaaaaaaaaaaaaaaaaaaaaaaaaaaaaaaaaaaaaaaaaaaaaaaaaaaaaaaaaaaugcaucccccccccccccccccccccccccccccccaaaggcucuuuucagagccaccagaauu

SEQ ID NO: 14763 - RNA, 1837 nt, Artificial Sequence
  HMPV/TN/92-4__ABM67072.1 fusion glycoprotein mRNA gc (variant)
aggagaaagcuuaccaugagcuggaagguggucaucaucuucucccugcucaucacgccccagcacggccugaaggagagcuaccuggaggaguccugcagcaccaucaccgagggguaccucuccgugcugcgcaccggcugguacaccaacguguucacccuggaggucggggacguggagaaccucacgugcagcgacggccccucccugaucaagaccgagcuggaccucaccaagagcgcccugcgggagcugaagaccguguccgccgaccagcucgcgcgcgaggagcagaucgagaaccccgggagcggcuccuucguccugggcgccaucgcccuggggguggccgccgcggccgccgugacggccggcgucgcgaucgccaagaccauccggcuccccagcgaggugaccgccaucaacaacgcccugaagaagaccaacgaggccguguccacgcuggggaacggcguccgcgugcucgcgaccgccgugcgggagcugaaggacuucgucagcaagaaccugacccgcgccaucaacaagaacaagugcgacaucgacgaccucaagauggccguguccuucagccaguucaaccggcgcuuccugaacgugguccggcaguucuccgacaacgccgggaucacccccgcgaucagccuggaccucaugacggacgccgagcuggcccgcgccgugccgaacaugcccaccuccgccggccagaucaagcugaugcucgagaaccgggcgauggugcgccggaagggcuucgggauccugaucggcgucuacgggagcagcgugaucuacauggugcagcugcccaucuucggcgucaucgacacccccugcuggaucgugaaggccgccccguccugcagcgagaagaagggcaacuacgccugccuccugcgcgaggaccaggggugguacugccagaacgccggcuccaccgucuacuaccccaacgagaaggacugcgagacgcgcggggaccacguguucugcgacaccgcggccggcaucaacguggccgagcagagcaaggagugcaacaucaacaucuccaccaccaacuaccccugcaaggucagcacggggcggcaccccaucuccaugguggcccugagcccgcucggcgcgcugguggccugcuacaagggcgucuccugcagcaucggguccaaccgggugggcaucaucaagcagcugaacaaggggugcagcuacaucaccaaccaggacgccgacaccgugaccaucgacaacacggucuaccagcucuccaagguggagggcgagcagcacgugaucaaggggcgccccgucagcuccagcuucgaccccaucaaguuccccgaggaccaguuccagguggcccuggaccagguguucgagaacaucgagaacucccaggcccuggucgaccagagcaaccggauccucuccagcgcggagaagggcaacaccggcuucaucaucgugaucauccugaucgccgugcuggggagcuccaugauccucgucagcaucuucaucaucaucaagaagaccaagaagccgaccggcgccccgcccgagcuguccggggugacgaacaacggcuucaucccccacaacugaggacuaguuauaagacugacuagcccgaugggccucccaacgggcccuccuccccuccuugcaccgagauuaauaaaaaaaaaaaaaaaaaaaaaaaaaaaaaaaaaaaaaaaaaaaaaaaaaaaaaaaaaaaaaaaaugcaucccccccccccccccccccccccccccccccaaaggcucuuuucagagccaccagaauu

SEQ ID NO: 14764 - RNA, 1837 nt, Artificial Sequence
  HMPV/TN/92-4__ABM67072.1 fusion glycoprotein mRNA gc (variant)
aggagaaagcuuaccaugagcuggaagguggucaucaucuucucccugcucaucacgccccagcacggccugaaggagagcuaccuggaggaguccugcagcaccaucaccgagggguaccucuccgugcugcgcaccggcugguacaccaacguguucacccuggaggucggggacguggagaaccucacgugcagcgacggccccucccugaucaagaccgagcuggaccucaccaagagcgcccugcgggagcugaagaccguguccgccgaccagcucgcgcgcgaggagcagaucgagaaccccgggagcggcuccuucguccugggcgccaucgcccuggggguggccgccgcggccgccgugacggccggcgucgcgaucgccaagaccauccggcucgagagcgaggugaccgccaucaacaacgcccugaagaagaccaacgaggccguguccacgcuggggaacggcguccgcgugcucgcgaccgccgugcgggagcugaaggacuucgucagcaagaaccugacccgcgccaucaacaagaacaagugcgacaucgacgaccucaagauggccguguccuucagccaguucaaccggcgcuuccugaacgugguccggcaguucuccgacaacgccgggaucacccccgcgaucagccuggaccucaugacggacgccgagcuggcccgcgccgugcccaacaugccgaccuccgccggccagaucaagcugaugcucgagaaccgggcgauggugcgccggaagggcuucgggauccugaucggcgucuacgggagcagcgugaucuacauggugcagcugcccaucuucggcgucaucgacacccccugcuggaucgugaaggccgcccccuccugcagcgagaagaagggcaacuacgccugccuccugcgcgaggaccaggggugguacugccagaacgccggcuccaccgucuacuacccgaacgagaaggacugcgagacgcgcggggaccacguguucugcgacaccgcggccggcaucaacguggccgagcagagcaaggagugcaacaucaacaucuccaccaccaacuaccccugcaaggucagcacggggcggcaccccaucuccaugguggcccugagcccccucggcgcgcugguggccugcuacaagggcgucuccugcagcaucggguccaaccgggugggcaucaucaagcagcugaacaaggggugcagcuacaucaccaaccaggacgccgacaccgugaccaucgacaacacggucuaccagcucuccaagguggagggcgagcagcacgugaucaaggggcgcccggucagcuccagcuucccgcccaucaaguuccccgaggaccaguuccagguggcccuggaccagguguucgagaacaucgagaacucccaggcccuggucgaccagagcaaccggauccucuccagcgcggagaagggcaacaccggcuucaucaucgugaucauccugaucgccgugcuggggagcuccaugauccucgucagcaucuucaucaucaucaagaagaccaagaagcccaccggcgccccgcccgagcuguccggggugacgaacaacggcuucaucccccacaacugaggacuaguuauaagacugacuagcccgaugggccucccaacgggcccuccuccccuccuugcaccgagauuaauaaaaaaaaaaaaaaaaaaaaaaaaaaaaaaaaaaaaaaaaaaaaaaaaaaaaaaaaaaaaaaaaugcaucccccccccccccccccccccccccccccccaaaggcucuuuucagagccaccagaauu

SEQ ID NO: 14765 - RNA, 1837 nt, Artificial Sequence
  HMPV/TN/92-4__ABM67072.1 fusion glycoprotein mRNA gc (variant)
aggagaaagcuuaccaugagcuggaagguggucaucaucuucucccugcucaucacgccccagcacggccugaaggagagcuaccuggaggaguccugcagcaccaucaccgagggguaccucuccgugcugcgcaccggcugguacaccaacguguucacccuggaggucggggacguggagaaccucacgugcagcgacggcccgucccugaucaagaccgagcuggaccucaccaagagcgcccugcgggagcugaagaccguguccgccgaccagcucgcgcgcgaggagcagaucgagaaccccgggagcggcuccuucguccugggcgccaucgcccuggggguggccgccgcggccgccgugacggccggcgucgcgaucgccaagaccauccggcucgagagcgaggugaccgccaucaacaacgcccugaagaagaccaacgaggccguguccacgcuggggaacggcguccgcgugcucgcgaccgccgugcgggagcugaaggacuucgucagcaagaaccugacccgcgccaucaacaagaacaagugcgacaucgacgaccucaagauggccguguccuucagccaguucaaccggcgcuuccugaacgugguccggcaguucuccgacaacgccgggaucacccccgcgaucagccuggaccucaugacggacgccgagcuggcccgcgccgugcccaacaugccgaccuccgccggccagaucaagcugaugcucgagaaccgggcgauggugcgccggaagggcuucgggauccugaucggcgucuacgggagcagcgugaucuacauggugcagcugcccaucuucggcgucaucgacacccccugcuggaucgugaaggccgcccccuccugcagcgagaagaagggcaacuacgccugccuccugcgcgaggaccaggggugguacugccagaacgccggcuccaccgucuacuacccgaacgagaaggacugcgagacgcgcggggaccacguguucugcgacaccgcggccggcaucaacguggccgagcagagcaaggagugcaacaucaacaucuccaccaccaacuaccccugcaaggucagcacggggcggcaccccaucuccaugguggcccugagcccccucggcgcgcugguggccugcuacaagggcgucuccugcagcaucggguccaaccgggugggcaucaucaagcagcugaacaaggggugcagcuacaucaccaaccaggacgccgacaccgugaccaucgacaacacggucuaccagcucuccaagguggagggcgagcagcacgugaucaaggggcgcccggucagcuccagcuucgaccccaucaaguuccccgagaaccaguuccagguggcccuggaccagguguucgagaacaucgagaacucccaggcccuggucgaccagagcaaccggauccucuccagcgcggagaagggcaacaccggcuucaucaucgugaucauccugaucgccgugcuggggagcuccaugauccucgucagcaucuucaucaucaucaagaagaccaagaagcccaccggcgccccgcccgagcuguccggggugacgaacaacggcuucaucccccacaacugaggacuaguuauaagacugacuagcccgaugggccucccaacgggcccuccuccccuccuugcaccgagauuaauaaaaaaaaaaaaaaaaaaaaaaaaaaaaaaaaaaaaaaaaaaaaaaaaaaaaaaaaaaaaaaaaugcaucccccccccccccccccccccccccccccccaaaggcucuuuucagagccaccagaauu

SEQ ID NO: 14766 - RNA, 1837 nt, Artificial Sequence
  HMPV/TN/92-4__ABM67072.1 fusion glycoprotein mRNA gc (variant)
aggagaaagcuuaccaugagcuggaagguggucaucaucuucucccugcucaucacgccccagcacggccugaaggagagcuaccuggaggaguccugcagcaccaucaccgagggguaccucuccgugcugcgcaccggcugguacaccaacguguucacccuggaggucggggacguggagaaccucacgugcagcgacggcccgucccugaucaagaccgagcuggaccucaccaagagcgcccugcgggagcugaagaccguguccgccgaccagcucgcgcgcgaggagcagaucgagaaccccgggagcggcuccuucguccugggcgccaucgcccuggggguggccgccgcggccgccgugacggccggcgucgcgaucgccaagaccauccggcucgagagcgaggugaccgccaucaacaacgcccugaagaagaccaacgaggccguguccacgcuggggaacggcguccgcgugcucgcgaccgccgugcgggagcugaaggacuucgucagcaagaaccugacccgcgccaucaacaagaacaagugcgacaucgacgaccucaagauggccguguccuucagccaguucaaccggcgcuuccugaacgugguccggcaguucuccgacaacgccgggaucacccccgcgaucagccuggaccucaugacggacgccgagcuggcccgcgccgugcccaacaugccgaccuccgccggccagaucaagcugaugcucgagaaccgggcgauggugcgccggaagggcuucgggauccugaucggcgucuacgggagcagcgugaucuacauggugcagcugcccaucuucggcgucaucgacacccccugcuggaucgugaaggccgcccccuccugcagcgagaagaagggcaacuacgccugccuccugcgcgaggaccaggggugguacugccagaacgccggcuccaccgucuacuacccgaacgagaaggacugcgagacgcgcggggaccacguguucugcgacaccgcggccggcaucaacguggccgagcagagcaaggagugcaacaucaacaucuccaccaccaacuaccccugcaaggucagcacggggcggcaccccaucuccaugguggcccugagcccccucggcgcgcugguggccugcuacaagggcgucuccugcagcaucggguccaaccgggugggcaucaucaagcagcugaacaaggggugcagcuacaucaccaaccaggacgccgacaccgugaccaucgacaacacggucuaccagcucuccaagguggagggcgagcagcacgugaucaaggggcgcccggucagcuccagcuucgaccccaucaaguucccccaggaccaguuccagguggcccuggaccagguguucgagaacaucgagaacucccaggcccuggucgaccagagcaaccggauccucuccagcgcggagaagggcaacaccggcuucaucaucgugaucauccugaucgccgugcuggggagcuccaugauccucgucagcaucuucaucaucaucaagaagaccaagaagcccaccggcgccccgcccgagcuguccggggugacgaacaacggcuucaucccccacaacugaggacuaguuauaagacugacuagcccgaugggccucccaacgggcccuccuccccuccuugcaccgagauuaauaaaaaaaaaaaaaaaaaaaaaaaaaaaaaaaaaaaaaaaaaaaaaaaaaaaaaaaaaaaaaaaaugcaucccccccccccccccccccccccccccccccaaaggcucuuuucagagccaccagaauu

SEQ ID NO: 14767 - RNA, 1837 nt, Artificial Sequence
  HMPV/TN/92-4__ABM67072.1 fusion glycoprotein mRNA gc (variant)
aggagaaagcuuaccaugagcuggaagguggucaucaucuucucccugcucaucacgccccagcacggccugaaggagagcuaccuggaggaguccugcagcaccaucaccgagggguaccucuccgugcugcgcaccggcugguacaccaacguguucacccuggaggucggggacguggagaaccucacgugcagcgacggcccgucccugaucaagaccgagcuggaccucaccaagagcgcccugcgggagcugaagaccguguccgccgaccagcucgcgcgcgaggagcagaucgagaaccccgggagcggcuccuucguccugggcgccaucgcccuggggguggccgccgcggccgccgugacggccggcgucgcgaucgccaagaccauccggcucgagagcgaggugaccgccaucaacaacgcccugaagaagaccaacgaggccguguccacgcuggggaacggcguccgcgugcucgcgaccgccgugcgggagcugaaggacuucgucagcaagaaccugacccgcgccaucaacaagaacaagugcgacaucgacgaccucaagauggccguguccuucagccaguggaaccggcgcuuccugaacgugguccggcaguucuccgacaacgccgggaucacccccgcgaucagccuggaccucaugacggacgccgagcuggcccgcgccgugcccaacaugccgaccuccgccggccagaucaagcugaugcucgagaaccgggcgauggugcgccggaagggcuucgggauccugaucggcgucuacgggagcagcgugaucuacauggugcagcugcccaucuucggcgucaucgacacccccugcuggaucgugaaggccgcccccuccugcagcgagaagaagggcaacuacgccugccuccugcgcgaggaccaggggugguacugccagaacgccggcuccaccgucuacuacccgaacgagaaggacugcgagacgcgcggggaccacguguucugcgacaccgcggccggcaucaacguggccgagcagagcaaggagugcaacaucaacaucuccaccaccaacuaccccugcaaggucagcacggggcggcaccccaucuccaugguggcccugagcccccucggcgcgcugguggccugcuacaagggcgucuccugcagcaucggguccaaccgggugggcaucaucaagcagcugaacaaggggugcagcuacaucaccaaccaggacgccgacaccgugaccaucgacaacacggucuaccagcucuccaagguggagggcgagcagcacgugaucaaggggcgcccggucagcuccagcuucgaccccaucaaguuccccgaggaccaguuccagguggcccuggaccagguguucgagaacaucgagaacucccaggcccuggucgaccagagcaaccggauccucuccagcgcggagaagggcaacaccggcuucaucaucgugaucauccugaucgccgugcuggggagcuccaugauccucgucagcaucuucaucaucaucaagaagaccaagaagcccaccggcgccccgcccgagcuguccggggugacgaacaacggcuucaucccccacaacugaggacuaguuauaagacugacuagcccgaugggccucccaacgggcccuccuccccuccuugcaccgagauuaauaaaaaaaaaaaaaaaaaaaaaaaaaaaaaaaaaaaaaaaaaaaaaaaaaaaaaaaaaaaaaaaaugcaucccccccccccccccccccccccccccccccaaaggcucuuuucagagccaccagaauu

SEQ ID NO: 14768 - RNA, 1837 nt, Artificial Sequence
  HMPV/NL/1/99__AAQ90145.1 fusion glycoprotein mRNA gc (F0)
aggagaaagcuuaccaugagcuggaaggugaugaucaucaucucccugcucaucacgccccagcacggccugaaggagagcuaccuggaggaguccugcagcaccaucaccgagggguaccucuccguccugcgcaccggcugguacaccaacguguucacccuggaggugggggacgucgagaaccucacgugcaccgacggcccgagccugaucaagaccgagcuggaccucaccaaguccgcccugcgggagcugaagacggugagcgccgaccagcucgcgcgcgaggagcagaucgagaacccccggcagucccgcuucgugcugggggccaucgcccugggcgucgccaccgccgcggccgugaccgccggcaucgccaucgcgaagaccauccggcucgagagcgaggugaacgccaucaagggggcccugaagcagacgaacgaggccgucuccacccugggcaacggggugcgcgugcucgccaccgcgguccgggagcugaaggaguucgugagcaagaaccugaccuccgccaucaaccgcaacaagugcgacaucgccgaccucaagauggccgugagcuucucccaguucaaccggcgcuuccugaacgucgugcggcaguucagcgacaacgccggcaucacgcccgcgaucucccuggaccucaugaccgacgccgagcuggcccgcgccgugagcuacaugcccaccuccgccgggcagaucaagcugaugcucgagaaccgggcgaugguccgccggaagggcuucggcauccugaucgggguguacggcagcagcgugaucuacaugguccagcugccgaucuucggggugaucgacacccccugcuggaucaucaaggccgcccccuccugcagcgagaagaacggcaacuacgccugccuccugcgcgaggaccagggcugguacugcaagaacgccggguccacgguguacuaccccaacgagaaggacugcgagacccggggcgaccacgucuucugcgacaccgcggccgggaucaacguggccgagcagagccgcgagugcaacaucaacaucuccaccacgaacuacccgugcaaggucagcaccggccggcaccccaucuccaugguggcccugagcccccucggggcgcugguggccugcuacaagggcgucuccugcagcaucggcuccaacuggguggggaucaucaagcagcugcccaagggcugcagcuacaucaccaaccaggacgccgacaccgugacgaucgacaacaccgucuaccagcucuccaagguggagggggagcagcacgugaucaagggccgcccggucagcuccagcuucgaccccaucaaguuccccgaggaccaguucaacguggcccuggaccagguguucgaguccaucgagaacagccaggcccuggucgaccaguccaacaagauccucaacagcgcggagaaggggaacaccggcuucaucaucguggugauccuggucgccgugcugggccucaccaugaucagcguguccaucaucaucaucaucaagaagacgcggaagcccaccggggccccgcccgagcugaacggcgucaccaacgggggcuucaucccccacagcugaggacuaguuauaagacugacuagcccgaugggccucccaacgggcccuccuccccuccuugcaccgagauuaauaaaaaaaaaaaaaaaaaaaaaaaaaaaaaaaaaaaaaaaaaaaaaaaaaaaaaaaaaaaaaaaaugcaucccccccccccccccccccccccccccccccaaaggcucuuuucagagccaccagaauu

SEQ ID NO: 14769 - RNA, 1837 nt, Artificial Sequence
  HMPV/Sabana__AEA02280.1 fusion glycoprotein mRNA gc (F0)
aggagaaagcuuaccaugagcuggaaggugaugaucaucaucucccugcucaucacgccccagcacggccugaaggagagcuaccuggaggaguccugcagcaccaucaccgagggguaccucuccguccugcgcaccggcugguacaccaacguguucacccuggaggugggggacgucgagaaccucacgugcaccgacggcccgagccugaucaagaccgagcuggaccucaccaaguccgcccugcgggagcugaagacggugagcgccgaccagcucgcgcgcgaggagcagaucgagaacccccggcagucccgcuucgugcugggggccaucgcccugggcgucgccaccgccgcggccgugaccgccggcaucgccaucgcgaagaccauccggcucgagagcgaggugaacgccaucaagggggcccugaagacgaccaacgaggccgucuccacccugggcaacggggugcgcgugcucgccaccgcgguccgggagcugaaggaguucgugagcaagaaccugacguccgccaucaacaagaacaagugcgacaucgccgaccucaagauggccgugagcuucucccaguucaaccgccgguuccugaacgucgugcgccaguucagcgacaacgccggcaucacccccgcgaucucccuggaccucaugaacgacgccgagcuggcccgggccgugagcuacaugcccaccuccgccgggcagaucaagcugaugcucgagaaccgcgcgaugguccggcgcaagggcuucggcauccugaucgggguguacggcagcagcgugaucuacaugguccagcugccgaucuucggggugaucaacacccccugcuggaucaucaaggccgcccccuccugcagcgagaaggacggcaacuacgccugccuccugcgggaggaccagggcugguacugcaagaacgccggguccacgguguacuaccccaacgagaaggacugcgagacccgcggcgaccacgucuucugcgacaccgcggccgggaucaacguggccgagcagagccgggagugcaacaucaacaucuccaccacgaacuacccgugcaaggucagcaccggccgccaccccaucuccaugguggcccugagcccccucggggcgcugguggccugcuacaagggcgucuccugcagcaccggcuccaaccagguggggaucaucaagcagcugcccaagggcugcagcuacaucaccaaccaggacgccgacacggugaccaucgacaacaccgucuaccagcucuccaagguggagggggagcagcacgugaucaagggccggccggucagcuccagcuucgaccccauccgcuuccccgaggaccaguucaacguggcccuggaccagguguucgaguccaucgagaacagccaggcccuggucgaccaguccaacaagauccucaacagcgcggagaaggggaacaccggcuucaucaucgugaucauccugaucgccgugcugggccucacgaugaucagcgucuccaucaucaucaucaucaagaagacccggaagcccaccggggccccgcccgagcugaacggcgugaccaacgggggcuucaucccccacagcugaggacuaguuauaagacugacuagcccgaugggccucccaacgggcccuccuccccuccuugcaccgagauuaauaaaaaaaaaaaaaaaaaaaaaaaaaaaaaaaaaaaaaaaaaaaaaaaaaaaaaaaaaaaaaaaaugcaucccccccccccccccccccccccccccccccaaaggcucuuuucagagccaccagaauu

SEQ ID NO: 14770 - RNA, 1837 nt, Artificial Sequence
  HMPV/TN/92-4__ABM67072.1 fusion glycoprotein mRNA human (F0)
aggagaaagcuuaccaugagcuggaagguggucaucauuuucucccugcucauaacaccccagcacggccuuaaagagucuuaccuggaagagucaugcaguaccaucacugaaggguauuugagcguuuuaagaacgggaugguacaccaacguguuuacacuggagguaggugacguggaaaaucuaacuuguuccgauggcccuucucucauuaagaccgagcuggaccuuacaaaaucggcccugagggaguugaagaccgucucagcugaucaacucgcacgggaggaacagaucgaaaacccacgccagagccgauucgugcugggggccauugcgcugggaguugcugccgcagccgcugugacugcaggcgucgccaucgcuaaaacaauacgucucgagagugaggugaccgccaucaauaacgcguuaaagaagacgaaugaagcaguauccacucuggguaacgggguuagagugcuugccaccgcugucagggaguugaaagacuuugugucuaagaaucugacacgggccauuaacaaaaauaagugcgauaucgacgaucuaaaaauggcagugagcuucucccaguuuaaccgcagauuccucaaugucguuaggcaauuuucagacaacgcuggaauuacuccggccaucagucuggaucuuaugaccgacgcggaacuggcccgggcagugcccaauaugccuacaagcgcuggccagauaaaguugaugcucgagaaccgcgccaugguacgaagaaagggcuucgggauucugaucggaguguaugguucuuccgucauuuacauggugcaguuaccaaucuuuggcguuaucgauacccccuguuggauugugaaagcugccccuucaugcagcgaaaagaaagggaauuaugcaugucugcucagggaggaccagggaugguacugccaaaacgccggcaguacggucuauuacccaaacgagaaggauugugaaacucggggugaccauguguucugcgacacagcugcggggauaaauguagcagagcagucuaaagaauguaacaucaauauuuccaccacuaacuaccccugcaagguuagcacaggacgucacccuaucucgaugguggcccuuucuccacugggcgcuuuggucgccuguuauaaaggcguguccugcucaauagggaguaaucgcgucggaauuaucaagcagcuaaacaaggguugcagcuacaucaccaaucaggaugcagacacggugaccauugauaacacaguuuaucaacuguccaaaguggagggcgaacagcauguaaucaaggggagaccggucucuagcucauuugaccccauuaaauucccugaggaucaguuuaauguggcccucgaccaaguuuucgagaacauagaaaauagucaggcucugguggaucaguccaacaggauccuuagcucugccgagaagggaaauacuggcuucauuaucgucaucauucugauagcaguguuggguucaaguaugauccucguaagcauuuuuaucauuaucaaaaagaccaagaaaccaacaggggcgcccccugaacuguccggcgugacuaacaauggauucauaccacacaacugaggacuaguuauaagacugacuagcccgaugggccucccaacgggcccuccuccccuccuugcaccgagauuaauaaaaaaaaaaaaaaaaaaaaaaaaaaaaaaaaaaaaaaaaaaaaaaaaaaaaaaaaaaaaaaaaugcaucccccccccccccccccccccccccccccccaaaggcucuuuucagagccaccagaauu

SEQ ID NO: 14771 - RNA, 1837 nt, Artificial Sequence
  HMPV/TN/92-4__ABM67072.1 fusion glycoprotein mRNA human (variant)
aggagaaagcuuaccaugagcuggaagguggucaucauuuucucccugcucauaacaccccagcacggccuuaaagagucuuaccuggaagagucaugcaguaccaucacugaaggguauuugagcguuuuaagaacgggaugguacaccaacguguuuacacuggagguaggugacguggaaaaucuaacuuguuccgauggcccuucucucauuaagaccgagcuggaccuuacaaaaucggcccugagggaguugaagaccgucucagcugaucaacucgcacgggaggaacagaucgaaaacccagggagcggaaguuucgugcugggcgccauugcgcuggguguugcugccgcagccgcugugacugcaggggucgccaucugcaaaacaauacgccucgaguccgaggugaccgcuaucaauaacgccuuaaagaagacgaaugaagcgguaucuacucugggaaacggcguucgagugcuugcauuugccguccgugaguugaaagacuucgugagcaagaaucugaccagagcucuaaacaaaaauaagugugauauugacgaucucaaaauggccguguccuuuucacaguucaacaggcgguuucugaaugucguucgccaguucagugacaacgcaggcaucacaccggcuauuagccuugaucugaugacugacgccgaauuggcgagagccgugcccaauaugccuaccucugcagggcaaaucaagcucaugcuggagaacagggcuaugguacggcgcaagggauuugguauauuaugcggcguguauggguccucagucauuuacauggugcagcugccaaucuucggaguuauugauacacccuguuggaucgugaaagccgcuccuagcugcagugaaaagaaaggcaauuaugccugucuccuucgagaggaccaggguugguacugccagaacgcagggucuaccgucuauuacccaaacgagaaggauugugaaacgagaggagaccauguguuuugcgacacugccgcuggcaucaauguagcggagcaauccaaagaauguaacauuaauauaagcacaaccaacuaccccugcaagguuucgacuggcaggcacccuaucucuaugguggcacuguccccauugggggcccuagucgcuugcuauaaaggagugucauguaguauugguagcaaucgggucggcaucauaaagcagcugaacaaggggugcuccuacauuacaaaucaggaugccgacaccgugacgaucgauaacaccguuuaucagcucucuaaaguggagggagaacaacauguaaucaagggccguccggucagcucaaguuucgaccccauuaaauuuccugaggaucaguucaauguggcacuggaccagguuuucgagaacaucgaaaauucccaagcccuuguggaucagagcaaccgcauucugucuucagcugagaaggguaauacaggguuuauaaucgucauuaucuugaucgccgugcucggcaguagcaugauucugguauccauauucaucauuaucaaaaagacuaagaaaccaaccggagcacccccugaauuaucuggcgugacaaacaauggguuuauuccacacaacugaggacuaguuauaagacugacuagcccgaugggccucccaacgggcccuccuccccuccuugcaccgagauuaauaaaaaaaaaaaaaaaaaaaaaaaaaaaaaaaaaaaaaaaaaaaaaaaaaaaaaaaaaaaaaaaaugcaucccccccccccccccccccccccccccccccaaaggcucuuuucagagccaccagaauu

SEQ ID NO: 14772 - RNA, 1837 nt, Artificial Sequence
  HMPV/TN/92-4__ABM67072.1 fusion glycoprotein mRNA human (variant)
aggagaaagcuuaccaugagcuggaagguggucaucauuuucucccugcucauaacaccccagcacggccuuaaagagucuuaccuggaagagucaugcaguaccaucacugaaggguauuugagcguuuuaagaacgggaugguacaccaacguguuuacacuggagguaggugacguggaaaaucuaacuuguuccgauggcccuucucucauuaagaccgagcuggaccuuacaaaaucggcccugagggaguugaagaccgucucagcugaucaacucgcacgggaggaacagaucgaaaacccagggagcggaaguuucgugcugggcgccauugcgcuggguguugcugccgcagccgcugugacugcaggggucgccaucugcaaaacaauacgccucgaguccgaggugaccgcuaucaauaacgccuuaaagaagacgaaugaagcgguaucuacucugggaaacggcguucgagugcuugcaaccgccguccgugaguugaaagacuuugugagcaagaaucugacaagagcuauuaacaaaaauaagugugauaucgacgaucuaaaaauggccguguccuucucacaguuuaacaggcgguuccucaaugucguucgccaguuuagugacaacgcaggcauuacuccggcuaucagccuggaucuuaugaccgacgccgaacuggcgagagccgugcccaauaugccuacaucugcagggcaaauaaaguugaugcucgagaacagggcuaugguacggcgcaagggauucgguauucugugcggcguguauggguccucagucaucuacauggugcaguuaccaauuuuuggaguuaucgauacccccuguuggaucgugaaagccgcuccuagcugcagugaaaagaaaggcaauuaugccugucugcuccgagaggaccaggguugguacugccagaacgcagggucuacggucuauuacccaaacgagaaggauugugaaacuagaggagaccauguguucugcgacacagccgcuggcauuaauguagcggagcaauccaaagaauguaacauaaauaucagcaccacuaacuaccccugcaagguuucgacaggcaggcacccuauuucuaugguggcacuuuccccacugggggccuuggucgcuugcuauaaaggagugucauguaguaucgguagcaaucgggucggcauaauuaagcagcuaaacaaggggugcuccuacaucaccaaucaggaugccgacacggugaccaucgauaacacaguuuaucagcugucuaaaguggagggagaacaacauguaauuaagggccguccggucagcucaaguuuugaccccaucaaauucccugagcaccaguggcauguggcacucgaucagguuuuugagaauauugaaaacucccaagcccugguggaccagagcaaucgcauacuuucuucagcugagaaggguaacacuggguucaucauugucaucauccugauugccguguugggcaguagcaugauacucguauccaucuucauuaucauuaaaaagaccaagaaaccaacaggagcacccccugaacugucuggcgugacuaauaacggguuuaucccacacaauugaggacuaguuauaagacugacuagcccgaugggccucccaacgggcccuccuccccuccuugcaccgagauuaauaaaaaaaaaaaaaaaaaaaaaaaaaaaaaaaaaaaaaaaaaaaaaaaaaaaaaaaaaaaaaaaaugcaucccccccccccccccccccccccccccccccaaaggcucuuuucagagccaccagaauu

SEQ ID NO: 14773 - RNA, 1837 nt, Artificial Sequence
  HMPV/TN/92-4__ABM67072.1 fusion glycoprotein mRNA human (variant)
aggagaaagcuuaccaugagcuggaagguggucaucauuuucucccugcucauaacaccccagcacggccuuaaagagucuuaccuggaagagucaugcaguaccaucacugaaggguauuugagcguuuuaagaacgggaugguacaccaacguguuuacacuggagguaggugacguggaaaaucuaacuuguuccgauggcccuucucucauuaagaccgagcuggaccuucugaaaucggccuugagggagcucaagacagucucagcugaucaacuggcacgggaggaacagaucgaaaacccagggagcggaaguuucgugcugggcgccauugcgcucgguguugcugccgcagccgcugugaccgcaggggucgccaucgcuaaaacuauacgcuuagaguccgaggugacagccaucaauaacgcgcugaagaagaccaaugaagcaguaucuacgcuuggaaacggcguucgaguguuggccacugcuguccgugagcugaaagacuuugugagcaagaaucuaaccagagccauuaacaaaaauaagugcgauaucccggaccucaaaauggcaguguccuucucacaguuuaacaggcgguuccugaaugucguucgccaguuuagugauaacgcuggcauuacacccgccaucagccuugaccugaugacugaugcggaauuggccagagcagugccuaauaugccaaccucugcugggcaaauaaagcucaugcuggagaacagggccaugguacggcgcaagggauucgguauuuuaaucggcguguauggguccucagucauuuacauggugcagcugcccaucuuuggaguuaucgacacaccuuguuggauugugaaagcugccccaagcugcagugaaaagaaaggcaauuaugcaugucuccuucgagaggaucaggguugguacugccagaacgccgggucuaccgucuauuaccccaacgagaaggacugugaaacgagaggagaucauguguucugcgacacugcugcgggcauaaauguagcagagcaauccaaagaauguaacaucaauauuagcacaaccaacuacccuugcaagguuucgacuggcaggcacccaaucucuaugguggcccuguccccguugggggcucuagucgccuguuauaaaggagugucaugcaguauagguagcaaucgggucggcauuaucaagcagcugaacaaggggugcuccuacaucacaaaucaggacgcagauaccgugacgauugacaacaccguuuaucagcucucuaaaguggagggagaacaacauguaaucaagggccgucccgucagcucaaguuuugauccuauuaaauucccagaggaccaguuucagguggcccuggaucaaguuuucgagaauauagaaaacucccaggcucuuguggaccagagcaaucgcauccugucuucagccgagaaggguaacacaggguucauuaucgucaucauuuugauagcagugcucggcaguagcaugauccugguauccauuuuuaucauuaucaaaaagacuaagaaacccaccggagcgccuccagaauuaucuggcgugacaaauaacggguucauaccccacaauugaggacuaguuauaagacugacuagcccgaugggccucccaacgggcccuccuccccuccuugcaccgagauuaauaaaaaaaaaaaaaaaaaaaaaaaaaaaaaaaaaaaaaaaaaaaaaaaaaaaaaaaaaaaaaaaaugcaucccccccccccccccccccccccccccccccaaaggcucuuuucagagccaccagaauu

SEQ ID NO: 14774 - RNA, 1837 nt, Artificial Sequence
  HMPV/TN/92-4__ABM67072.1 fusion glycoprotein mRNA human (variant)
aggagaaagcuuaccaugagcuggaagguggucaucauuuucucccugcucauaacaccccagcacggccuuaaagagucuuaccuggaagagucaugcaguaccaucacugaaggguauuugagcguuuuaagaacgggaugguacaccaacguguuuacacuggagguaggugacguggaaaaucuaacuuguuccgauggcccuucucucauuaagaccgagcuggaccuucugaaaucggccuugagggagcucaagacagucucagcugaucaacuggcacgggaggaacagaucgaaaacccagggagcggaaguuucgugcugggcgccauugcgcucgguguugcugccgcagccgcugugaccgcaggggucgccaucgcuaaaacuauacgcuuagaguccgaggugacagccaucaauaacgcgcugaagaagaccaaugaagcaguaucuacgcuuggaaacggcguucgaguguuggccacugcuguccgugagcugaaagacuuugugagcaagaaucuaaccagagccauuaacaaaaauaagugcgauaucccggaccucaaaauggcaguguccuucucacaguuuaacaggcgguuccugaaugucguucgccaguuuagugauaacgcuggcauuacacccgccaucagccuugaccugaugacugaugcggaauuggccagagcagugccuaauaugccaaccucugcugggcaaauaaagcucaugcuggagaacagggccaugguacggcgcaagggauucgguauuuuaaucggcguguauggguccucagucauuuacauggugcagcugcccaucuuuggaguuaucgacacaccuuguuggauugugaaagcugccccaagcugcagugaaaagaaaggcaauuaugcaugucuccuucgagaggaucaggguugguacugccagaacgccgggucuaccgucuauuaccccaacgagaaggacugugaaacgagaggagaucauguguucugcgacacugcugcgggcauaaauguagcagagcaauccaaagaauguaacaucaauauuagcacaaccaacuacccuugcaagguuucgacuggcaggcacccaaucucuaugguggcccuguccccguugggggcucuagucgccuguuauaaaggagugucaugcaguauagguagcaaucgggucggcauuaucaagcagcugaacaaggggugcuccuacaucacaaaucaggacgcagauaccgugacgauugacaacaccguuuaucagcucucuaaaguggagggagaacaacauguaaucaagggccgucccgucagcucaaguuuugauccuauuaaauucccagagaaucaguuucagguggcccuggaccaaguuuucgagaacauagaaaauucccaggcucuuguggaucagagcaaccgcauccugucuucagccgagaaggguaauacaggguucauuaucgucaucauuuugauagcagugcucggcaguagcaugauccugguauccauuuuuaucauuaucaaaaagacuaagaaacccaccggagcgccuccagaauuaucuggcgugacaaacaauggguucauaccccacaacugaggacuaguuauaagacugacuagcccgaugggccucccaacgggcccuccuccccuccuugcaccgagauuaauaaaaaaaaaaaaaaaaaaaaaaaaaaaaaaaaaaaaaaaaaaaaaaaaaaaaaaaaaaaaaaaaugcaucccccccccccccccccccccccccccccccaaaggcucuuuucagagccaccagaauu

SEQ ID NO: 14775 - RNA, 1837 nt, Artificial Sequence
  HMPV/TN/92-4__ABM67072.1 fusion glycoprotein mRNA human (variant)
aggagaaagcuuaccaugagcuggaagguggucaucauuuucucccugcucauaacaccccagcacggccuuaaagagucuuaccuggaagagucaugcaguaccaucacugaaggguauuugagcguuuuaagaacgggaugguacaccaacguguuuacacuggagguaggugacguggaaaaucuaacuuguuccgauggcccuucucucauuaagaccgagcuggaccuucugaaaucggccuugagggagcucaagacagucucagcugaucaacuggcacgggaggaacagaucgaaaacccagggagcggaaguuucgugcugggcgccauugcgcucgguguugcugccgcagccgcugugaccgcaggggucgccaucgcuaaaacuauacgcuuagaguccgaggugacagccaucaauaacgcgcugaagaagaccaaugaagcaguaucuacgcuuggaaacggcguucgaguguuggccacugcuguccgugagcugaaagacuuugugcuaaagaaucucaccagagccauuaacaaaaauaagugcgauaucccggaccugaaaauggcagugagcuucucccaguuuaacaggcgguuccuuaaugucguucgccaguuuucagauaacgcuggcauuacacccgccaucagucuggacuugaugacugaugcggaacucgccagagcagugccuaauaugccaaccagcgcugggcaaauaaagcugauguuagagaacagggccaugguacggcgcaagggauucgguauucugaucggcguguaugggucuuccgucauuuacauggugcagcuccccaucuuuggaguuaucgacacaccuuguuggauugugaaagcugccccaucaugcagcgaaaagaaaggcaauuaugcaugucuucugcgagaggaucaggguugguacugccagaacgccgggaguaccgucuauuaccccaacgagaaggacugugaaacgagaggagaucauguguucugcgacacugcugcgggcauaaauguagcagagcaaucuaaagaauguaacaucaauauuuccacaaccaacuacccuugcaagguuagcacuggcaggcacccaaucucgaugguggccuugucuccgcuaggggcucuggucgccuguuauaaaggaguguccugcucaauagguaguaaucgggucggcauuaucaagcagcucaacaaggggugcagcuacaucacaaaucaggacgcagauaccgugacgauugacaacaccguuuaucagcuguccaaaguggagggagaacaacauguaaucaagggccgucccgucucuagcucauuugauccuauuaaauucccagaggaccaguuucagguggcccuugaucaaguuuucgagaauauagaaaacagucaggcucugguggaccaguccaaucgcaucuugagcucugccgagaaggguaacacaggguucauuaucgucaucauucucauagcagugcugggcucaaguaugaucuuaguaagcauuuuuaucauuaucaaaaagacuaagaaacccaccggagcgccuccagaacuguccggcgugacaaauaacggguucauaccccacaauugaggacuaguuauaagacugacuagcccgaugggccucccaacgggcccuccuccccuccuugcaccgagauuaauaaaaaaaaaaaaaaaaaaaaaaaaaaaaaaaaaaaaaaaaaaaaaaaaaaaaaaaaaaaaaaaaugcaucccccccccccccccccccccccccccccccaaaggcucuuuucagagccaccagaauu

SEQ ID NO: 14776 - RNA, 1837 nt, Artificial Sequence
  HMPV/TN/92-4__ABM67072.1 fusion glycoprotein mRNA human (variant)
aggagaaagcuuaccaugagcuggaagguggucaucauuuucucccugcucauaacaccccagcacggccuuaaagagucuuaccuggaagagucaugcaguaccaucacugaaggguauuugagcguuuuaagaacgggaugguacaccaacguguuuacacuggagguaggugacguggaaaaucuaacuuguuccgauggcccuucucucauuaagaccgagcuggaccuucugaaaucggccuugagggagcucaagacagucucagcugaucaacuggcacgggaggaacagaucgaaaacccagggagcggaaguuucgugcugggcgccauugcgcucgguguugcugccgcagccgcugugaccgcaggggucgccaucgcuaaaacuauacgcuuagaguccgaggugacagccaucaauaacgcgcugaagaagaccaaugaagcaguaucuacgcuuggaaacggcguucgaguguuggccacugcuguccgugagcugaaagacuuugugcuaaagaaucucaccagagccauuaacaaaaauaagugcgauaucccggaccugaaaauggcagugagcuucucccaguuuaacaggcgguuccuuaaugucguucgccaguuuucagauaacgcuggcauuacacccgccaucagucuggacuugaugacugaugcggaacucgccagagcagugccuaauaugccaaccagcgcugggcaaauaaagcugauguuagagaacagggccaugguacggcgcaagggauucgguauucugaucggcguguaugggucuuccgucauuuacauggugcagcuccccaucuuuggaguuaucgacacaccuuguuggauugugaaagcugccccaucaugcagcgaaaagaaaggcaauuaugcaugucuucugcgagaggaucaggguugguacugccagaacgccgggaguaccgucuauuaccccaacgagaaggacugugaaacgagaggagaucauguguucugcgacacugcugcgggcauaaauguagcagagcaaucuaaagaauguaacaucaauauuuccacaaccaacuacccuugcaagguuagcacuggcaggcacccaaucucgaugguggccuugucuccgcuaggggcucuggucgccuguuauaaaggaguguccugcucaauagguaguaaucgggucggcauuaucaagcagcucaacaaggggugcagcuacaucacaaaucaggacgcagauaccgugacgauugacaacaccguuuaucagcuguccaaaguggagggagaacaacauguaaucaagggccgucccgucucuagcucauuugauccuauuaaauucccagagaaucaguuucagguggcccuugaccaaguuuucgagaacauagaaaauagucaggcucugguggaucaguccaaccgcaucuugagcucugccgagaaggguaauacaggguucauuaucgucaucauucucauagcagugcugggcucaaguaugaucuuaguaagcauuuuuaucauuaucaaaaagacuaagaaacccaccggagcgccuccagaacuguccggcgugacaaacaauggguucauaccccacaacugaggacuaguuauaagacugacuagcccgaugggccucccaacgggcccuccuccccuccuugcaccgagauuaauaaaaaaaaaaaaaaaaaaaaaaaaaaaaaaaaaaaaaaaaaaaaaaaaaaaaaaaaaaaaaaaaugcaucccccccccccccccccccccccccccccccaaaggcucuuuucagagccaccagaauu

SEQ ID NO: 14777 - RNA, 1837 nt, Artificial Sequence
  HMPV/TN/92-4__ABM67072.1 fusion glycoprotein mRNA human (variant)
aggagaaagcuuaccaugagcuggaagguggucaucauuuucucccugcucauaacaccccagcacggccuuaaagagucuuaccuggaagagucaugcaguaccaucacugaaggguauuugagcguuuuaagaacgggaugguacaccaacguguuuacacugccuguaggugacguggagaaucuaacuuguuccgauggcccaucucucauuaagaccgaacuggaccuucugaaaucggccuugagggagcucaagacagucucagcugaucaacuggcacgggaggaacagaucgagaacccggggagcggaaguuucgugcugggcgccauugcgcucgguguugcugccgcagccgcugugaccgcaggggucgccaucgcuaaaacuauacgcuuagaauccgaggugacagccaucaauaacgcgcugaagaagaccaaugaggcaguaucuacgcuuggaaacggcguucgaguguuggccacugcuguccgugaacugaaagacuuugugagcaagaaucuaaccagagccauuaacaaaaauaagugcgauaucgacgaucucaaaauggcaguguccuucucacaguuuaacaggcgguuccugaaugucguucgccaguuuagugacaacgcuggcauuacacccgccaucagccuugaucugaugacugacgcggaguuggccagagcagugccuaauaugccaaccucugcugggcaaauaaagcucaugcuggaaaacagggccaugguacggcgcaagggauucgguauuuuaaucggcguguauggguccucagucauuuacauggugcagcugcccaucuuuggaguuaucgauacaccuuguuggauugugaaagcugccccaagcugcagugagaagaaaggcaauuaugcaugucuccuucgagaagaccaggguugguacugccagaacgccgggucuaccgucuauuaccccaacgagaaggauugugagacgagaggagaccauguguucugcgacacugcugcgggcauaaauguagcagaacaauccaaagaguguaacaucaauauuagcacaaccaacuacccuugcaagguuucgacuggcaggcacccaaucucuaugguggcccuguccccguugggggcucuagucgccuguuauaaaggagugucaugcaguauagguagcaaucgggucggcauuaucaagcagcugaacaaggggugcuccuacaucacaaaucaggaugcagacaccgugacgauugauaacaccguuuaucagcucucuaaaguggaaggagagcaacauguaaucaagggccgucccgucagcucaaguuuugacccuauuaaauucccagaagaucaguuucagguggcccuggaccaaguuuucgagaauauagagaacucccaggcucuuguggaucagagcaaucgcauccugucuucagccgaaaaggguaacacaggguucauuaucgucaucauuuugauagcagugcucggcaguagcaugauccugguauccauuuuuaucauuaucaaaaagacuaagaaacccaccggagcgccuccagaguuaucuggcgugacaaauaacggguucauaccccacaauugaggacuaguuauaagacugacuagcccgaugggccucccaacgggcccuccuccccuccuugcaccgagauuaauaaaaaaaaaaaaaaaaaaaaaaaaaaaaaaaaaaaaaaaaaaaaaaaaaaaaaaaaaaaaaaaaugcaucccccccccccccccccccccccccccccccaaaggcucuuuucagagccaccagaauu

SEQ ID NO: 14778 - RNA, 1837 nt, Artificial Sequence
  HMPV/TN/92-4__ABM67072.1 fusion glycoprotein mRNA human (variant)
aggagaaagcuuaccaugagcuggaagguggucaucauuuucucccugcucauaacaccccagcacggccuuaaagagucuuaccuggaagagucaugcaguaccaucacugaaggguauuugagcguuuuaagaacgggaugguacaccaacguguuuacacugccuguaggugacguggagaaucuaacuuguuccgauggcccaucucucauuaagaccgaacuggaccuucugaaaucggccuugagggagcucaagacagucucagcugaucaacuggcacgggaggaacagaucgagaacccggggagcggaaguuucgugcugggcgccauugcgcucgguguugcugccgcagccgcugugaccgcaggggucgccaucgcuaaaacuauacgcuuagaauccgaggugacagccaucaauaacgcgcugaagaagaccaaugaggcaguaucuacgcuuggaaacggcguucgaguguuggccacugcuguccgugaacugaaagacuuugugagcaagaaucuaaccagagccauuaacaaaaauaagugcgauaucgacgaucucaaaauggcaguguccuucucacaguuuaacaggcgguuccugaaugucguucgccaguuuagugacaacgcuggcauuacacccgccaucagccuugaucugaugacugacgcggaguuggccagagcagugccuaauaugccaaccucugcugggcaaauaaagcucaugcuggaaaacagggccaugguacggcgcaagggauucgguauuuuaaucggcguguauggguccucagucauuuacauggugcagcugcccaucuuuggaguuaucgauacaccuuguuggauugugaaagcugccccaagcugcagugagaagaaaggcaauuaugcaugucuccuucgagaagaccaggguugguacugccagaacgccgggucuaccgucuauuaccccaacgagaaggauugugagacgagaggagaccauguguucugcgacacugcugcgggcauaaauguagcagaacaauccaaagaguguaacaucaauauuagcacaaccaacuacccuugcaagguuucgacuggcaggcacccaaucucuaugguggcccuguccccguugggggcucuagucgccuguuauaaaggagugucaugcaguauagguagcaaucgggucggcauuaucaagcagcugaacaaggggugcuccuacaucacaaaucaggaugcagacaccgugacgauugauaacaccguuuaucagcucucuaaaguggaaggagagcaacauguaaucaagggccgucccgucagcucaaguuuugacccuauuaaauucccagaaaaucaguuucagguggcccuggaucaaguuuucgagaacauagaaaauucccaggcucuuguggaccagagcaaccgcauccugucuucagccgagaaggguaauacaggguucauuaucgucaucauuuugauagcagugcucggcaguagcaugauccugguauccauuuuuaucauuaucaaaaagacuaagaaacccaccggagcgccuccagaguuaucuggcgugacaaacaauggguucauaccccacaacugaggacuaguuauaagacugacuagcccgaugggccucccaacgggcccuccuccccuccuugcaccgagauuaauaaaaaaaaaaaaaaaaaaaaaaaaaaaaaaaaaaaaaaaaaaaaaaaaaaaaaaaaaaaaaaaaugcaucccccccccccccccccccccccccccccccaaaggcucuuuucagagccaccagaauu

SEQ ID NO: 14779 - RNA, 1837 nt, Artificial Sequence
  HMPV/TN/92-4__ABM67072.1 fusion glycoprotein mRNA human (variant)
aggagaaagcuuaccaugagcuggaagguggucaucauuuucucccugcucauaacaccccagcacggccuuaaagagucuuaccuggaagagucaugcaguaccaucacugaaggguauuugagcguuuuaagaacgggaugguacaccaacguguuuacacuggagguaggugacguggaaaaucuaacuuguuccgauggcccuucucucauuaagaccgagcuggaccuucugaaaucggccuugagggagcucaagacagucucagcugaucaacuggcacgggaggaacagaucgaaaacccagggagcggaaguuucgugcugggcgccauugcgcucgguguugcugccgcagccgcugugaccgcaggggucgccaucgcuaaaacuauacgcuuagaguccgaggugacagccaucaauaacgcgcugaagaagaccaaugaagcaguaucuacgcuuggaaacggcguucgaguguuggccacugcuguccgugagcugaaagacuuugugagcaagaaucuaaccagagccauuaacaaaaauaagugcgauaucgacgaucucaaaauggcaguguccuucucacaguuuaacaggcgguuccugaaugucguucgccaguuuagugacaacgcuggcauuacaccggccaucagccuugaucugaugacugacgcggaauuggccagagcagugcccaauaugccuaccucugcugggcaaauaaagcucaugcuggagaacagggccaugguacggcgcaagggauucgguauuuuaaucggcguguauggguccucagucauuuacauggugcagcugccaaucuuuggaguuaucgauacacccuguuggauugugaaagcugccccuagcugcagugaaaagaaaggcaauuaugcaugucuccuucgagaggaccaggguugguacugccagaacgccgggucuaccgucuauuacccaaacgagaaggauugugaaacgagaggagaccauguguucugcgacacugcugcgggcauaaauguagcagagcaauccaaagaauguaacaucaauauuagcacaaccaacuaccccugcaagguuucgacuggcaggcacccuaucucuaugguggcccuguccccauugggggcucuagucgccuguuauaaaggagugucaugcaguauagguagcaaucgggucggcauuaucaagcagcugaacaaggggugcuccuacaucacaaaucaggaugcagacaccgugacgauugauaacaccguuuaucagcucucuaaaguggagggagaacaacauguaaucaagggccguccggucagcucaaguuuugaccccauuaaauucccugaggaucaguuucagguggcccuggaccaaguuuucgagaauauagaaaacucccaggcucuuguggaucagagcaaucgcauccugucuucagccgagaaggguaacacaggguucauuaucgucaucauuuugauagcagugcucggcaguagcaugauccugguauccauuuuuaucauuaucaaaaagacuaagaaaccaaccggagcgcccccugaauuaucuggcgugacaaauaacggguucauaccacacaauugaggacuaguuauaagacugacuagcccgaugggccucccaacgggcccuccuccccuccuugcaccgagauuaauaaaaaaaaaaaaaaaaaaaaaaaaaaaaaaaaaaaaaaaaaaaaaaaaaaaaaaaaaaaaaaaaugcaucccccccccccccccccccccccccccccccaaaggcucuuuucagagccaccagaauu

SEQ ID NO: 14780 - RNA, 1837 nt, Artificial Sequence
  HMPV/TN/92-4__ABM67072.1 fusion glycoprotein mRNA human (variant)
aggagaaagcuuaccaugagcuggaagguggucaucauuuucucccugcucauaacaccccagcacggccuuaaagagucuuaccuggaagagucaugcaguaccaucacugaaggguauuugagcguuuuaagaacgggaugguacaccaacguguuuacacuggagguaggugaccuagaaaaucucacuuguuccgauggcccuucucugauuaagaccgagcuugaccugacaaaaucggccuugagggagcucaagaccgugucagcugaucaacuggcacgggaggaacagaucgaaaacccagggagcggaaguuucguccugggcgccauugcgcucgguguggcugccgcagccgcuguuacugcagggguggccaucgcuaaaacaauacgcuuagaguccgaggucaccgccaucaauaacgcgcugaagaagacgaaugaagcagugucuacucuuggaaacggcguacgaguuuuggccaccgcugugcgugagcugaaagacuuugucagcaagaaucuaacaagagccauuaacaaaaauaagugcgauaucgacgaucucaaaauggcaguguccuucucacaguuuaacaggcgguuccugaaugugguccgccaguuuagugacaacgcuggcauuacuccggccaucagccuugaucugaugaccgacgcggaauuggccagagcaguucccaauaugccuacaucugcugggcaaauaaagcucaugcuggagaacagggccauggugcggcgcaagggauucgguauuuuaaucggcguauauggguccucagugauuuacaugguccagcugccaaucuuuggagugaucgauacccccuguuggauuguuaaagcugccccuagcugcagugaaaagaaaggcaauuaugcaugucuccuucgagaggaccaggguugguacugccagaacgccgggucuacgguguauuacccaaacgagaaggauugugaaacuagaggagaccaugucuucugcgacacagcugcgggcauaaauguggcagagcaauccaaagaauguaacaucaauauuagcaccacuaacuaccccugcaagguaucgacaggcaggcacccuaucucuaugguugcccuguccccauugggggcucuaguggccuguuauaaaggagucucaugcaguauagguagcaaucgggugggcauuaucaagcagcugaacaaggggugcuccuacaucaccaaucaggaugcagacacggucaccauugauaacacaguguaucagcucucuaaaguugagggagaacaacaugugaucaagggccguccgguaagcucaaguuuugaccccauuaaauucccugaggaucaguuucaggucgcccuggaccaaguguucgagaauauagaaaacucccaggcucuuguugaucagagcaaucgcauccugucuucagccgagaaggguaacacuggguucauuaucgugaucauuuugauagcaguccucggcaguagcaugauccugguguccauuuuuaucauuaucaaaaagaccaagaaaccaacaggagcgcccccugaauuaucuggcguaacuaauaacggguucauaccacacaauugaggacuaguuauaagacugacuagcccgaugggccucccaacgggcccuccuccccuccuugcaccgagauuaauaaaaaaaaaaaaaaaaaaaaaaaaaaaaaaaaaaaaaaaaaaaaaaaaaaaaaaaaaaaaaaaaugcaucccccccccccccccccccccccccccccccaaaggcucuuuucagagccaccagaauu

SEQ ID NO: 14781 - RNA, 1837 nt, Artificial Sequence
  HMPV/TN/92-4__ABM67072.1 fusion glycoprotein mRNA human (variant)
aggagaaagcuuaccaugagcuggaagguggucaucauuuucucccugcucauaacaccccagcacggccuuaaagagucuuaccuggaagagucaugcaguaccaucacugaaggguauuugagcguuuuaagaacgggaugguacaccaacguguuuacacuggagguaggugacguggaaaaucuaacuuguuccgauggcccuucucucauuaagaccgagcuggaccuuacaaaaucggcccugagggaguugaagaccgucucagcugaucaacucgcacgggaggaacagaucgaaaacccagggagcggaaguuucgugcugggcgccauugcgcuggguguugcugccgcagccgcugugacugcaggggucgccaucgcuaaaacaauacgccucgaguccgaggugaccgccaucaauaacgcguuaaagaagacgaaugaagcaguaucuacucugggaaacggcguucgagugcuugccaccgcuguccgugaguugaaagacuuugugcugaagaaucuaacaagagccauuaacaaaaauaagugcgauaucgacgaucucaaaauggcagugagcuucucccaguuuaacaggcgguuccugaaugucguucgccaguuuucagacaacgcuggcauuacuccggccaucagucuugaucugaugaccgacgcggaauuggccagagcagugcccaauaugccuacaagcgcugggcaaauaaagcucaugcuggagaacagggccaugguacggcgcaagggauucgguauuuuaaucggcguguaugggucuuccgucauuuacauggugcagcugccaaucuuuggaguuaucgauacccccuguuggauugugaaagcugccccuucaugcagcgaaaagaaaggcaauuaugcaugucuccuucgagaggaccaggguugguacugccagaacgccgggaguacggucuauuacccaaacgagaaggauugugaaacuagaggagaccauguguucugcgacacagcugcgggcauaaauguagcagagcaaucuaaagaauguaacaucaauauuuccaccacuaacuaccccugcaagguuagcacaggcaggcacccuaucucgaugguggcccugucuccauugggggcucuagucgccuguuauaaaggaguguccugcucaauagguaguaaucgggucggcauuaucaagcagcugaacaaggggugcagcuacaucaccaaucaggaugcagacacggugaccauugauaacacaguuuaucagcucuccaaaguggagggagaacaacauguaaucaagggccguccggucucuagcucauuugaccccauuaaauucccugaggaucaguuucagguggcccuggaccaaguuuucgagaauauagaaaacagucaggcucuuguggaucaguccaaucgcauccugagcucugccgagaaggguaacacuggguucauuaucgucaucauuuugauagcagugcucggcucaaguaugauccugguaagcauuuuuaucauuaucaaaaagaccaagaaaccaacaggagcgcccccugaauuauccggcgugacuaauaacggguucauaccacacaauugaggacuaguuauaagacugacuagcccgaugggccucccaacgggcccuccuccccuccuugcaccgagauuaauaaaaaaaaaaaaaaaaaaaaaaaaaaaaaaaaaaaaaaaaaaaaaaaaaaaaaaaaaaaaaaaaugcaucccccccccccccccccccccccccccccccaaaggcucuuuucagagccaccagaauu

SEQ ID NO: 14782 - RNA, 1837 nt, Artificial Sequence
  HMPV/TN/92-4__ABM67072.1 fusion glycoprotein mRNA human (variant)
aggagaaagcuuaccaugagcuggaagguggucaucauuuucucccugcucauaacaccccagcacggccuuaaagagucuuaccuggaagagucaugcaguaccaucacugaaggguauuugagcguuuuaagaacgggaugguacaccaacguguuuacacuggagguaggugacguggaaaaucuaacuuguuccgauggcccuucucucauuaagaccgagcuggaccuuacaaaaucggcccugagggaguugaagaccgucucagcugaucaacucgcacgggaggaacagaucgaaaacccagggagcggaaguuucgugcugggcgccauugcgcuggguguugcugccgcagccgcugugacugcaggggucgccaucgcuaaaacaauacgccucgaguccgaggugaccgccaucaauaacgcguuaaagaagacgaaugaagcaguaucuacucugggaaacggcguucgagugcuugccaccgcuguccgugaguugaaagacuuugugagcaagaaucuguggagagccauuaacaaaaauaagugcgauaucgacgaucuaaaaauggcaguguccuucucacaguuuaacaggcgguuccucaaugucguucgccaguuuagugacaacgcuggcauuacaccggccaucagccuggaucuuaugacugacgcggaacuggccagagcagugcccaauaugccuaccucugcugggcaaauaaaguugaugcucgagaacagggccaugguacggcgcaagggauucgguauucugaucggcguguauggguccucagucauuuacauggugcaguuaccaaucuuuggaguuaucgauacacccuguuggauugugaaagcugccccuagcugcagugaaaagaaaggcaauuaugcaugucugcuccgagaggaccaggguugguacugccagaacgccgggucuaccgucuauuacccaaacgagaaggauugugaaacgagaggagaccauguguucugcgacacugcugcgggcauaaauguagcagagcaauccaaagaauguaacaucaauauuagcacaaccaacuaccccugcaagguuucgacuggcaggcacccuaucucuaugguggcccuuuccccacugggggcuuuggucgccuguuauaaaggagugucaugcaguauagguagcaaucgggucggcauuaucaagcagcuaaacaaggggugcuccuacaucacaaaucaggaugcagacaccgugacgauugauaacaccguuuaucagcugucuaaaguggagggagaacaacauguaaucaagggccguccggucagcucaaguuuugaccccauuaaauucccugaggaucaguuucagguggcccucgaccaaguuuucgagaauauagaaaacucccaggcucugguggaucagagcaaucgcauccuuucuucagccgagaaggguaacacaggguucauuaucgucaucauucugauagcaguguugggcaguagcaugauccucguauccauuuuuaucauuaucaaaaagacuaagaaaccaaccggagcgcccccugaacugucuggcgugacaaauaacggguucauaccacacaauugaggacuaguuauaagacugacuagcccgaugggccucccaacgggcccuccuccccuccuugcaccgagauuaauaaaaaaaaaaaaaaaaaaaaaaaaaaaaaaaaaaaaaaaaaaaaaaaaaaaaaaaaaaaaaaaaugcaucccccccccccccccccccccccccccccccaaaggcucuuuucagagccaccagaauu

SEQ ID NO: 14783 - RNA, 1837 nt, Artificial Sequence
  HMPV/TN/92-4__ABM67072.1 fusion glycoprotein mRNA human (variant)
aggagaaagcuuaccaugagcuggaagguggucaucauuuucucccugcucauaacaccccagcacggccuuaaagagucuuaccuggaagagucaugcaguaccaucacugaaggguauuugagcguuuuaagaacgggaugguacaccaacguguuuacacuggagguaggugaccuagaaaaucucacuuguuccgauggcccuucucugauuaagaccgagcuugaccuguugaaaucggcccucagggagcugaagacagugucagcugaucaacuggcacgggaggaacagaucgaaaacccagggagcggaaguuucguccucggcgccauugcguuagguguggcugccgcagccgcuguuaccgcagggguggccaucgcuaaaacuauacgccuggaguccgaggucacagccaucaauaacgcgcuuaagaagaccaaugaagcagugucuacguugggaaacggcguacgaguucuggccacugcugugcgugagcuaaaagacuuuguccucaagaaucuguggagagccauuaacaaaaauaagugcgauaucgacgaucuuaaaauggcagugagcuucucccaguuuaacaggcgguuccugaaugugguccgccaguuuucagacaacgcuggcauuaccccggccaucaguuuggaucucaugacagacgcggaacuggccagagcaguucccaauaugccuacuagcgcugggcaaauaaaguuaaugcuggagaacagggccauggugcggcgcaagggauucgguauucucaucggcguauaugggucuuccgugauuuacaugguccagcuuccaaucuuuggagugaucgauacccccuguuggauuguuaaagcugccccuucaugcagcgaaaagaaaggcaauuaugcaugucuguugcgagaggaccaggguugguacugccagaacgccgggaguacaguguauuacccaaacgagaaggauugugaaaccagaggagaccaugucuucugcgacacggcugcgggcauaaauguggcagagcaaucuaaagaauguaacaucaauauuuccacuacaaacuaccccugcaagguaagcaccggcaggcacccuaucucgaugguugcccuaucuccacugggggcucucguggccuguuauaaaggagucuccugcucaauagguaguaaucgggugggcauuaucaagcagcugaacaaggggugcagcuacaucacuaaucaggaugcagacacagucaccauugauaacacgguguaucagcuuuccaaaguugagggagaacaacaugugaucaagggccguccgguaucuagcucauuugaccccauuaaauucccugaggaucaguuucaggucgcccuggaccaaguguucgagaauauagaaaacagucaggcuuugguugaucaguccaaucgcauccucagcucugccgagaaggguaacaccggguucauuaucgugaucauucugauagcagucuuaggcucaaguaugauccuggugagcauuuuuaucauuaucaaaaagacaaagaaaccaacuggagcgcccccugaacuauccggcguaaccaauaacggguucauaccacacaauugaggacuaguuauaagacugacuagcccgaugggccucccaacgggcccuccuccccuccuugcaccgagauuaauaaaaaaaaaaaaaaaaaaaaaaaaaaaaaaaaaaaaaaaaaaaaaaaaaaaaaaaaaaaaaaaaugcaucccccccccccccccccccccccccccccccaaaggcucuuuucagagccaccagaauu

SEQ ID NO: 14784 - RNA, 1837 nt, Artificial Sequence
  HMPV/TN/92-4__ABM67072.1 fusion glycoprotein mRNA human (variant)
aggagaaagcuuaccaugagcuggaagguggucaucauuuucucccugcucauaacaccccagcacggccuuaaagagucuuaccuggaagagucaugcaguaccaucacugaaggguauuugagcguuuuaagaacgggaugguacaccaacguguuuacacugccuguaggugacguggagaaucuaacuuguuccgauggcccaucucucauuaagaccgaacuggaccuuacaaaaucggcccugagggaguugaagaccgucucagcugaucaacucgcacgggaggaacagaucgagaacccggggagcggaaguuucgugcugggcgccauugcgcuggguguugcugccgcagccgcugugacugcaggggucgccaucgcuaaaacaauacgccucgaauccgaggugaccgccaucaauaacgcguuaaagaagacgaaugaggcaguaucuacucugggaaacggcguucgagugcuugccaccgcuguccgugaauugaaagacuuugugagcaagaaucugacaagagccauuaacaaaaauaagugcgauaucgacgaucuaaaaauggcaguguccuucucacaguuuaacaggcgguuccucaaugucguucgccaguuuagugacaacgcuggcauuacucccgccaucagccuggaucuuaugaccgacgcggagcuggccagagcagugccuaauaugccaacaucugcugggcaaauaaaguugaugcucgaaaacagggccaugguacggcgcaagggauucgguauucugaucggcguguauggguccucagucauuuacauggugcaguuacccaucuuuggaguuaucgauaccccuuguuggauugugaaagcugccccaagcugcagugagaagaaaggcaauuaugcaugucugcuccgagaagaccaggguugguacugccagaacgccgggucuacggucuauuaccccaacgagaaggauugugagacuagaggagaccauguguucugcgacacagcugcgggcauaaauguagcagaacaauccaaagaguguaacaucaauauuagcaccacuaacuacccuugcaagguuucgacaggcaggcacccaaucucuaugguggcccuuuccccgcugggggcuuuggucgccuguuauaaaggagugucaugcaguauagguagcaaucgggucggcauuaucaagcagcuaaacaaggggugcuccuacaucaccaaucaggaugcagacacggugaccauugauaacacaguuuaucagcugucuaaaguggaaggagagcaacauguaaucaagggccgucccgucagcucaaguuuugacccuauuaaauucccagaagaucaguuucagguggcccucgaccaaguuuucgagaauauagagaacucccaggcucugguggaucagagcaaucgcauccuuucuucagccgaaaaggguaacacuggguucauuaucgucaucauucugauagcaguguugggcaguagcaugauccucguauccauuuuuaucauuaucaaaaagaccaagaaacccacaggagcgccuccagagcugucuggcgugacuaauaacggguucauaccccacaauugaggacuaguuauaagacugacuagcccgaugggccucccaacgggcccuccuccccuccuugcaccgagauuaauaaaaaaaaaaaaaaaaaaaaaaaaaaaaaaaaaaaaaaaaaaaaaaaaaaaaaaaaaaaaaaaaugcaucccccccccccccccccccccccccccccccaaaggcucuuuucagagccaccagaauu

SEQ ID NO: 14785 - RNA, 1837 nt, Artificial Sequence
  HMPV/TN/92-4__ABM67072.1 fusion glycoprotein mRNA human (variant)
aggagaaagcuuaccaugagcuggaagguggucaucauuuucucccugcucauaacaccccagcacggccuuaaagagucuuaccuggaagagucaugcaguaccaucacugaaggguauuugagcguuuuaagaacgggaugguacaccaacguguuuacacuggagguaggugacguggaaaaucuaacuuguuccgauggcccuucucucauuaagaccgagcuggaccuuacaaaaucggcccugagggaguugaagaccgucucagcugaucaacucgcacgggaggaacagaucgaaaacccagggagcggaaguuucgugcugggcgccauugcgcuggguguugcugccgcagccgcugugacugcaggggucgccaucgcuaaaacaauacgccucgaguccgaggugaccgccaucaauaacgcguuaaagaagacgaaugaagcaguaucuacucugggaaacggcguucgagugcuugccaccgcuguccgugaguugaaagacuuugugagcaagaaucugacaagagccauuaacaaaaauaagugcgauaucccggaccuaaaaauggcaguguccuucucacaguuuaacaggcgguuccucaaugucguucgccaguuuagugauaacgcuggcauuacucccgccaucagccuggaccuuaugaccgaugcggaacuggccagagcagugccuaauaugccaacaucugcugggcaaauaaaguugaugcucgagaacagggccaugguacggcgcaagggauucgguauucugaucggcguguauggguccucagucauuuacauggugcaguuacccaucuuuggaguuaucgacaccccuuguuggauugugaaagcugccccaagcugcagugaaaagaaaggcaauuaugcaugucugcuccgagaggaucaggguugguacugccagaacgccgggucuacggucuauuaccccaacgagaaggacugugaaacuagaggagaucauguguucugcgacacagcugcgggcauaaauguagcagagcaauccaaagaauguaacaucaauauuagcaccacuaacuacccuugcaagguuucgacaggcaggcacccaaucucuaugguggcccuuuccccgcugggggcuuuggucgccuguuauaaaggagugucaugcaguauagguagcaaucgggucggcauuaucaagcagcuaaacaaggggugcuccuacaucaccaaucaggacgcagauacggugaccauugacaacacaguuuaucagcugucuaaaguggagggagaacaacauguaaucaagggccgucccgucagcucaaguuuugauccuauuaaauucccagaggaccaguuucagguggcccucgaucaaguuuucgagaauauagaaaacucccaggcucugguggaccagagcaaucgcauccuuucuucagccgagaaggguaacacuggguucauuaucgucaucauucugauagcaguguugggcaguagcaugauccucguauccauuuuuaucauuaucaaaaagaccaagaaacccacaggagcgccuccagaacugucuggcgugacuaauaacggguucauaccccacaauugaggacuaguuauaagacugacuagcccgaugggccucccaacgggcccuccuccccuccuugcaccgagauuaauaaaaaaaaaaaaaaaaaaaaaaaaaaaaaaaaaaaaaaaaaaaaaaaaaaaaaaaaaaaaaaaaugcaucccccccccccccccccccccccccccccccaaaggcucuuuucagagccaccagaauu

SEQ ID NO: 14786 - RNA, 1837 nt, Artificial Sequence
  HMPV/TN/92-4__ABM67072.1 fusion glycoprotein mRNA human (variant)
aggagaaagcuuaccaugagcuggaagguggucaucauuuucucccugcucauaacaccccagcacggccuuaaagagucuuaccuggaagagucaugcaguaccaucacugaaggguauuugagcguuuuaagaacgggaugguacaccaacguguuuacacuggagguaggugacguggaaaaucuaacuuguuccgauggcccuucucucauuaagaccgagcuggaccuuacaaaaucggcccugagggaguugaagaccgucucagcugaucaacucgcacgggaggaacagaucgaaaacccagggagcggaaguuucgugcugggcgccauugcgcuggguguugcugccgcagccgcugugacugcaggggucgccaucgcuaaaacaauacgccucgaguccgaggugaccgccaucaauaacgcguuaaagaagacgaaugaagcaguaucuacucugggaaacggcguucgagugcuugccaccgcuguccgugaguugaaagacuuugugagcaagaaucugacaagagccauuaacaaaaauaagugcccgaucgaugaccuaaaaauggcaguguccuucucacaguuuaacaggcgguuccucaaugucguucgccaguuuagugauaacgcuggcauuacucccgccaucagccuggaccuuaugaccgaugcggaacuggccagagcagugccuaauaugccaacaucugcugggcaaauaaaguugaugcucgagaacagggccaugguacggcgcaagggauucgguauucugaucggcguguauggguccucagucauuuacauggugcaguuacccaucuuuggaguuaucgacaccccuuguuggauugugaaagcugccccaagcugcagugaaaagaaaggcaauuaugcaugucugcuccgagaggaucaggguugguacugccagaacgccgggucuacggucuauuaccccaacgagaaggacugugaaacuagaggagaucauguguucugcgacacagcugcgggcauaaauguagcagagcaauccaaagaauguaacaucaauauuagcaccacuaacuacccuugcaagguuucgacaggcaggcacccaaucucuaugguggcccuuuccccgcugggggcuuuggucgccuguuauaaaggagugucaugcaguauagguagcaaucgggucggcauuaucaagcagcuaaacaaggggugcuccuacaucaccaaucaggacgcagauacggugaccauugacaacacaguuuaucagcugucuaaaguggagggagaacaacauguaaucaagggccgucccgucagcucaaguuuugauccuauuaaauucccagaggaccaguuucagguggcccucgaucaaguuuucgagaauauagaaaacucccaggcucugguggaccagagcaaucgcauccuuucuucagccgagaaggguaacacuggguucauuaucgucaucauucugauagcaguguugggcaguagcaugauccucguauccauuuuuaucauuaucaaaaagaccaagaaacccacaggagcgccuccagaacugucuggcgugacuaauaacggguucauaccccacaauugaggacuaguuauaagacugacuagcccgaugggccucccaacgggcccuccuccccuccuugcaccgagauuaauaaaaaaaaaaaaaaaaaaaaaaaaaaaaaaaaaaaaaaaaaaaaaaaaaaaaaaaaaaaaaaaaugcaucccccccccccccccccccccccccccccccaaaggcucuuuucagagccaccagaauu

SEQ ID NO: 14787 - RNA, 1837 nt, Artificial Sequence
  HMPV/TN/92-4__ABM67072.1 fusion glycoprotein mRNA human (variant)
aggagaaagcuuaccaugagcuggaagguggucaucauuuucucccugcucauaacaccccagcacggccuuaaagagucuuaccuggaagagucaugcaguaccaucacugaaggguauuugagcguuuuaagaacgggaugguacaccaacguguuuacacuggagguaggugacguggaaaaucuaacuuguuccgauggcccuucucucauuaagaccgagcuggaccuuacaaaaucggcccugagggaguugaagaccgucucagcugaucaacucgcacgggaggaacagaucgaaaacccagggagcggaaguuucgugcugggcgccauugcgcuggguguugcugccgcagccgcugugacugcaggggucgccaucgcuaaaacaauacgccucccguccgaggugaccgccaucaauaacgcguuaaagaagacgaaugaggcaguaucuacucugggaaacggcguucgagugcuugccaccgcuguccgugaauugaaagacuuugugagcaagaaucugacaagagccauuaacaaaaauaagugcgauaucgacgaucuaaaaauggcaguguccuucucacaguuuaacaggcgguuccucaaugucguucgccaguuuagugacaacgcuggcauuacucccgccaucagccuggaucuuaugaccgacgcggagcuggccagagcagugccuaauaugccaacaucugcugggcaaauaaaguugaugcucgaaaacagggccaugguacggcgcaagggauucgguauucugaucggcguguauggguccucagucauuuacauggugcaguuacccaucuuuggaguuaucgauaccccuuguuggauugugaaagcugccccaagcugcagugagaagaaaggcaauuaugcaugucugcuccgagaagaccaggguugguacugccagaacgccgggucuacggucuauuaccccaacgagaaggauugugagacuagaggagaccauguguucugcgacacagcugcgggcauaaauguagcagaacaauccaaagaguguaacaucaauauuagcaccacuaacuacccuugcaagguuucgacaggcaggcacccaaucucuaugguggcccuuuccccgcugggggcuuuggucgccuguuauaaaggagugucaugcaguauagguagcaaucgggucggcauuaucaagcagcuaaacaaggggugcuccuacaucaccaaucaggaugcagacacggugaccauugauaacacaguuuaucagcugucuaaaguggaaggagagcaacauguaaucaagggccgucccgucagcucaaguuuugacccuauuaaauucccagaagaucaguuucagguggcccucgaccaaguuuucgagaauauagagaacucccaggcucugguggaucagagcaaucgcauccuuucuucagccgaaaaggguaacacuggguucauuaucgucaucauucugauagcaguguugggcaguagcaugauccucguauccauuuuuaucauuaucaaaaagaccaagaaacccacaggagcgccuccagagcugucuggcgugacuaauaacggguucauaccccacaauugaggacuaguuauaagacugacuagcccgaugggccucccaacgggcccuccuccccuccuugcaccgagauuaauaaaaaaaaaaaaaaaaaaaaaaaaaaaaaaaaaaaaaaaaaaaaaaaaaaaaaaaaaaaaaaaaugcaucccccccccccccccccccccccccccccccaaaggcucuuuucagagccaccagaauu

SEQ ID NO: 14788 - RNA, 1837 nt, Artificial Sequence
  HMPV/TN/92-4__ABM67072.1 fusion glycoprotein mRNA human (variant)
aggagaaagcuuaccaugagcuggaagguggucaucauuuucucccugcucauaacaccccagcacggccuuaaagagucuuaccuggaagagucaugcaguaccaucacugaaggguauuugagcguuuuaagaacgggaugguacaccaacguguuuacacuggagguaggugacguggaaaaucuaacuuguuccgauggcccuucucucauuaagaccgagcuggaccuuacaaaaucggcccugagggaguugaagaccgucucagcugaucaacucgcacgggaggaacagaucgaaaacccagggagcggaaguuucgugcugggcgccauugcgcuggguguugcugccgcagccgcugugacugcaggggucgccaucgcuaaaacaauacgccucgaguccgaggugaccgccaucaauaacgcguuaaagaagacgaaugaagcaguaucuacucugggaaacggcguucgagugcuugccaccgcuguccgugaguugaaagacuuugugagcaagaaucugacaagagccauuaacaaaaauaagugcgauaucgacgaucuaaaaauggcaguguccuucucacaguuuaacaggcgguuccucaaugucguucgccaguuuagugacaacgcuggcauuacuccggccaucagccuggaucuuaugaccgacgcggaacuggccagagcagugcccaauaugccuacaucugcugggcaaauaaaguugaugcucgagaacagggccaugguacggcgcaagggauucgguauucugaucggcguguauggguccucagucauuuacauggugcaguuaccaaucuuuggaguuaucgauacccccuguuggauugugaaagcugccccuagcugcagugaaaagaaaggcaauuaugcaugucugcuccgagaggaccaggguugguacugccagaacgccgggucuacggucuauuacccaaacgagaaggauugugaaacuagaggagaccauguguucugcgacacagcugcgggcauaaauguagcagagcaauccaaagaauguaacaucaauauuagcaccacuaacuaccccugcaagguuucgacaggcaggcacccuaucucuaugguggcccuuuccccacugggggcuuuggucgccuguuauaaaggagugucaugcaguauagguagcaaucgggucggcauuaucaagcagcuaaacaaggggugcuccuacaucaccaaucaggaugcagacacggugaccauugauaacacaguuuaucagcugucuaaaguggagggagaacaacauguaaucaagggccguccggucagcucaaguuuucccccuauuaaauucccagaggaccaguuucagguggcccucgaucaaguuuucgagaauauagaaaacucccaggcucugguggaccagagcaaucgcauccuuucuucagccgagaaggguaacacuggguucauuaucgucaucauucugauagcaguguugggcaguagcaugauccucguauccauuuuuaucauuaucaaaaagaccaagaaacccacaggagcgccuccagaacugucuggcgugacuaauaacggguucauaccccacaauugaggacuaguuauaagacugacuagcccgaugggccucccaacgggcccuccuccccuccuugcaccgagauuaauaaaaaaaaaaaaaaaaaaaaaaaaaaaaaaaaaaaaaaaaaaaaaaaaaaaaaaaaaaaaaaaaugcaucccccccccccccccccccccccccccccccaaaggcucuuuucagagccaccagaauu

SEQ ID NO: 14789 - RNA, 1837 nt, Artificial Sequence
  HMPV/TN/92-4__ABM67072.1 fusion glycoprotein mRNA human (variant)
aggagaaagcuuaccaugagcuggaagguggucaucauuuucucccugcucauaacaccccagcacggccuuaaagagucuuaccuggaagagucaugcaguaccaucacugaaggguauuugagcguuuuaagaacgggaugguacaccaacguguuuacacuggagguaggugacguggaaaaucuaacuuguuccgauggcccuucucucauuaagaccgagcuggaccuuacaaaaucggcccugagggaguugaagaccgucucagcugaucaacucgcacgggaggaacagaucgaaaacccagggagcggaaguuucgugcugggcgccauugcgcuggguguugcugccgcagccgcugugacugcaggggucgccaucgcuaaaacaauacgccucgaguccgaggugaccgccaucaauaacgcguuaaagaagacgaaugaagcaguaucuacucugggaaacggcguucgagugcuugccaccgcuguccgugaguugaaagacuuugugagcaagaaucugacaagagccauuaacaaaaauaagugcgauaucgacgaucuaaaaauggcaguguccuucucacaguuuaacaggcgguuccucaaugucguucgccaguuuagugacaacgcuggcauuacuccggccaucagccuggaucuuaugaccgacgcggaacuggccagagcagugcccaauaugccuacaucugcugggcaaauaaaguugaugcucgagaacagggccaugguacggcgcaagggauucgguauucugaucggcguguauggguccucagucauuuacauggugcaguuaccaaucuuuggaguuaucgauacccccuguuggauugugaaagcugccccuagcugcagugaaaagaaaggcaauuaugcaugucugcuccgagaggaccaggguugguacugccagaacgccgggucuacggucuauuacccaaacgagaaggauugugaaacuagaggagaccauguguucugcgacacagcugcgggcauaaauguagcagagcaauccaaagaauguaacaucaauauuagcaccacuaacuaccccugcaagguuucgacaggcaggcacccuaucucuaugguggcccuuuccccacugggggcuuuggucgccuguuauaaaggagugucaugcaguauagguagcaaucgggucggcauuaucaagcagcuaaacaaggggugcuccuacaucaccaaucaggaugcagacacggugaccauugauaacacaguuuaucagcugucuaaaguggagggagaacaacauguaaucaagggccguccggucagcucaaguuuugaccccauuaaauucccugagaaucaguuucagguggcccucgaucaaguuuucgagaacauagaaaauucccaggcucugguggaccagagcaaccgcauccuuucuucagccgagaaggguaauacuggguucauuaucgucaucauucugauagcaguguugggcaguagcaugauccucguauccauuuuuaucauuaucaaaaagaccaagaaaccaacaggagcgcccccugaacugucuggcgugacuaacaauggguucauaccacacaacugaggacuaguuauaagacugacuagcccgaugggccucccaacgggcccuccuccccuccuugcaccgagauuaauaaaaaaaaaaaaaaaaaaaaaaaaaaaaaaaaaaaaaaaaaaaaaaaaaaaaaaaaaaaaaaaaugcaucccccccccccccccccccccccccccccccaaaggcucuuuucagagccaccagaauu

SEQ ID NO: 14790 - RNA, 1837 nt, Artificial Sequence
  HMPV/TN/92-4__ABM67072.1 fusion glycoprotein mRNA human (variant)
aggagaaagcuuaccaugagcuggaagguggucaucauuuucucccugcucauaacaccccagcacggccuuaaagagucuuaccuggaagagucaugcaguaccaucacugaaggguauuugagcguuuuaagaacgggaugguacaccaacguguuuacacuggagguaggugacguggaaaaucuaacuuguuccgauggcccuucucucauuaagaccgagcuggaccuuacaaaaucggcccugagggaguugaagaccgucucagcugaucaacucgcacgggaggaacagaucgaaaacccagggagcggaaguuucgugcugggcgccauugcgcuggguguugcugccgcagccgcugugacugcaggggucgccaucgcuaaaacaauacgccucgaguccgaggugaccgccaucaauaacgcguuaaagaagacgaaugaagcaguaucuacucugggaaacggcguucgagugcuugccaccgcuguccgugaguugaaagacuuugugagcaagaaucugacaagagccauuaacaaaaauaagugcgauaucgacgaucuaaaaauggcaguguccuucucacaguuuaacaggcgguuccucaaugucguucgccaguuuagugacaacgcuggcauuacuccggccaucagccuggaucuuaugaccgacgcggaacuggccagagcagugcccaauaugccuacaucugcugggcaaauaaaguugaugcucgagaacagggccaugguacggcgcaagggauucgguauucugaucggcguguauggguccucagucauuuacauggugcaguuaccaaucuuuggaguuaucgauacccccuguuggauugugaaagcugccccuagcugcagugaaaagaaaggcaauuaugcaugucugcuccgagaggaccaggguugguacugccagaacgccgggucuacggucuauuacccaaacgagaaggauugugaaacuagaggagaccauguguucugcgacacagcugcgggcauaaauguagcagagcaauccaaagaauguaacaucaauauuagcaccacuaacuaccccugcaagguuucgacaggcaggcacccuaucucuaugguggcccuuuccccacugggggcuuuggucgccuguuauaaaggagugucaugcaguauagguagcaaucgggucggcauuaucaagcagcuaaacaaggggugcuccuacaucaccaaucaggaugcagacacggugaccauugauaacacaguuuaucagcugucuaaaguggagggagaacaacauguaaucaagggccguccggucagcucaaguuuugaccccauuaaauucccucaggaucaguuucaaguggcccucgaccagguuuucgagaauauagagaacucccaggcucugguggaucagagcaaucgcauccuuucuucagccgaaaaggguaacacuggguucauuaucgucaucauucugauagcaguguugggcaguagcaugauccucguauccauuuuuaucauuaucaaaaagaccaagaaaccaacaggagcgcccccugagcugucuggcgugacuaauaacggguucauaccacacaauugaggacuaguuauaagacugacuagcccgaugggccucccaacgggcccuccuccccuccuugcaccgagauuaauaaaaaaaaaaaaaaaaaaaaaaaaaaaaaaaaaaaaaaaaaaaaaaaaaaaaaaaaaaaaaaaaugcaucccccccccccccccccccccccccccccccaaaggcucuuuucagagccaccagaauu

SEQ ID NO: 14791 - RNA, 1837 nt, Artificial Sequence
  HMPV/TN/92-4__ABM67072.1 fusion glycoprotein mRNA human (variant)
aggagaaagcuuaccaugagcuggaagguggucaucauuuucucccugcucauaacaccccagcacggccuuaaagagucuuaccuggaagagucaugcaguaccaucacugaaggguauuugagcguuuuaagaacgggaugguacaccaacguguuuacacuggagguaggugacguggaaaaucuaacuuguuccgauggcccuucucucauuaagaccgagcuggaccuuacaaaaucggcccugagggaguugaagaccgucucagcugaucaacucgcacgggaggaacagaucgaaaacccagggagcggaaguuucgugcugggcgccauugcgcuggguguugcugccgcagccgcugugacugcaggggucgccaucgcuaaaacaauacgccucgaguccgaggugaccgccaucaauaacgcguuaaagaagacgaaugaagcaguaucuacucugggaaacggcguucgagugcuugccaccgcuguccgugaguugaaagacuuugugagcaagaaucugacaagagccauuaacaaaaauaagugcgauaucgacgaucuaaaaauggcaguguccuucucacaguggaacaggcgguuucucaaugucguucgccaguucagugacaacgcuggcauuacuccggccaucagccuggaucuuaugaccgacgcggaacuggccagagcagugcccaauaugccuacaucugcugggcaaauaaaguugaugcucgagaacagggccaugguacggcgcaagggauuugguauucugaucggcguguauggguccucagucauuuacauggugcaguuaccaaucuucggaguuaucgauacccccuguuggauugugaaagcugccccuagcugcagugaaaagaaaggcaauuaugcaugucugcuccgagaggaccaggguugguacugccagaacgccgggucuacggucuauuacccaaacgagaaggauugugaaacuagaggagaccauguguuuugcgacacagcugcgggcauaaauguagcagagcaauccaaagaauguaacaucaauauuagcaccacuaacuaccccugcaagguuucgacaggcaggcacccuaucucuaugguggcccuuuccccacugggggcuuuggucgccuguuauaaaggagugucaugcaguauagguagcaaucgggucggcauuaucaagcagcuaaacaaggggugcuccuacaucaccaaucaggaugcagacacggugaccauugauaacacaguuuaucagcugucuaaaguggagggagaacaacauguaaucaagggccguccggucagcucaaguuucgaccccauuaaauuuccugaggaucaguuccagguggcccucgaccaaguuuuugagaauauagaaaacucccaggcucugguggaucagagcaaucgcauccuuucuucagccgagaaggguaacacuggguucauuaucgucaucauucugauagcaguguugggcaguagcaugauccucguauccauuuucaucauuaucaaaaagaccaagaaaccaacaggagcgcccccugaacugucuggcgugacuaauaacggguuuauaccacacaauugaggacuaguuauaagacugacuagcccgaugggccucccaacgggcccuccuccccuccuugcaccgagauuaauaaaaaaaaaaaaaaaaaaaaaaaaaaaaaaaaaaaaaaaaaaaaaaaaaaaaaaaaaaaaaaaaugcaucccccccccccccccccccccccccccccccaaaggcucuuuucagagccaccagaauu

SEQ ID NO: 14792 - RNA, 1837 nt, Artificial Sequence
  HMPV/NL/1/99__AAQ90145.1 fusion glycoprotein mRNA human (F0)
aggagaaagcuuaccaugagcuggaaggugaugaucauuauaucccugcucaucacaccccagcacggccuuaaagagucuuaccuggaagagucaugcaguaccauuacugaaggguauuugagcgucuuaagaacgggaugguacaccaacguuuucacacuggaggugggugacguagaaaaucuaacuuguaccgauggcccuucccucaucaagacagagcuggaccuuaccaaaucugcccugagggaguugaagacugugucggcugaucaacucgcacgggaggaacagauugaaaacccacgccagucacgauuuguccugggggccaucgcgcugggaguggcuacagccgcagccguuaccgcuggcauagcaaucgccaaaacgauucgucucgagagcgaggugaaugcuaucaagggugccuuaaagcagacuaacgaagcggucaguacccuggggaauggagugagaguacuugcaacagccguuagggaguugaaagaauuuguguccaagaaccugacuucugcuauuaaucggaacaaaugcgacaucgccgaucuaaagauggcagucagcuuuucccaauucaaucgcagauuucucaacguggugaggcaguucucagacaaugcuggcauaaccccggccauuagucuggaucuuaugacagacgcggagcuggcccgggcagucagcuauaugcccaccucugcuggccagaucaaauugaugcucgaaaaccgcgccaugguucgaagaaagggguuugggauucugaucgguguguacggcuccucaguaaucuauauggugcaguuaccuauuuucggggucauagauacgccauguuggaucauuaaggcugcccccagcugcagugagaaaaauggaaacuacgcaugucugcucagggaggaccaaggcugguauugcaagaaugccgguucuacuguguacuacccuaacgaaaaagauugugagacacggggagaccauguuuucugcgauaccgcugcgggaaucaacguggcagaacagucccgugaguguaauauaaacauuagcacuacaaauuauccaugcaaggucucgaccggccgccaccccaucucuaugguggcccuuuccccucugggcgcuuugguagccuguuacaaagggguuucaugcaguaucggaagcaacuggguggguauuaucaagcagcuaccaaaaggcugcuccuauauuacgaaucaggacgcagacaccgucacaauagauaacacuguguaccaacugucuaaggucgaaggggagcagcaugugaucaagggaagaccgguuagcucaaguuucgaccccauuaaauuuccugaggaucaguucaauguggcccucgaccaaguauuugaauccaucgagaacagccaggcucuggucgaucagucuaauaagauccuuaacucagccgaaaaaggcaauaccgguuucauuauagugguuauccugguggcagucuuggggcucacaaugauuagugugagcaucauuaucauaaucaagaaaacuaggaagccaaccggcgcgcccccugagcugaacggaguaacaaauggcggguucauuccacacuccugaggacuaguuauaagacugacuagcccgaugggccucccaacgggcccuccuccccuccuugcaccgagauuaauaaaaaaaaaaaaaaaaaaaaaaaaaaaaaaaaaaaaaaaaaaaaaaaaaaaaaaaaaaaaaaaaugcaucccccccccccccccccccccccccccccccaaaggcucuuuucagagccaccagaauu

SEQ ID NO: 14793 - RNA, 1837 nt, Artificial Sequence
  HMPV/Sabana__AEA02280.1 fusion glycoprotein mRNA human (F0)
aggagaaagcuuaccaugagcuggaaggugaugaucauuauaucccugcucaucacaccccagcacggccuuaaagagucuuaccuggaagagucaugcaguaccauuacugaaggguauuugagcgucuuaagaacgggaugguacaccaacguuuucacacuggaggugggugacguagaaaaucuaacuuguaccgauggcccuucccucaucaagacagagcuggaccuuaccaaaucugcccugagggaguugaagacugugucggcugaucaacucgcacgggaggaacagauugaaaacccacgccagucacgauuuguccugggggccaucgcgcugggaguggcuacagccgcagccguuaccgcuggcauagcaaucgccaaaacgauucgucucgagagcgaggugaaugcuaucaagggugccuuaaagacuaccaacgaagcggucaguacacuggggaauggagugagaguacuugcaacugccguuagggaguugaaagaauuuguguccaagaaccugaccucugcuauuaauaaaaacaagugcgacaucgccgaucuaaaaauggcagucagcuuuucccaguucaaucggcgcuuucucaacguggugagacaauucucagacaaugcuggcauaacaccggccauuagucuggaucuuaugaacgacgcggagcuggccagggcagucagcuauaugcccaccucugcuggccagaucaaguugaugcucgaaaaucgggccaugguucgccgaaagggguuugggauucugaucgguguguacggcuccucaguaaucuauauggugcaguuaccuauuuucggggucauaaacacgccauguuggaucauuaaagcugcccccagcugcagugagaaggauggaaauuacgcaugucugcucagagaggaccagggcugguauugcaaaaacgccgguucuacuguguacuacccuaacgaaaaggauugugagacaaggggagaccauguuuucugcgauaccgcugcgggaaucaauguggcagaacaaucccgggaguguaacauaaauauuagcacuacaaacuauccaugcaaagucucgaccggccgucaccccaucucuaugguggcccuuuccccucugggcgcuuugguagccuguuacaaggggguuucaugcaguacgggaagcaaucagguggguaucauuaaacagcuaccaaagggcugcuccuauaucaccaaccaggacgcagacacagucacuauugauaauaccguguaccaacugucuaaggucgaaggggagcagcaugugauaaaaggacgcccgguuagcucaaguuucgaccccaucagauuuccugaggaucaguucaacguggcccucgaccaaguauuugaauccauugagaauagccaggcucuggucgaucagucuaacaagauccuuaauucagccgaaaaaggcaacacagguuucaucauugugauaauccugauugcaguuuuggggcucacuaugaucagugugagcauuaucauaaucauuaagaaaaccaggaagccaacaggcgcgcccccugagcugaauggagucaccaacggcggguucaucccacacuccugaggacuaguuauaagacugacuagcccgaugggccucccaacgggcccuccuccccuccuugcaccgagauuaauaaaaaaaaaaaaaaaaaaaaaaaaaaaaaaaaaaaaaaaaaaaaaaaaaaaaaaaaaaaaaaaaugcaucccccccccccccccccccccccccccccccaaaggcucuuuucagagccaccagaauu

SEQ ID NO: 14794 - protein, 1353 aa, Artificial Sequence
  MERS-CoV/MERS-CoV-Jeddah-human-1__AHE78108.1 spike protein (1-1353)
MIHSVFLLMFLLTPTESYVDVGPDSVKSACIEVDIQQTFFDKTWPRPIDVSKADGIIYPQGRTYSNITITYQGLFPYQGDHGDMYVYSAGHATGTTPQKLFVANYSQDVKQFANGFVVRIGAAANSTGTVIISPSTSATIRKIYPAFMLGSSVGNFSDGKMGRFFNHTLVLLPDGCGTLLRAFYCILEPRSGNHCPAGNSYTSFATYHTPATDCSDGNYNRNASLNSFKEYFNLRNCTFMYTYNITEDEILEWFGITQTAQGVHLFSSRYVDLYGGNMFQFATLPVYDTIKYYSIIPHSIRSIQSDRKAWAAFYVYKLQPLTFLLDFSVDGYIRRAIDCGFNDLSQLHCSYESFDVESGVYSVSSFEAKPSGSVVEQAEGVECDFSPLLSGTPPQVYNFKRLVFTNCNYNLTKLLSLFSVNDFTCSQISPAAIASNCYSSLILDYFSYPLSMKSDLSVSSAGPISQFNYKQSFSNPTCLILATVPHNLTTITKPLKYSYINKCSRLLSDDRTEVPQLVNANQYSPCVSIVPSTVWEDGDYYRKQLSPLEGGGWLVASGSTVAMTEQLQMGFGITVQYGTDTNSVCPKLEFANDTKIASQLGNCVEYSLYGVSGRGVFQNCTAVGVRQQRFVYDAYQNLVGYYSDDGNYYCLRACVSVPVSVIYDKETKTHATLFGSVACEHISSTMSQYSRSTRSMLKRRDSTYGPLQTPVGCVLGLVNSSLFVEDCKLPLGQSLCALPDTPSTLTPRSVRSVPGEMRLASIAFNHPIQVDQLNSSYFKLSIPTNFSFGVTQEYIQTTIQKVTVDCKQYVCNGFQKCEQLLREYGQFCSKINQALHGANLRQDDSVRNLFASVKSSQSSPIIPGFGGDFNLTLLEPVSISTGSRSARSAIEDLLFDKVTIADPGYMQGYDDCMQQGPASARDLICAQYVAGYKVLPPLMDVNMEAAYTSSLLGSIAGVGWTAGLSSFAAIPFAQSIFYRLNGVGITQQVLSENQKLIANKFNQALGAMQTGFTTTNEAFHKVQDAVNNNAQALSKLASELSNTFGAISASIGDIIQRLDVLEQDAQIDRLINGRLTTLNAFVAQQLVRSESAALSAQLAKDKVNECVKAQSKRSGFCGQGTHIVSFVVNAPNGLYFMHVGYYPSNHIEVVSAYGLCDAANPTNCIAPVNGYFIKTNNTRIVDEWSYTGSSFYAPEPITSLNTKYVAPQVTYQNISTNLPPPLLGNSTGIDFQDELDEFFKNVSTSIPNFGSLTQINTTLLDLTYEMLSLQQVVKALNESYIDLKELGNYTYYNKWPWYIWLGFIAGLVALALCVFFILCCTGCGTNCMGKLKCNRCCDRYEEYDLEPHKVHVH

SEQ ID NO: 14795 - protein, 1353 aa, Artificial Sequence
  MERS-CoV/MERS-CoV-Jeddah-human-1__AHE78108.1 spike protein (1-1353)(V1060P_L1061P)
MIHSVFLLMFLLTPTESYVDVGPDSVKSACIEVDIQQTFFDKTWPRPIDVSKADGIIYPQGRTYSNITITYQGLFPYQGDHGDMYVYSAGHATGTTPQKLFVANYSQDVKQFANGFVVRIGAAANSTGTVIISPSTSATIRKIYPAFMLGSSVGNFSDGKMGRFFNHTLVLLPDGCGTLLRAFYCILEPRSGNHCPAGNSYTSFATYHTPATDCSDGNYNRNASLNSFKEYFNLRNCTFMYTYNITEDEILEWFGITQTAQGVHLFSSRYVDLYGGNMFQFATLPVYDTIKYYSIIPHSIRSIQSDRKAWAAFYVYKLQPLTFLLDFSVDGYIRRAIDCGFNDLSQLHCSYESFDVESGVYSVSSFEAKPSGSVVEQAEGVECDFSPLLSGTPPQVYNFKRLVFTNCNYNLTKLLSLFSVNDFTCSQISPAAIASNCYSSLILDYFSYPLSMKSDLSVSSAGPISQFNYKQSFSNPTCLILATVPHNLTTITKPLKYSYINKCSRLLSDDRTEVPQLVNANQYSPCVSIVPSTVWEDGDYYRKQLSPLEGGGWLVASGSTVAMTEQLQMGFGITVQYGTDTNSVCPKLEFANDTKIASQLGNCVEYSLYGVSGRGVFQNCTAVGVRQQRFVYDAYQNLVGYYSDDGNYYCLRACVSVPVSVIYDKETKTHATLFGSVACEHISSTMSQYSRSTRSMLKRRDSTYGPLQTPVGCVLGLVNSSLFVEDCKLPLGQSLCALPDTPSTLTPRSVRSVPGEMRLASIAFNHPIQVDQLNSSYFKLSIPTNFSFGVTQEYIQTTIQKVTVDCKQYVCNGFQKCEQLLREYGQFCSKINQALHGANLRQDDSVRNLFASVKSSQSSPIIPGFGGDFNLTLLEPVSISTGSRSARSAIEDLLFDKVTIADPGYMQGYDDCMQQGPASARDLICAQYVAGYKVLPPLMDVNMEAAYTSSLLGSIAGVGWTAGLSSFAAIPFAQSIFYRLNGVGITQQVLSENQKLIANKFNQALGAMQTGFTTTNEAFHKVQDAVNNNAQALSKLASELSNTFGAISASIGDIIQRLDPPEQDAQIDRLINGRLTTLNAFVAQQLVRSESAALSAQLAKDKVNECVKAQSKRSGFCGQGTHIVSFVVNAPNGLYFMHVGYYPSNHIEVVSAYGLCDAANPTNCIAPVNGYFIKTNNTRIVDEWSYTGSSFYAPEPITSLNTKYVAPQVTYQNISTNLPPPLLGNSTGIDFQDELDEFFKNVSTSIPNFGSLTQINTTLLDLTYEMLSLQQVVKALNESYIDLKELGNYTYYNKWPWYIWLGFIAGLVALALCVFFILCCTGCGTNCMGKLKCNRCCDRYEEYDLEPHKVHVH

SEQ ID NO: 14796 - protein, 1353 aa, Artificial Sequence
  MERS-CoV/Al-Hasa_4_2013__AGN70929.1 spike protein (1-1353)
MIHSVFLLMFLLTPTESYVDVGPDSVKSACIEVDIQQTFFDKTWPRPIDVSKADGIIYPQGRTYSNITITYQGLFPYQGDHGDMYVYSAGHATGTTPQKLFVANYSQDVKQFANGFVVRIGAAANSTGTVIISPSTSATIRKIYPAFMLGSSVGNFSDGKMGRFFNHTLVLLPDGCGTLLRAFYCILEPRSGNHCPAGNSYTSFATYHTPATDCSDGNYNRNASLNSFKEYFNLRNCTFMYTYNITEDEILEWFGITQTAQGVHLFSSRYVDLYGGNMFQFATLPVYDTIKYYSIIPHSIRSIQSDRKAWAAFYVYKLQPLTFLLDFSVDGYIRRAIDCGFNDLSQLHCSYESFDVESGVYSVSSFEAKPSGSVVEQAEGVECDFSPLLSGTPPQVYNFKRLVFTNCNYNLTKLLSLFSVNDFTCSQISPAAIASNCYSSLILDYFSYPLSMKSDLSVSSAGPISQFNYKQSFSNPTCLILATVPHNLTTITKPLKYSYINKCSRLLSDDRTEVPQLVNANQYSPCVSIVPSTVWEDGDYYRKQLSPLEGGGWLVASGSTVAMTEQLQMGFGITVQYGTDTNSVCPKLEFANDTKIASQLGNCVEYSLYGVSGRGVFQNCTAVGVRQQRFVYDAYQNLVGYYSDDGNYYCLRACVSVPVSVIYDKETKTHATLFGSVACEHISSTMSQYSRSTRSMLKRRDSTYGPLQTPVGCVLGLVNSSLFVEDCKLPLGQSLCALPDTPSTLTPRSVRSVPGEMRLASIAFNHPIQVDQLNSSYFKLSIPTNFSFGVTQEYIQTTIQKVTVDCKQYVCNGFQKCEQLLREYGQFCSKINQALHGANLRQDDSVRNLFASVKSSQSSPIIPGFGGDFNLTLLEPVSISTGSRSARSAIEDLLFDKVTIADPGYMQGYDDCMQQGPASARDLICAQYVAGYKVLPPLMDVNMEAAYTSSLLGSIAGVGWTAGLSSFAAIPFAQSIFYRLNGVGITQQVLSENQKLIANKFNQALGAMQTGFTTTNEAFRKVQDAVNNNAQALSKLASELSNTFGAISASIGDIIQRLDVLEQDAQIDRLINGRLTTLNAFVAQQLVRSESAALSAQLAKDKVNECVKAQSKRSGFCGQGTHIVSFVVNAPNGLYFMHVGYYPSNHIEVVSAYGLCDAANPTNCIAPVNGYFIKTNNTRIVDEWSYTGSSFYAPEPITSLNTKYVAPHVTYQNISTNLPPPLLGNSTGIDFQDELDEFFKNVSTSIPNFGSLTQINTTLLDLTYEMLSLQQVVKALNESYIDLKELGNYTYYNKWPWYIWLGFIAGLVALALCVFFILCCTGCGTNCMGKLKCNRCCDRYEEYDLEPHKVHVH

SEQ ID NO: 14797 - protein, 1353 aa, Artificial Sequence
  MERS-CoV/Al-Hasa_4_2013__AGN70929.1 spike protein (1-1353)(V1060P_L1061P)
MIHSVFLLMFLLTPTESYVDVGPDSVKSACIEVDIQQTFFDKTWPRPIDVSKADGIIYPQGRTYSNITITYQGLFPYQGDHGDMYVYSAGHATGTTPQKLFVANYSQDVKQFANGFVVRIGAAANSTGTVIISPSTSATIRKIYPAFMLGSSVGNFSDGKMGRFFNHTLVLLPDGCGTLLRAFYCILEPRSGNHCPAGNSYTSFATYHTPATDCSDGNYNRNASLNSFKEYFNLRNCTFMYTYNITEDEILEWFGITQTAQGVHLFSSRYVDLYGGNMFQFATLPVYDTIKYYSIIPHSIRSIQSDRKAWAAFYVYKLQPLTFLLDFSVDGYIRRAIDCGFNDLSQLHCSYESFDVESGVYSVSSFEAKPSGSVVEQAEGVECDFSPLLSGTPPQVYNFKRLVFTNCNYNLTKLLSLFSVNDFTCSQISPAAIASNCYSSLILDYFSYPLSMKSDLSVSSAGPISQFNYKQSFSNPTCLILATVPHNLTTITKPLKYSYINKCSRLLSDDRTEVPQLVNANQYSPCVSIVPSTVWEDGDYYRKQLSPLEGGGWLVASGSTVAMTEQLQMGFGITVQYGTDTNSVCPKLEFANDTKIASQLGNCVEYSLYGVSGRGVFQNCTAVGVRQQRFVYDAYQNLVGYYSDDGNYYCLRACVSVPVSVIYDKETKTHATLFGSVACEHISSTMSQYSRSTRSMLKRRDSTYGPLQTPVGCVLGLVNSSLFVEDCKLPLGQSLCALPDTPSTLTPRSVRSVPGEMRLASIAFNHPIQVDQLNSSYFKLSIPTNFSFGVTQEYIQTTIQKVTVDCKQYVCNGFQKCEQLLREYGQFCSKINQALHGANLRQDDSVRNLFASVKSSQSSPIIPGFGGDFNLTLLEPVSISTGSRSARSAIEDLLFDKVTIADPGYMQGYDDCMQQGPASARDLICAQYVAGYKVLPPLMDVNMEAAYTSSLLGSIAGVGWTAGLSSFAAIPFAQSIFYRLNGVGITQQVLSENQKLIANKFNQALGAMQTGFTTTNEAFRKVQDAVNNNAQALSKLASELSNTFGAISASIGDIIQRLDPPEQDAQIDRLINGRLTTLNAFVAQQLVRSESAALSAQLAKDKVNECVKAQSKRSGFCGQGTHIVSFVVNAPNGLYFMHVGYYPSNHIEVVSAYGLCDAANPTNCIAPVNGYFIKTNNTRIVDEWSYTGSSFYAPEPITSLNTKYVAPHVTYQNISTNLPPPLLGNSTGIDFQDELDEFFKNVSTSIPNFGSLTQINTTLLDLTYEMLSLQQVVKALNESYIDLKELGNYTYYNKWPWYIWLGFIAGLVALALCVFFILCCTGCGTNCMGKLKCNRCCDRYEEYDLEPHKVHVH

SEQ ID NO: 14798 - protein, 1353 aa, Artificial Sequence
  MERS-CoV/Riyadh_14_2013__AHI48572.1 spike protein (1-1353)
MIHSVFLLMFLLTPTESYVDVGPDSVKSACIEVDIQQTFFDKTWPRPIDVSKADGIIYPQGRTYSNITITYQGLFPYQGDHGDMYVYSAGHATGTTPQKLFVANYSQDVKQFANGFVVRIGAAANSTGTVIISPSTSATIRKIYPAFMLGSSVGNFSDGKMGRFFNHTLVLLPDGCGTLLRAFYCILEPRSGNHCPAGNSYTSFATYHTPATDCSDGNYNRNASLNSFKEYFNLRNCTFMYTYNITEDEILEWFGITQTAQGVHLFSSRYVDLYGGNMFQFATLPVYDTIKYYSIIPHSIRSIQSDRKAWAAFYVYKLQPLTFLLDFSVDGYIRRAIDCGFNDLSQLHCSYESFDVESGVYSVSSFEAKPSGSVVEQAEGVECDFSPLLSGTPPQVYNFKRLVFTNCNYNLTKLLSLFSVNDFTCSQISPAAIASNCYSSLILDYFSYPLSMKSDLSVSSAGPISQFNYKQSFSNPTCLILATVPHNLTTITKPLKYSYINKCSRLLSDDRTEVPQLVNANQYSPCVSIVPSTVWEDGDYYRKQLSPLEGGGWLVASGSTVAMTEQLQMGFGITVQYGTDTNSVCPKLEFANDTKIASQLGNCVEYSLYGVSGRGVFQNCTAVGVRQQRFVYDAYQNLVGYYSDDGNYYCLRACVSVPVSVIYDKETKTHATLFGSVACEHISSTMSQYSRSTRSMLKRRDSTYGPLQTPVGCVLGLVNSSLFVEDCKLPLGQSLCALPDTPSTLTPRSVRSVPGEMRLASIAFNHPIQVDQLNSSYFKLSIPTNFSFGVTQEYIQTTIQKVTVDCKQYVCNGFQKCEQLLREYGQFCSKINQALHGANLRQDDSVRNLFASVKSSQSSPIIPGFGGDFNLTLLEPVSISTGSRSARSAIEDLLFDKVTIADPGYMQGYDDCMQQGPASARDLICAQYVAGYKVLPPLMDVNMEAAYTSSLLGSIAGVGWTAGLSSFAAIPFAQSIFYRLNGVGITQQVLSENQKLIANKFNQALGAMQTGFTTTNEAFRKVQDAVNNNAQALSKLASELSNTFGAISASIGDIIQRLDVLEQDAQIDRLINGRLTTLNAFVAQQLVRSESAALSAQLAKDKVNECVKAQSKRSGFCGQGTHIVSFVVNAPNGLYFMHVGYYPSNHIEVVSAYGLCDAANPTNCIAPVNGYFIKTNNTRIVDEWSYTGSSFYAPEPITSLNTKYVAPQVTYQNISTNLPPPLLGNSTGIDFQDELDEFFKNVSTSIPNFGSLTQINTTLLDLTYEMLSLQQVVKALNESYIDLKELGNYTYYNKWPWYIWLGFIAGLVALALCVFFILCCTGCGTNCMGKLKCNRCCDRYEEYDLEPHKVHVH

SEQ ID NO: 14799 - protein, 1353 aa, Artificial Sequence
  MERS-CoV/Riyadh_14_2013__AHI48572.1 spike protein (1-1353)(V1060P_L1061P)
MIHSVFLLMFLLTPTESYVDVGPDSVKSACIEVDIQQTFFDKTWPRPIDVSKADGIIYPQGRTYSNITITYQGLFPYQGDHGDMYVYSAGHATGTTPQKLFVANYSQDVKQFANGFVVRIGAAANSTGTVIISPSTSATIRKIYPAFMLGSSVGNFSDGKMGRFFNHTLVLLPDGCGTLLRAFYCILEPRSGNHCPAGNSYTSFATYHTPATDCSDGNYNRNASLNSFKEYFNLRNCTFMYTYNITEDEILEWFGITQTAQGVHLFSSRYVDLYGGNMFQFATLPVYDTIKYYSIIPHSIRSIQSDRKAWAAFYVYKLQPLTFLLDFSVDGYIRRAIDCGFNDLSQLHCSYESFDVESGVYSVSSFEAKPSGSVVEQAEGVECDFSPLLSGTPPQVYNFKRLVFTNCNYNLTKLLSLFSVNDFTCSQISPAAIASNCYSSLILDYFSYPLSMKSDLSVSSAGPISQFNYKQSFSNPTCLILATVPHNLTTITKPLKYSYINKCSRLLSDDRTEVPQLVNANQYSPCVSIVPSTVWEDGDYYRKQLSPLEGGGWLVASGSTVAMTEQLQMGFGITVQYGTDTNSVCPKLEFANDTKIASQLGNCVEYSLYGVSGRGVFQNCTAVGVRQQRFVYDAYQNLVGYYSDDGNYYCLRACVSVPVSVIYDKETKTHATLFGSVACEHISSTMSQYSRSTRSMLKRRDSTYGPLQTPVGCVLGLVNSSLFVEDCKLPLGQSLCALPDTPSTLTPRSVRSVPGEMRLASIAFNHPIQVDQLNSSYFKLSIPTNFSFGVTQEYIQTTIQKVTVDCKQYVCNGFQKCEQLLREYGQFCSKINQALHGANLRQDDSVRNLFASVKSSQSSPIIPGFGGDFNLTLLEPVSISTGSRSARSAIEDLLFDKVTIADPGYMQGYDDCMQQGPASARDLICAQYVAGYKVLPPLMDVNMEAAYTSSLLGSIAGVGWTAGLSSFAAIPFAQSIFYRLNGVGITQQVLSENQKLIANKFNQALGAMQTGFTTTNEAFRKVQDAVNNNAQALSKLASELSNTFGAISASIGDIIQRLDPPEQDAQIDRLINGRLTTLNAFVAQQLVRSESAALSAQLAKDKVNECVKAQSKRSGFCGQGTHIVSFVVNAPNGLYFMHVGYYPSNHIEVVSAYGLCDAANPTNCIAPVNGYFIKTNNTRIVDEWSYTGSSFYAPEPITSLNTKYVAPQVTYQNISTNLPPPLLGNSTGIDFQDELDEFFKNVSTSIPNFGSLTQINTTLLDLTYEMLSLQQVVKALNESYIDLKELGNYTYYNKWPWYIWLGFIAGLVALALCVFFILCCTGCGTNCMGKLKCNRCCDRYEEYDLEPHKVHVH

SEQ ID NO: 14800 - protein, 1353 aa, Artificial Sequence
  MERS-CoV/Riyadh_14_2013__AHI48572.1 spike protein (1-1353)(R1020Q)
MIHSVFLLMFLLTPTESYVDVGPDSVKSACIEVDIQQTFFDKTWPRPIDVSKADGIIYPQGRTYSNITITYQGLFPYQGDHGDMYVYSAGHATGTTPQKLFVANYSQDVKQFANGFVVRIGAAANSTGTVIISPSTSATIRKIYPAFMLGSSVGNFSDGKMGRFFNHTLVLLPDGCGTLLRAFYCILEPRSGNHCPAGNSYTSFATYHTPATDCSDGNYNRNASLNSFKEYFNLRNCTFMYTYNITEDEILEWFGITQTAQGVHLFSSRYVDLYGGNMFQFATLPVYDTIKYYSIIPHSIRSIQSDRKAWAAFYVYKLQPLTFLLDFSVDGYIRRAIDCGFNDLSQLHCSYESFDVESGVYSVSSFEAKPSGSVVEQAEGVECDFSPLLSGTPPQVYNFKRLVFTNCNYNLTKLLSLFSVNDFTCSQISPAAIASNCYSSLILDYFSYPLSMKSDLSVSSAGPISQFNYKQSFSNPTCLILATVPHNLTTITKPLKYSYINKCSRLLSDDRTEVPQLVNANQYSPCVSIVPSTVWEDGDYYRKQLSPLEGGGWLVASGSTVAMTEQLQMGFGITVQYGTDTNSVCPKLEFANDTKIASQLGNCVEYSLYGVSGRGVFQNCTAVGVRQQRFVYDAYQNLVGYYSDDGNYYCLRACVSVPVSVIYDKETKTHATLFGSVACEHISSTMSQYSRSTRSMLKRRDSTYGPLQTPVGCVLGLVNSSLFVEDCKLPLGQSLCALPDTPSTLTPRSVRSVPGEMRLASIAFNHPIQVDQLNSSYFKLSIPTNFSFGVTQEYIQTTIQKVTVDCKQYVCNGFQKCEQLLREYGQFCSKINQALHGANLRQDDSVRNLFASVKSSQSSPIIPGFGGDFNLTLLEPVSISTGSRSARSAIEDLLFDKVTIADPGYMQGYDDCMQQGPASARDLICAQYVAGYKVLPPLMDVNMEAAYTSSLLGSIAGVGWTAGLSSFAAIPFAQSIFYRLNGVGITQQVLSENQKLIANKFNQALGAMQTGFTTTNEAFQKVQDAVNNNAQALSKLASELSNTFGAISASIGDIIQRLDVLEQDAQIDRLINGRLTTLNAFVAQQLVRSESAALSAQLAKDKVNECVKAQSKRSGFCGQGTHIVSFVVNAPNGLYFMHVGYYPSNHIEVVSAYGLCDAANPTNCIAPVNGYFIKTNNTRIVDEWSYTGSSFYAPEPITSLNTKYVAPQVTYQNISTNLPPPLLGNSTGIDFQDELDEFFKNVSTSIPNFGSLTQINTTLLDLTYEMLSLQQVVKALNESYIDLKELGNYTYYNKWPWYIWLGFIAGLVALALCVFFILCCTGCGTNCMGKLKCNRCCDRYEEYDLEPHKVHVH

SEQ ID NO: 14801 - protein, 588 aa, Artificial Sequence
  MERS-CoV/Riyadh_14_2013__AHI48572.1 spike protein (1-17_726-1296)(R1020Q)
MIHSVFLLMFLLTPTESDCKLPLGQSLCALPDTPSTLTPRSVRSVPGEMRLASIAFNHPIQVDQLNSSYFKLSIPTNFSFGVTQEYIQTTIQKVTVDCKQYVCNGFQKCEQLLREYGQFCSKINQALHGANLRQDDSVRNLFASVKSSQSSPIIPGFGGDFNLTLLEPVSISTGSRSARSAIEDLLFDKVTIADPGYMQGYDDCMQQGPASARDLICAQYVAGYKVLPPLMDVNMEAAYTSSLLGSIAGVGWTAGLSSFAAIPFAQSIFYRLNGVGITQQVLSENQKLIANKFNQALGAMQTGFTTTNEAFQKVQDAVNNNAQALSKLASELSNTFGAISASIGDIIQRLDVLEQDAQIDRLINGRLTTLNAFVAQQLVRSESAALSAQLAKDKVNECVKAQSKRSGFCGQGTHIVSFVVNAPNGLYFMHVGYYPSNHIEVVSAYGLCDAANPTNCIAPVNGYFIKTNNTRIVDEWSYTGSSFYAPEPITSLNTKYVAPQVTYQNISTNLPPPLLGNSTGIDFQDELDEFFKNVSTSIPNFGSLTQINTTLLDLTYEMLSLQQVVKALNESYIDLKELGNYTYYNKWP

SEQ ID NO: 14802 - protein, 615 aa, Artificial Sequence
  MERS-CoV/Riyadh_14_2013__AHI48572.1 spike protein (1-17_726-1296)(R1020Q)_LeucineZipper
MIHSVFLLMFLLTPTESDCKLPLGQSLCALPDTPSTLTPRSVRSVPGEMRLASIAFNHPIQVDQLNSSYFKLSIPTNFSFGVTQEYIQTTIQKVTVDCKQYVCNGFQKCEQLLREYGQFCSKINQALHGANLRQDDSVRNLFASVKSSQSSPIIPGFGGDFNLTLLEPVSISTGSRSARSAIEDLLFDKVTIADPGYMQGYDDCMQQGPASARDLICAQYVAGYKVLPPLMDVNMEAAYTSSLLGSIAGVGWTAGLSSFAAIPFAQSIFYRLNGVGITQQVLSENQKLIANKFNQALGAMQTGFTTTNEAFQKVQDAVNNNAQALSKLASELSNTFGAISASIGDIIQRLDVLEQDAQIDRLINGRLTTLNAFVAQQLVRSESAALSAQLAKDKVNECVKAQSKRSGFCGQGTHIVSFVVNAPNGLYFMHVGYYPSNHIEVVSAYGLCDAANPTNCIAPVNGYFIKTNNTRIVDEWSYTGSSFYAPEPITSLNTKYVAPQVTYQNISTNLPPPLLGNSTGIDFQDELDEFFKNVSTSIPNFGSLTQINTTLLDLTYEMLSLQQVVKALNESYIDLKELGNYTYYNKWPDKIEEILSKIYHIENEIARIKKLIGEA

SEQ ID NO: 14803 - protein, 1353 aa, Artificial Sequence
  MERS-CoV/England 1__YP_007188579.1 spike protein (1-1353)
MIHSVFLLMFLLTPTESYVDVGPDSVKSACIEVDIQQTFFDKTWPRPIDVSKADGIIYPQGRTYSNITITYQGLFPYQGDHGDMYVYSAGHATGTTPQKLFVANYSQDVKQFANGFVVRIGAAANSTGTVIISPSTSATIRKIYPAFMLGSSVGNFSDGKMGRFFNHTLVLLPDGCGTLLRAFYCILEPRSGNHCPAGNSYTSFATYHTPATDCSDGNYNRNASLNSFKEYFNLRNCTFMYTYNITEDEILEWFGITQTAQGVHLFSSRYVDLYGGNMFQFATLPVYDTIKYYSIIPHSIRSIQSDRKAWAAFYVYKLQPLTFLLDFSVDGYIRRAIDCGFNDLSQLHCSYESFDVESGVYSVSSFEAKPSGSVVEQAEGVECDFSPLLSGTPPQVYNFKRLVFTNCNYNLTKLLSLFSVNDFTCSQISPAAIASNCYSSLILDYFSYPLSMKSDLSVSSAGPISQFNYKQSFSNPTCLILATVPHNLTTITKPLKYSYINKCSRFLSDDRTEVPQLVNANQYSPCVSIVPSTVWEDGDYYRKQLSPLEGGGWLVASGSTVAMTEQLQMGFGITVQYGTDTNSVCPKLEFANDTKIASQLGNCVEYSLYGVSGRGVFQNCTAVGVRQQRFVYDAYQNLVGYYSDDGNYYCLRACVSVPVSVIYDKETKTHATLFGSVACEHISSTMSQYSRSTRSMLKRRDSTYGPLQTPVGCVLGLVNSSLFVEDCKLPLGQSLCALPDTPSTLTPRSVRSVPGEMRLASIAFNHPIQVDQLNSSYFKLSIPTNFSFGVTQEYIQTTIQKVTVDCKQYVCNGFQKCEQLLREYGQFCSKINQALHGANLRQDDSVRNLFASVKSSQSSPIIPGFGGDFNLTLLEPVSISTGSRSARSAIEDLLFDKVTIADPGYMQGYDDCMQQGPASARDLICAQYVAGYKVLPPLMDVNMEAAYTSSLLGSIAGVGWTAGLSSFAAIPFAQSIFYRLNGVGITQQVLSENQKLIANKFNQALGAMQTGFTTTNEAFHKVQDAVNNNAQALSKLASELSNTFGAISASIGDIIQRLDVLEQDAQIDRLINGRLTTLNAFVAQQLVRSESAALSAQLAKDKVNECVKAQSKRSGFCGQGTHIVSFVVNAPNGLYFMHVGYYPSNHIEVVSAYGLCDAANPTNCIAPVNGYFIKTNNTRIVDEWSYTGSSFYAPEPITSLNTKYVAPQVTYQNISTNLPPPLLGNSTGIDFQDELDEFFKNVSTSIPNFGSLTQINTTLLDLTYEMLSLQQVVKALNESYIDLKELGNYTYYNKWPWYIWLGFIAGLVALALCVFFILCCTGCGTNCMGKLKCNRCCDRYEEYDLEPHKVHVH

SEQ ID NO: 14804 - protein, 1353 aa, Artificial Sequence
  MERS-CoV/England 1__YP_007188579.1 spike protein (1-1353)(V1060P_L1061P)
MIHSVFLLMFLLTPTESYVDVGPDSVKSACIEVDIQQTFFDKTWPRPIDVSKADGIIYPQGRTYSNITITYQGLFPYQGDHGDMYVYSAGHATGTTPQKLFVANYSQDVKQFANGFVVRIGAAANSTGTVIISPSTSATIRKIYPAFMLGSSVGNFSDGKMGRFFNHTLVLLPDGCGTLLRAFYCILEPRSGNHCPAGNSYTSFATYHTPATDCSDGNYNRNASLNSFKEYFNLRNCTFMYTYNITEDEILEWFGITQTAQGVHLFSSRYVDLYGGNMFQFATLPVYDTIKYYSIIPHSIRSIQSDRKAWAAFYVYKLQPLTFLLDFSVDGYIRRAIDCGFNDLSQLHCSYESFDVESGVYSVSSFEAKPSGSVVEQAEGVECDFSPLLSGTPPQVYNFKRLVFTNCNYNLTKLLSLFSVNDFTCSQISPAAIASNCYSSLILDYFSYPLSMKSDLSVSSAGPISQFNYKQSFSNPTCLILATVPHNLTTITKPLKYSYINKCSRFLSDDRTEVPQLVNANQYSPCVSIVPSTVWEDGDYYRKQLSPLEGGGWLVASGSTVAMTEQLQMGFGITVQYGTDTNSVCPKLEFANDTKIASQLGNCVEYSLYGVSGRGVFQNCTAVGVRQQRFVYDAYQNLVGYYSDDGNYYCLRACVSVPVSVIYDKETKTHATLFGSVACEHISSTMSQYSRSTRSMLKRRDSTYGPLQTPVGCVLGLVNSSLFVEDCKLPLGQSLCALPDTPSTLTPRSVRSVPGEMRLASIAFNHPIQVDQLNSSYFKLSIPTNFSFGVTQEYIQTTIQKVTVDCKQYVCNGFQKCEQLLREYGQFCSKINQALHGANLRQDDSVRNLFASVKSSQSSPIIPGFGGDFNLTLLEPVSISTGSRSARSAIEDLLFDKVTIADPGYMQGYDDCMQQGPASARDLICAQYVAGYKVLPPLMDVNMEAAYTSSLLGSIAGVGWTAGLSSFAAIPFAQSIFYRLNGVGITQQVLSENQKLIANKFNQALGAMQTGFTTTNEAFHKVQDAVNNNAQALSKLASELSNTFGAISASIGDIIQRLDPPEQDAQIDRLINGRLTTLNAFVAQQLVRSESAALSAQLAKDKVNECVKAQSKRSGFCGQGTHIVSFVVNAPNGLYFMHVGYYPSNHIEVVSAYGLCDAANPTNCIAPVNGYFIKTNNTRIVDEWSYTGSSFYAPEPITSLNTKYVAPQVTYQNISTNLPPPLLGNSTGIDFQDELDEFFKNVSTSIPNFGSLTQINTTLLDLTYEMLSLQQVVKALNESYIDLKELGNYTYYNKWPWYIWLGFIAGLVALALCVFFILCCTGCGTNCMGKLKCNRCCDRYEEYDLEPHKVHVH

SEQ ID NO: 14805 - protein, 1291 aa, Artificial Sequence
  MERS-CoV/England 1__YP_007188579.1 spike protein (variant)
MIHSVFLLMFLLTPTESYVDVGPDSVKSACIEVDIQQTFFDKTWPRPIDVSKADGIIYPQGRTYSNITITYQGLFPYQGDHGDMYVYSAGHATGTTPQKLFVANYSQDVKQFANGFVVRIGAAANSTGTVIISPSTSATIRKIYPAFMLGSSVGNFSDGKMGRFFNHTLVLLPDGCGTLLRAFYCILEPRSGNHCPAGNSYTSFATYHTPATDCSDGNYNRNASLNSFKEYFNLRNCTFMYTYNITEDEILEWFGITQTAQGVHLFSSRYVDLYGGNMFQFATLPVYDTIKYYSIIPHSIRSIQSDRKAWAAFYVYKLQPLTFLLDFSVDGYIRRAIDCGFNDLSQLHCSYESFDVESGVYSVSSFEAKPSGSVVEQAEGVECDFSPLLSGTPPQVYNFKRLVFTNCNYNLTKLLSLFSVNDFTCSQISPAAIASNCYSSLILDYFSYPLSMKSDLSVSSAGPISQFNYKQSFSNPTCLILATVPHNLTTITKPLKYSYINKCSRFLSDDRTEVPQLVNANQYSPCVSIVPSTVWEDGDYYRKQLSPLEGGGWLVASGSTVAMTEQLQMGFGITVQYGTDTNSVCPKLEFANDTKIASQLGNCVEYSLYGVSGRGVFQNCTAVGVRQQRFVYDAYQNLVGYYSDDGNYYCLRACVSVPVSVIYDKETKTHATLFGSVACEHISSTMSQYSRSTRSMLKRRDSTYGPLQTPVGCVLGLVNSSLFVEDCKLPLGQSLCALPDTPSTLTPRSVRSVPGEMRLASIAFNHPIQVDQLNSSYFKLSIPTNFSFGVTQEYIQTTIQKVTVDCKQYVCNGFQKCEQLLREYGQFCSKINQALHGANLRQDDSVRNLFASVKSSQSSPIIPGFGGDFNLTLLEPVSISTGSRSARSAIEDLLFDKVTIADPGYMQGYDDCMQQGPASARDLICAQYVAGYKVLPPLMDVNMEAAYTSSLLGSIAGVGWTAGLSSFAAIPFAQSIFYRLNGVGITQQVLSENQKLIANKFNQALGAMQTGFTTTNEAFHKVQDAVNNNAQALSKLASELSNTFGAISASIGDIIQRLDPPEQDAQIDRLINGRLTTLNAFVAQQLVRSESAALSAQLAKDKVNECVKAQSKRSGFCGQGTHIVSFVVNAPNGLYFMHVGYYPSNHIEVVSAYGLCDAANPTNCIAPVNGYFIKTNNTRIVDEWSYTGSSFYAPEPITSLNTKYVAPQVTYQNISTNLPPPLLGNSTGIDFQDELDEFFKNVSTSIPNFGSLTQINTTLLDLTYEMLSLQQVVKALNESYIDLKELGNYTY

SEQ ID NO: 14806 - protein, 1291 aa, Artificial Sequence
  MERS-CoV/England 1__YP_007188579.1 spike protein (variant)
MIHSVFLLMFLLTPTESYVDVGPDSVKSACIEVDIQQTFFDKTWPRPIDVSKADGIIYPQGRTYSNITITYQGLFPYQGDHGDMYVYSAGHATGTTPQKLFVANYSQDVKQFANGFVVRIGAAANSTGTVIISPSTSATIRKIYPAFMLGSSVGNFSDGKMGRFFNHTLVLLPDGCGTLLRAFYCILEPRSGNHCPAGNSYTSFATYHTPATDCSDGNYNRNASLNSFKEYFNLRNCTFMYTYNITEDEILEWFGITQTAQGVHLFSSRYVDLYGGNMFQFATLPVYDTIKYYSIIPHSIRSIQSDRKAWAAFYVYKLQPLTFLLDFSVDGYIRRAIDCGFNDLSQLHCSYESFDVESGVYSVSSFEAKPSGSVVEQAEGVECDFSPLLSGTPPQVYNFKRLVFTNCNYNLTKLLSLFSVNDFTCSQISPAAIASNCYSSLILDYFSYPLSMKSDLSVSSAGPISQFNYKQSFSNPTCLILATVPHNLTTITKPLKYSYINKCSRFLSDDRTEVPQLVNANQYSPCVSIVPSTVWEDGDYYRKQLSPLEGGGWLVASGSTVAMTEQLQMGFGITVQYGTDTNSVCPKLEFANDTKIASQLGNCVEYSLYGVSGRGVFQNCTAVGVRQQRFVYDAYQNLVGYYSDDGNYYCLRACVSVPVSVIYDKETKTHATLFGSVACEHISSTMSQYSRSTRSMLKRRDSTYGPLQTPVGCVLGLVNSSLFVEDCKLPLGQSLCALPDTPSTLTPASVGSVPGEMRLASIAFNHPIQVDQLNSSYFKLSIPTNFSFGVTQEYIQTTIQKVTVDCKQYVCNGFQKCEQLLREYGQFCSKINQALHGANLRQDDSVRNLFASVKSSQSSPIIPGFGGDFNLTLLEPVSISTGSRSARSAIEDLLFDKVTIADPGYMQGYDDCMQQGPASARDLICAQYVAGYKVLPPLMDVNMEAAYTSSLLGSIAGVGWTAGLSSFAAIPFAQSIFYRLNGVGITQQVLSENQKLIANKFNQALGAMQTGFTTTNEAFHKVQDAVNNNAQALSKLASELSNTFGAISASIGDIIQRLDPPEQDAQIDRLINGRLTTLNAFVAQQLVRSESAALSAQLAKDKVNECVKAQSKRSGFCGQGTHIVSFVVNAPNGLYFMHVGYYPSNHIEVVSAYGLCDAANPTNCIAPVNGYFIKTNNTRIVDEWSYTGSSFYAPEPITSLNTKYVAPQVTYQNISTNLPPPLLGNSTGIDFQDELDEFFKNVSTSIPNFGSLTQINTTLLDLTYEMLSLQQVVKALNESYIDLKELGNYTY

SEQ ID NO: 14807 - protein, 1291 aa, Artificial Sequence
  MERS-CoV/England 1__YP_007188579.1 spike protein (variant)
MIHSVFLLMFLLTPTESYVDVGPDSVKSACIEVDIQQTFFDKTWPRPIDVSKADGIIYPQGRTYSNITITYQGLFPYQGDHGDMYVYSAGHATGTTPQKLFVANYSQDVKQFANGFVVRIGAAANSTGTVIISPSTSATIRKIYPAFMLGSSVGNFSDGKMGRFFNHTLVLLPDGCGTLLRAFYCILEPRSGNHCPAGNSYTSFATYHTPATDCSDGNYNRNASLNSFKEYFNLRNCTFMYTYNITEDEILEWFGITQTAQGVHLFSSRYVDLYGGNMFQFATLPVYDTIKYYSIIPHSIRSIQSDRKAWAAFYVYKLQPLTFLLDFSVDGYIRRAIDCGFNDLSQLHCSYESFDVESGVYSVSSFEAKPSGSVVEQAEGVECDFSPLLSGTPPQVYNFKRLVFTNCNYNLTKLLSLFSVNDFTCSQISPAAIASNCYSSLILDYFSYPLSMKSDLSVSSAGPISQFNYKQSFSNPTCLILATVPHNLTTITKPLKYSYINKCSRFLSDDRTEVPQLVNANQYSPCVSIVPSTVWEDGDYYRKQLSPLEGGGWLVASGSTVAMTEQLQMGFGITVQYGTDTNSVCPKLEFANDTKIASQLGNCVEYSLYGVSGRGVFQNCTAVGVRQQRFVYDAYQNLVGYYSDDGNYYCLRACVSVPVSVIYDKETKTHATLFGSVACEHISSTMSQYSRSTRSMLKRRDSTYGPLQTPVGCVLGLVNSSLFVEDCKLPLGQSLCALPDTPSTLTPASVGSVPGEMRLASIAFNHPIQVDQLNSSYFKLSIPTNFSFGVTQEYIQTTIQKVTVDCKQYVCNGFQKCEQLLREYGQFCSKINQALHGANLRQDDSVRNLFASVKSSQSSPIIPGFGGDFNLTLLEPVSISTGSGSAGSAIEDLLFDKVTIADPGYMQGYDDCMQQGPASARDLICAQYVAGYKVLPPLMDVNMEAAYTSSLLGSIAGVGWTAGLSSFAAIPFAQSIFYRLNGVGITQQVLSENQKLIANKFNQALGAMQTGFTTTNEAFHKVQDAVNNNAQALSKLASELSNTFGAISASIGDIIQRLDPPEQDAQIDRLINGRLTTLNAFVAQQLVRSESAALSAQLAKDKVNECVKAQSKRSGFCGQGTHIVSFVVNAPNGLYFMHVGYYPSNHIEVVSAYGLCDAANPTNCIAPVNGYFIKTNNTRIVDEWSYTGSSFYAPEPITSLNTKYVAPQVTYQNISTNLPPPLLGNSTGIDFQDELDEFFKNVSTSIPNFGSLTQINTTLLDLTYEMLSLQQVVKALNESYIDLKELGNYTY

SEQ ID NO: 14808 - protein, 1318 aa, Artificial Sequence
  MERS-CoV/England 1__YP_007188579.1 spike protein (variant)
MIHSVFLLMFLLTPTESYVDVGPDSVKSACIEVDIQQTFFDKTWPRPIDVSKADGIIYPQGRTYSNITITYQGLFPYQGDHGDMYVYSAGHATGTTPQKLFVANYSQDVKQFANGFVVRIGAAANSTGTVIISPSTSATIRKIYPAFMLGSSVGNFSDGKMGRFFNHTLVLLPDGCGTLLRAFYCILEPRSGNHCPAGNSYTSFATYHTPATDCSDGNYNRNASLNSFKEYFNLRNCTFMYTYNITEDEILEWFGITQTAQGVHLFSSRYVDLYGGNMFQFATLPVYDTIKYYSIIPHSIRSIQSDRKAWAAFYVYKLQPLTFLLDFSVDGYIRRAIDCGFNDLSQLHCSYESFDVESGVYSVSSFEAKPSGSVVEQAEGVECDFSPLLSGTPPQVYNFKRLVFTNCNYNLTKLLSLFSVNDFTCSQISPAAIASNCYSSLILDYFSYPLSMKSDLSVSSAGPISQFNYKQSFSNPTCLILATVPHNLTTITKPLKYSYINKCSRFLSDDRTEVPQLVNANQYSPCVSIVPSTVWEDGDYYRKQLSPLEGGGWLVASGSTVAMTEQLQMGFGITVQYGTDTNSVCPKLEFANDTKIASQLGNCVEYSLYGVSGRGVFQNCTAVGVRQQRFVYDAYQNLVGYYSDDGNYYCLRACVSVPVSVIYDKETKTHATLFGSVACEHISSTMSQYSRSTRSMLKRRDSTYGPLQTPVGCVLGLVNSSLFVEDCKLPLGQSLCALPDTPSTLTPASVGSVPGEMRLASIAFNHPIQVDQLNSSYFKLSIPTNFSFGVTQEYIQTTIQKVTVDCKQYVCNGFQKCEQLLREYGQFCSKINQALHGANLRQDDSVRNLFASVKSSQSSPIIPGFGGDFNLTLLEPVSISTGSRSARSAIEDLLFDKVTIADPGYMQGYDDCMQQGPASARDLICAQYVAGYKVLPPLMDVNMEAAYTSSLLGSIAGVGWTAGLSSFAAIPFAQSIFYRLNGVGITQQVLSENQKLIANKFNQALGAMQTGFTTTNEAFHKVQDAVNNNAQALSKLASELSNTFGAISASIGDIIQRLDPPEQDAQIDRLINGRLTTLNAFVAQQLVRSESAALSAQLAKDKVNECVKAQSKRSGFCGQGTHIVSFVVNAPNGLYFMHVGYYPSNHIEVVSAYGLCDAANPTNCIAPVNGYFIKTNNTRIVDEWSYTGSSFYAPEPITSLNTKYVAPQVTYQNISTNLPPPLLGNSTGIDFQDELDEFFKNVSTSIPNFGSLTQINTTLLDLTYEMLSLQQVVKALNESYIDLKELGNYTYGGYIPEAPRDGQAYVRKDGEWVLLSTF

SEQ ID NO: 14809 - protein, 1318 aa, Artificial Sequence
  MERS-CoV/England 1__YP_007188579.1 spike protein (variant)
MIHSVFLLMFLLTPTESYVDVGPDSVKSACIEVDIQQTFFDKTWPRPIDVSKADGIIYPQGRTYSNITITYQGLFPYQGDHGDMYVYSAGHATGTTPQKLFVANYSQDVKQFANGFVVRIGAAANSTGTVIISPSTSATIRKIYPAFMLGSSVGNFSDGKMGRFFNHTLVLLPDGCGTLLRAFYCILEPRSGNHCPAGNSYTSFATYHTPATDCSDGNYNRNASLNSFKEYFNLRNCTFMYTYNITEDEILEWFGITQTAQGVHLFSSRYVDLYGGNMFQFATLPVYDTIKYYSIIPHSIRSIQSDRKAWAAFYVYKLQPLTFLLDFSVDGYIRRAIDCGFNDLSQLHCSYESFDVESGVYSVSSFEAKPSGSVVEQAEGVECDFSPLLSGTPPQVYNFKRLVFTNCNYNLTKLLSLFSVNDFTCSQISPAAIASNCYSSLILDYFSYPLSMKSDLSVSSAGPISQFNYKQSFSNPTCLILATVPHNLTTITKPLKYSYINKCSRFLSDDRTEVPQLVNANQYSPCVSIVPSTVWEDGDYYRKQLSPLEGGGWLVASGSTVAMTEQLQMGFGITVQYGTDTNSVCPKLEFANDTKIASQLGNCVEYSLYGVSGRGVFQNCTAVGVRQQRFVYDAYQNLVGYYSDDGNYYCLRACVSVPVSVIYDKETKTHATLFGSVACEHISSTMSQYSRSTRSMLKRRDSTYGPLQTPVGCVLGLVNSSLFVEDCKLPLGQSLCALPDTPSTLTPASVGSVPGEMRLASIAFNHPIQVDQLNSSYFKLSIPTNFSFGVTQEYIQTTIQKVTVDCKQYVCNGFQKCEQLLREYGQFCSKINQALHGANLRQDDSVRNLFASVKSSQSSPIIPGFGGDFNLTLLEPVSISTGSGSAGSAIEDLLFDKVTIADPGYMQGYDDCMQQGPASARDLICAQYVAGYKVLPPLMDVNMEAAYTSSLLGSIAGVGWTAGLSSFAAIPFAQSIFYRLNGVGITQQVLSENQKLIANKFNQALGAMQTGFTTTNEAFHKVQDAVNNNAQALSKLASELSNTFGAISASIGDIIQRLDPPEQDAQIDRLINGRLTTLNAFVAQQLVRSESAALSAQLAKDKVNECVKAQSKRSGFCGQGTHIVSFVVNAPNGLYFMHVGYYPSNHIEVVSAYGLCDAANPTNCIAPVNGYFIKTNNTRIVDEWSYTGSSFYAPEPITSLNTKYVAPQVTYQNISTNLPPPLLGNSTGIDFQDELDEFFKNVSTSIPNFGSLTQINTTLLDLTYEMLSLQQVVKALNESYIDLKELGNYTYGGYIPEAPRDGQAYVRKDGEWVLLSTF

SEQ ID NO: 14810 - RNA, 4062 nt, Artificial Sequence
  MERS-CoV/MERS-CoV-Jeddah-human-1__AHE78108.1 spike protein CDS gc (1-1353)
augauccacagcguguuccugcucauguuccugcugacccccaccgaguccuacgucgacgugggcccggacagcgugaaguccgccugcaucgaggucgacauccagcagacguucuucgacaagaccuggccccgccccaucgacgugagcaaggccgacgggaucaucuacccccagggccggaccuacuccaacaucaccaucacguaccagggccucuucccguaccagggggaccacggggacauguacguguacagcgcgggccacgccaccggcaccacgccccagaagcuguucgucgccaacuacucccaggacgugaagcaguucgccaacggguucgugguccgcaucggcgccgcggccaacagcaccgggaccgugaucaucucccccagcaccuccgccaccauccggaagaucuaccccgccuucaugcugggcagcuccguggggaacuucagcgacggcaagaugggccgcuucuucaaccacacgcucguccugcugccggacgggugcggcacccuccugcgggcguucuacugcauccuggagccccgcuccgggaaccacugccccgccggcaacagcuacaccuccuucgccaccuaccacacgcccgccaccgacugcagcgacggcaacuacaaccggaacgccucccucaacagcuucaaggaguacuucaaccugcgcaacugcaccuucauguacaccuacaacaucacggaggacgagauccuggagugguucgggaucacccagaccgcgcagggcgugcaccucuucagcucccgguacguggaccuguacgggggcaacauguuccaguucgccacccugccggucuacgacacgaucaaguacuacagcaucaucccccacuccauccgcagcauccaguccgaccggaaggccugggccgccuucuacguguacaagcuccagccccugaccuuccugcucgacuucagcguggacggguacauccgccgggcgaucgacugcggcuucaacgaccugucccagcugcacugcagcuacgaguccuucgacgucgagagcggcguguacuccgugagcuccuucgaggccaagcccagcggguccgucguggagcaggccgagggcguggagugcgacuucagcccgcuccuguccgggaccccgccccaggucuacaacuucaagcgccugguguucaccaacugcaacuacaaccucacgaagcugcugagccucuucuccgucaacgacuucacgugcagccagaucagccccgccgccaucgcguccaacugcuacagcucccugauccuggacuacuucagcuacccccucuccaugaaguccgaccugagcgugagcuccgccggccccaucagccaguucaacuacaagcaguccuucagcaacccgaccugccugauccucgccaccgugccccacaaccugaccaccaucaccaagccccugaaguacuccuacaucaacaagugcagccggcuccuguccgacgaccgcaccgaggucccccagcuggugaacgccaaccaguacagccccugcguguccaucguccccagcacggugugggaggacggggacuacuaccggaagcagcucagcccgcuggagggcggcggguggcugguggccuccggcagcaccgucgcgaugaccgagcagcuccagaugggguucggcaucaccgugcaguacgggaccgacacgaacuccgugugccccaagcuggaguucgccaacgacaccaagaucgccagccagcugggcaacugcgucgaguacucccucuacggcgugagcgggcgcggcguguuccagaacugcaccgccgucggggugcggcagcagcgcuucguguacgacgcguaccagaaccuggucggcuacuacuccgacgacggcaacuacuacugccugcgggccugcgugagcgugcccgucuccgugaucuacgacaaggagaccaagacgcacgccacccuguucgggagcguggccugcgagcacaucuccagcaccaugucccaguacagccgcuccacccgcagcaugcucaagcggcgcgacuccacguacggcccgcugcagacccccgucgggugcgugcugggccucgugaacagcucccuguucgucgaggacugcaagcugccccucgggcagagccugugcgcccugcccgacaccccgagcacccucacgccccgguccgugcgcagcgugcccggcgagaugcggcuggcguccaucgccuucaaccaccccauccaggucgaccagcugaacagcuccuacuucaagcucagcaucccgaccaacuucuccuucggcgugacccaggaguacauccagaccacgauccagaaggugaccgucgacugcaagcaguacgugugcaacggguuccagaagugcgagcagcugcugcgcgaguacggccaguucugcagcaagaucaaccaggcccuccacggggccaaccugcggcaggacgacuccgugcgcaaccuguucgccagcgucaaguccagccaguccagccccaucauccccggcuucgggggcgacuucaaccucacccugcuggagcccguguccaucagcaccggcucccggagcgcgcgcuccgccaucgaggaccuccuguucgacaaggugacgaucgccgacccgggguacaugcagggcuacgacgacugcaugcagcaggggcccgccagcgcccgggaccugaucugcgcgcaguacgucgccggcuacaaggugcucccgccccugauggacgugaacauggaggccgccuacaccagcucccugcucgggagcaucgcgggcgucggcuggaccgccgggcuguccagcuucgccgccauccccuucgcccaguccaucuucuaccgccugaacggcguggggaucacccagcagguccucagcgagaaccagaagcugaucgcgaacaaguucaaccaggcccugggcgccaugcagacgggguucaccaccaccaacgaggccuuccacaaggugcaggacgccgugaacaacaacgcgcaggcccucuccaagcuggccagcgagcuguccaacacguucggcgccaucagcgccuccaucggcgacaucauccagcggcucgacgugcuggagcaggacgcgcagaucgaccgccugaucaacgggcggcucaccacccugaacgccuucgucgcccagcagcuggugcgcagcgaguccgccgcgcucagcgcccagcuggccaaggacaaggugaacgagugcgucaaggcccaguccaagcggagcggcuucugcgggcagggcacccacaucguguccuucgucgugaacgcccccaacggccuguacuucaugcacgugggguacuaccccagcaaccacaucgaggucguguccgcguacggccucugcgacgccgccaaccccacgaacugcaucgccccggugaacggguacuucaucaagaccaacaacacccgcaucgucgacgaguggagcuacaccggcagcuccuucuacgcccccgagcccaucacgagccugaacaccaaguacguggcgccccaggugaccuaccagaacaucuccaccaaccugccgccgccccuccuggggaacagcaccggcaucgacuuccaggacgagcuggacgaguucuucaagaacgucuccacgagcauccccaacuucggcucccucacccagaucaacaccacccugcuggaccucacguacgagaugcugagccugcagcaggucgugaaggcccucaacgaguccuacaucgaccugaaggagcuggggaacuacaccuacuacaacaaguggcccugguacaucuggcucggcuucaucgccgggcugguggcccuggcccucugcguguucuucauccugugcugcaccggcugcgggaccaacugcaugggcaagcugaagugcaaccggugcugcgaccgcuacgaggaguacgaccucgagccccacaaggugcacguccacuga

SEQ ID NO: 14811 - RNA, 4062 nt, Artificial Sequence
  MERS-CoV/MERS-CoV-Jeddah-human-1__AHE78108.1 spike protein CDS gc (1-1353)(V1060P_L1061P)
augauccacagcguguuccugcucauguuccugcugacccccaccgaguccuacgucgacgugggcccggacagcgugaaguccgccugcaucgaggucgacauccagcagacguucuucgacaagaccuggccccgccccaucgacgugagcaaggccgacgggaucaucuacccccagggccggaccuacuccaacaucaccaucacguaccagggccucuucccguaccagggggaccacggggacauguacguguacagcgcgggccacgccaccggcaccacgccccagaagcuguucgucgccaacuacucccaggacgugaagcaguucgccaacggguucgugguccgcaucggcgccgcggccaacagcaccgggaccgugaucaucucccccagcaccuccgccaccauccggaagaucuaccccgccuucaugcugggcagcuccguggggaacuucagcgacggcaagaugggccgcuucuucaaccacacgcucguccugcugccggacgggugcggcacccuccugcgggcguucuacugcauccuggagccccgcuccgggaaccacugccccgccggcaacagcuacaccuccuucgccaccuaccacacgcccgccaccgacugcagcgacggcaacuacaaccggaacgccucccucaacagcuucaaggaguacuucaaccugcgcaacugcaccuucauguacaccuacaacaucacggaggacgagauccuggagugguucgggaucacccagaccgcgcagggcgugcaccucuucagcucccgguacguggaccuguacgggggcaacauguuccaguucgccacccugccggucuacgacacgaucaaguacuacagcaucaucccccacuccauccgcagcauccaguccgaccggaaggccugggccgccuucuacguguacaagcuccagccccugaccuuccugcucgacuucagcguggacggguacauccgccgggcgaucgacugcggcuucaacgaccugucccagcugcacugcagcuacgaguccuucgacgucgagagcggcguguacuccgugagcuccuucgaggccaagcccagcggguccgucguggagcaggccgagggcguggagugcgacuucagcccgcuccuguccgggaccccgccccaggucuacaacuucaagcgccugguguucaccaacugcaacuacaaccucacgaagcugcugagccucuucuccgucaacgacuucacgugcagccagaucagccccgccgccaucgcguccaacugcuacagcucccugauccuggacuacuucagcuacccccucuccaugaaguccgaccugagcgugagcuccgccggccccaucagccaguucaacuacaagcaguccuucagcaacccgaccugccugauccucgccaccgugccccacaaccugaccaccaucaccaagccccugaaguacuccuacaucaacaagugcagccggcuccuguccgacgaccgcaccgaggucccccagcuggugaacgccaaccaguacagccccugcguguccaucguccccagcacggugugggaggacggggacuacuaccggaagcagcucagcccgcuggagggcggcggguggcugguggccuccggcagcaccgucgcgaugaccgagcagcuccagaugggguucggcaucaccgugcaguacgggaccgacacgaacuccgugugccccaagcuggaguucgccaacgacaccaagaucgccagccagcugggcaacugcgucgaguacucccucuacggcgugagcgggcgcggcguguuccagaacugcaccgccgucggggugcggcagcagcgcuucguguacgacgcguaccagaaccuggucggcuacuacuccgacgacggcaacuacuacugccugcgggccugcgugagcgugcccgucuccgugaucuacgacaaggagaccaagacgcacgccacccuguucgggagcguggccugcgagcacaucuccagcaccaugucccaguacagccgcuccacccgcagcaugcucaagcggcgcgacuccacguacggcccgcugcagacccccgucgggugcgugcugggccucgugaacagcucccuguucgucgaggacugcaagcugccccucgggcagagccugugcgcccugcccgacaccccgagcacccucacgccccgguccgugcgcagcgugcccggcgagaugcggcuggcguccaucgccuucaaccaccccauccaggucgaccagcugaacagcuccuacuucaagcucagcaucccgaccaacuucuccuucggcgugacccaggaguacauccagaccacgauccagaaggugaccgucgacugcaagcaguacgugugcaacggguuccagaagugcgagcagcugcugcgcgaguacggccaguucugcagcaagaucaaccaggcccuccacggggccaaccugcggcaggacgacuccgugcgcaaccuguucgccagcgucaaguccagccaguccagccccaucauccccggcuucgggggcgacuucaaccucacccugcuggagcccguguccaucagcaccggcucccggagcgcgcgcuccgccaucgaggaccuccuguucgacaaggugacgaucgccgacccgggguacaugcagggcuacgacgacugcaugcagcaggggcccgccagcgcccgggaccugaucugcgcgcaguacgucgccggcuacaaggugcucccgccccugauggacgugaacauggaggccgccuacaccagcucccugcucgggagcaucgcgggcgucggcuggaccgccgggcuguccagcuucgccgccauccccuucgcccaguccaucuucuaccgccugaacggcguggggaucacccagcagguccucagcgagaaccagaagcugaucgcgaacaaguucaaccaggcccugggcgccaugcagacgggguucaccaccaccaacgaggccuuccacaaggugcaggacgccgugaacaacaacgcgcaggcccucuccaagcuggccagcgagcuguccaacacguucggcgccaucagcgccuccaucggcgacaucauccagcggcucgacccgcccgagcaggacgcgcagaucgaccgccugaucaacgggcggcucaccacccugaacgccuucgucgcccagcagcuggugcgcagcgaguccgccgcgcucagcgcccagcuggccaaggacaaggugaacgagugcgucaaggcccaguccaagcggagcggcuucugcgggcagggcacccacaucguguccuucgucgugaacgcccccaacggccuguacuucaugcacgugggguacuaccccagcaaccacaucgaggucguguccgcguacggccucugcgacgccgccaaccccacgaacugcaucgccccggugaacggguacuucaucaagaccaacaacacccgcaucgucgacgaguggagcuacaccggcagcuccuucuacgcccccgagcccaucacgagccugaacaccaaguacguggcgccccaggugaccuaccagaacaucuccaccaaccugccgccgccccuccuggggaacagcaccggcaucgacuuccaggacgagcuggacgaguucuucaagaacgucuccacgagcauccccaacuucggcucccucacccagaucaacaccacccugcuggaccucacguacgagaugcugagccugcagcaggucgugaaggcccucaacgaguccuacaucgaccugaaggagcuggggaacuacaccuacuacaacaaguggcccugguacaucuggcucggcuucaucgccgggcugguggcccuggcccucugcguguucuucauccugugcugcaccggcugcgggaccaacugcaugggcaagcugaagugcaaccggugcugcgaccgcuacgaggaguacgaccucgagccccacaaggugcacguccacuga

SEQ ID NO: 14812 - RNA, 4062 nt, Artificial Sequence
  MERS-CoV/Al-Hasa_4_2013__AGN70929.1 spike protein CDS gc (1-1353)
augauccacagcguguuccugcucauguuccugcugacccccaccgaguccuacgucgacgugggcccggacagcgugaaguccgccugcaucgaggucgacauccagcagacguucuucgacaagaccuggccccgccccaucgacgugagcaaggccgacgggaucaucuacccccagggccggaccuacuccaacaucaccaucacguaccagggccucuucccguaccagggcgaccacggggacauguacguguacagcgcgggccacgccaccggcaccacgccccagaagcuguucgucgccaacuacucccaggacgugaagcaguucgccaacggguucgugguccgcaucggcgccgcggccaacagcaccgggaccgugaucaucucccccagcaccuccgccaccauccggaagaucuaccccgccuucaugcugggcagcuccguggggaacuucagcgacggcaagaugggccgcuucuucaaccacacgcucguccugcugccggacgggugcggcacccuccugcgggcguucuacugcauccuggagccccgcuccgggaaccacugccccgccggcaacagcuacaccuccuucgccaccuaccacacgcccgccaccgacugcagcgacggcaacuacaaccggaacgccucccucaacagcuucaaggaguacuucaaccugcgcaacugcaccuucauguacaccuacaacaucacggaggacgagauccuggagugguucgggaucacccagaccgcgcagggcgugcaccucuucagcucccgguacguggaccuguacgggggcaacauguuccaguucgccacccugccggucuacgacacgaucaaguacuacagcaucaucccccacuccauccgcagcauccaguccgaccggaaggccugggccgccuucuacguguacaagcuccagccccugaccuuccugcucgacuucagcguggacggguacauccgccgggcgaucgacugcggcuucaacgaccugucccagcugcacugcagcuacgaguccuucgacgucgagagcggcguguacuccgugagcuccuucgaggccaagcccagcggguccgucguggagcaggccgagggcguggagugcgacuucagcccgcuccuguccgggaccccgccccaggucuacaacuucaagcgccugguguucaccaacugcaacuacaaccucacgaagcugcugagccucuucuccgucaacgacuucacgugcagccagaucagccccgccgccaucgcguccaacugcuacagcucccugauccuggacuacuucagcuacccccucuccaugaaguccgaccugagcgugagcuccgccgggcccaucagccaguucaacuacaagcaguccuucagcaacccgaccugccugauccucgccaccgugccccacaaccugaccaccaucaccaagccccugaaguacuccuacaucaacaagugcagccggcuccuguccgacgaccgcaccgaggucccccagcuggugaacgccaaccaguacagccccugcguguccaucguccccagcacggugugggaggacggggacuacuaccggaagcagcucagcccgcuggagggcggcggguggcugguggccuccggcagcaccgucgcgaugaccgagcagcuccagaugggguucggcaucaccgugcaguacgggaccgacacgaacuccgugugccccaagcuggaguucgccaacgacaccaagaucgccagccagcugggcaacugcgucgaguacucccuguacggcgugagcgggcgcggcguguuccagaacugcaccgccgucggggugcggcagcagcgcuucguguacgacgcguaccagaaccucgucggcuacuacuccgacgacggcaacuacuacugccugcgggccugcgugagcgugcccgucuccgugaucuacgacaaggagaccaagacgcacgccacccuguucgggagcguggccugcgagcacaucuccagcaccaugucccaguacagccgcuccacccgcagcaugcucaagcggcgcgacuccacguacggcccgcugcagacccccgucgggugcgugcugggccucgugaacagcucccuguucgucgaggacugcaagcugccccucgggcagagccugugcgcccugcccgacaccccgagcacccucacgccccgguccgugcgcagcgugcccggcgagaugcggcuggcguccaucgccuucaaccaccccauccaggucgaccagcugaacagcuccuacuucaagcucagcaucccgaccaacuucuccuucggcgugacccaggaguacauccagaccacgauccagaaggugaccgucgacugcaagcaguacgugugcaacggguuccagaagugcgagcagcugcugcgcgaguacggccaguucugcagcaagaucaaccaggcccuccacggggccaaccugcggcaggacgacuccgugcgcaaccuguucgccagcgucaaguccagccaguccagccccaucauccccggcuucgggggcgacuucaaccucacccugcuggagcccguguccaucagcaccggcucccggagcgcgcgcuccgccaucgaggaccuccuguucgacaaggugacgaucgccgacccgggguacaugcagggcuacgacgacugcaugcagcaggggcccgccagcgcccgggaccugaucugcgcgcaguacgucgccggcuacaaggugcucccgccccugauggacgugaacauggaggccgccuacaccagcucccugcucgggagcaucgcgggcgucggcuggaccgccgggcuguccagcuucgccgccauccccuucgcccaguccaucuucuaccgccugaacggcguggggaucacccagcagguccucagcgagaaccagaagcugaucgcgaacaaguucaaccaggcccugggcgccaugcagacgggguucaccaccaccaacgaggccuuccggaaggugcaggacgccgugaacaacaacgcgcaggcccucuccaagcuggccagcgagcuguccaacacguucggcgccaucagcgccuccaucggcgacaucauccagcgccucgacgugcuggagcaggacgcgcagaucgaccggcugaucaacgggcgccucaccacccugaacgccuucgucgcccagcagcuggugcggagcgaguccgccgcgcucagcgcccagcuggccaaggacaaggugaacgagugcgucaaggcccaguccaagcgcagcggcuucugcgggcagggcacccacaucguguccuucgucgugaacgcccccaacggccuguacuucaugcacgugggguacuaccccagcaaccacaucgaggucguguccgcguacggccucugcgacgccgccaaccccacgaacugcaucgccccggugaacggguacuucaucaagaccaacaacacccggaucgucgacgaguggagcuacaccggcagcuccuucuacgcccccgagcccaucacgagccugaacaccaaguacguggcgccccacgugaccuaccagaacaucuccaccaaccugccgccgccccuccuggggaacagcaccggcaucgacuuccaggacgagcuggacgaguucuucaagaacgucuccacgagcauccccaacuucggcucccucacccagaucaacaccacccugcuggaccucacguacgagaugcugagccugcagcaggucgugaaggcccucaacgaguccuacaucgaccugaaggagcuggggaacuacaccuacuacaacaaguggcccugguacaucuggcucggcuucaucgccgggcugguggcccuggcccucugcguguucuucauccugugcugcaccggcugcgggaccaacugcaugggcaagcugaagugcaaccgcugcugcgaccgcuacgaggaguacgaccucgagccccacaaggugcacguccacuga

SEQ ID NO: 14813 - RNA, 4062 nt, Artificial Sequence
  MERS-CoV/Al-Hasa_4_2013__AGN70929.1 spike protein CDS gc (1-1353)(V1060P_L1061P)
augauccacagcguguuccugcucauguuccugcugacccccaccgaguccuacgucgacgugggcccggacagcgugaaguccgccugcaucgaggucgacauccagcagacguucuucgacaagaccuggccccgccccaucgacgugagcaaggccgacgggaucaucuacccccagggccggaccuacuccaacaucaccaucacguaccagggccucuucccguaccagggcgaccacggggacauguacguguacagcgcgggccacgccaccggcaccacgccccagaagcuguucgucgccaacuacucccaggacgugaagcaguucgccaacggguucgugguccgcaucggcgccgcggccaacagcaccgggaccgugaucaucucccccagcaccuccgccaccauccggaagaucuaccccgccuucaugcugggcagcuccguggggaacuucagcgacggcaagaugggccgcuucuucaaccacacgcucguccugcugccggacgggugcggcacccuccugcgggcguucuacugcauccuggagccccgcuccgggaaccacugccccgccggcaacagcuacaccuccuucgccaccuaccacacgcccgccaccgacugcagcgacggcaacuacaaccggaacgccucccucaacagcuucaaggaguacuucaaccugcgcaacugcaccuucauguacaccuacaacaucacggaggacgagauccuggagugguucgggaucacccagaccgcgcagggcgugcaccucuucagcucccgguacguggaccuguacgggggcaacauguuccaguucgccacccugccggucuacgacacgaucaaguacuacagcaucaucccccacuccauccgcagcauccaguccgaccggaaggccugggccgccuucuacguguacaagcuccagccccugaccuuccugcucgacuucagcguggacggguacauccgccgggcgaucgacugcggcuucaacgaccugucccagcugcacugcagcuacgaguccuucgacgucgagagcggcguguacuccgugagcuccuucgaggccaagcccagcggguccgucguggagcaggccgagggcguggagugcgacuucagcccgcuccuguccgggaccccgccccaggucuacaacuucaagcgccugguguucaccaacugcaacuacaaccucacgaagcugcugagccucuucuccgucaacgacuucacgugcagccagaucagccccgccgccaucgcguccaacugcuacagcucccugauccuggacuacuucagcuacccccucuccaugaaguccgaccugagcgugagcuccgccgggcccaucagccaguucaacuacaagcaguccuucagcaacccgaccugccugauccucgccaccgugccccacaaccugaccaccaucaccaagccccugaaguacuccuacaucaacaagugcagccggcuccuguccgacgaccgcaccgaggucccccagcuggugaacgccaaccaguacagccccugcguguccaucguccccagcacggugugggaggacggggacuacuaccggaagcagcucagcccgcuggagggcggcggguggcugguggccuccggcagcaccgucgcgaugaccgagcagcuccagaugggguucggcaucaccgugcaguacgggaccgacacgaacuccgugugccccaagcuggaguucgccaacgacaccaagaucgccagccagcugggcaacugcgucgaguacucccuguacggcgugagcgggcgcggcguguuccagaacugcaccgccgucggggugcggcagcagcgcuucguguacgacgcguaccagaaccucgucggcuacuacuccgacgacggcaacuacuacugccugcgggccugcgugagcgugcccgucuccgugaucuacgacaaggagaccaagacgcacgccacccuguucgggagcguggccugcgagcacaucuccagcaccaugucccaguacagccgcuccacccgcagcaugcucaagcggcgcgacuccacguacggcccgcugcagacccccgucgggugcgugcugggccucgugaacagcucccuguucgucgaggacugcaagcugccccucgggcagagccugugcgcccugcccgacaccccgagcacccucacgccccgguccgugcgcagcgugcccggcgagaugcggcuggcguccaucgccuucaaccaccccauccaggucgaccagcugaacagcuccuacuucaagcucagcaucccgaccaacuucuccuucggcgugacccaggaguacauccagaccacgauccagaaggugaccgucgacugcaagcaguacgugugcaacggguuccagaagugcgagcagcugcugcgcgaguacggccaguucugcagcaagaucaaccaggcccuccacggggccaaccugcggcaggacgacuccgugcgcaaccuguucgccagcgucaaguccagccaguccagccccaucauccccggcuucgggggcgacuucaaccucacccugcuggagcccguguccaucagcaccggcucccggagcgcgcgcuccgccaucgaggaccuccuguucgacaaggugacgaucgccgacccgggguacaugcagggcuacgacgacugcaugcagcaggggcccgccagcgcccgggaccugaucugcgcgcaguacgucgccggcuacaaggugcucccgccccugauggacgugaacauggaggccgccuacaccagcucccugcucgggagcaucgcgggcgucggcuggaccgccgggcuguccagcuucgccgccauccccuucgcccaguccaucuucuaccgccugaacggcguggggaucacccagcagguccucagcgagaaccagaagcugaucgcgaacaaguucaaccaggcccugggcgccaugcagacgggguucaccaccaccaacgaggccuuccggaaggugcaggacgccgugaacaacaacgcgcaggcccucuccaagcuggccagcgagcuguccaacacguucggcgccaucagcgccuccaucggcgacaucauccagcgccucgacccgcccgagcaggacgcgcagaucgaccggcugaucaacgggcgccugaccacccucaacgccuucguggcccagcagcugguccggagcgaguccgccgcgcugagcgcccagcucgccaaggacaaggugaacgagugcgugaaggcccaguccaagcgcagcggcuucugcgggcagggcacccacaucgucuccuucguggucaacgcccccaacggccuguacuucaugcacgugggguacuaccccagcaaccacaucgagguggucuccgcguacggccugugcgacgccgccaaccccacgaacugcaucgcccccgugaacggguacuucaucaagaccaacaacacccggaucguggacgaguggagcuacaccggcagcuccuucuacgcccccgagccgaucacgagccucaacaccaaguacgucgcgccccacgugaccuaccagaacaucuccaccaaccugcccccgccccugcucgggaacagcaccggcaucgacuuccaggacgagcuggacgaguucuucaagaacguguccacgagcauccccaacuucggcucccugacccagaucaacaccacccuccuggaccugacguacgagaugcucagccugcagcaggucgugaaggcccugaacgaguccuacaucgaccucaaggagcuggggaacuacaccuacuacaacaaguggcccugguacaucuggcugggcuucaucgccgggcucguggcccuggcccugugcgucuucuucauccucugcugcaccggcugcgggaccaacugcaugggcaagcugaagugcaaccgcugcugcgaccgcuacgaggaguacgaccuggagccgcacaaggugcacgugcacuga

SEQ ID NO: 14814 - RNA, 4062 nt, Artificial Sequence
  MERS-CoV/Riyadh_14_2013__AHI48572.1 spike protein CDS gc (1-1353)
augauccacagcguguuccugcucauguuccugcugacccccaccgaguccuacgucgacgugggcccggacagcgugaaguccgccugcaucgaggucgacauccagcagacguucuucgacaagaccuggccccgccccaucgacgugagcaaggccgacgggaucaucuacccccagggccggaccuacuccaacaucaccaucacguaccagggccucuucccguaccagggcgaccacggggacauguacguguacagcgcgggccacgccaccggcaccacgccccagaagcuguucgucgccaacuacucccaggacgugaagcaguucgccaacggguucgugguccgcaucggcgccgcggccaacagcaccgggaccgugaucaucucccccagcaccuccgccaccauccggaagaucuaccccgccuucaugcugggcagcuccguggggaacuucagcgacggcaagaugggccgcuucuucaaccacacgcucguccugcugccggacgggugcggcacccuccugcgggcguucuacugcauccuggagccccgcuccgggaaccacugccccgccggcaacagcuacaccuccuucgccaccuaccacacgcccgccaccgacugcagcgacggcaacuacaaccggaacgccucccucaacagcuucaaggaguacuucaaccugcgcaacugcaccuucauguacaccuacaacaucacggaggacgagauccuggagugguucgggaucacccagaccgcgcagggcgugcaccucuucagcucccgguacguggaccuguacgggggcaacauguuccaguucgccacccugccggucuacgacacgaucaaguacuacagcaucaucccccacuccauccgcagcauccaguccgaccggaaggccugggccgccuucuacguguacaagcuccagccccugaccuuccugcucgacuucagcguggacggguacauccgccgggcgaucgacugcggcuucaacgaccugucccagcugcacugcagcuacgaguccuucgacgucgagagcggcguguacuccgugagcuccuucgaggccaagcccagcggguccgucguggagcaggccgagggcguggagugcgacuucagcccgcuccuguccgggaccccgccccaggucuacaacuucaagcgccugguguucaccaacugcaacuacaaccucacgaagcugcugagccucuucuccgucaacgacuucacgugcagccagaucagccccgccgccaucgcguccaacugcuacagcucccugauccuggacuacuucagcuacccccucuccaugaaguccgaccugagcgugagcuccgccgggcccaucagccaguucaacuacaagcaguccuucagcaacccgaccugccugauccucgccaccgugccccacaaccugaccaccaucaccaagccccugaaguacuccuacaucaacaagugcagccggcuccuguccgacgaccgcaccgaggucccccagcuggugaacgccaaccaguacagccccugcguguccaucguccccagcacggugugggaggacggggacuacuaccggaagcagcucagcccgcuggagggcggcggguggcugguggccuccggcagcaccgucgcgaugaccgagcagcuccagaugggguucggcaucaccgugcaguacgggaccgacacgaacuccgugugccccaagcuggaguucgccaacgacaccaagaucgccagccagcugggcaacugcgucgaguacucccuguacggcgugagcgggcgcggcguguuccagaacugcaccgccgucggggugcggcagcagcgcuucguguacgacgcguaccagaaccucgucggcuacuacuccgacgacggcaacuacuacugccugcgggccugcgugagcgugcccgucuccgugaucuacgacaaggagaccaagacgcacgccacccuguucgggagcguggccugcgagcacaucuccagcaccaugucccaguacagccgcuccacccgcagcaugcucaagcggcgcgacuccacguacggcccgcugcagacccccgucgggugcgugcugggccucgugaacagcucccuguucgucgaggacugcaagcugccccucgggcagagccugugcgcccugcccgacaccccgagcacccucacgccccgguccgugcgcagcgugcccggcgagaugcggcuggcguccaucgccuucaaccaccccauccaggucgaccagcugaacagcuccuacuucaagcucagcaucccgaccaacuucuccuucggcgugacccaggaguacauccagaccacgauccagaaggugaccgucgacugcaagcaguacgugugcaacggguuccagaagugcgagcagcugcugcgcgaguacggccaguucugcagcaagaucaaccaggcccuccacggggccaaccugcggcaggacgacuccgugcgcaaccuguucgccagcgucaaguccagccaguccagccccaucauccccggcuucgggggcgacuucaaccucacccugcuggagcccguguccaucagcaccggcucccggagcgcgcgcuccgccaucgaggaccuccuguucgacaaggugacgaucgccgacccgggguacaugcagggcuacgacgacugcaugcagcaggggcccgccagcgcccgggaccugaucugcgcgcaguacgucgccggcuacaaggugcucccgccccugauggacgugaacauggaggccgccuacaccagcucccugcucgggagcaucgcgggcgucggcuggaccgccgggcuguccagcuucgccgccauccccuucgcccaguccaucuucuaccgccugaacggcguggggaucacccagcagguccucagcgagaaccagaagcugaucgcgaacaaguucaaccaggcccugggcgccaugcagacgggguucaccaccaccaacgaggccuuccggaaggugcaggacgccgugaacaacaacgcgcaggcccucuccaagcuggccagcgagcuguccaacacguucggcgccaucagcgccuccaucggcgacaucauccagcgccucgacgugcuggagcaggacgcgcagaucgaccggcugaucaacgggcgccucaccacccugaacgccuucgucgcccagcagcuggugcggagcgaguccgccgcgcucagcgcccagcuggccaaggacaaggugaacgagugcgucaaggcccaguccaagcgcagcggcuucugcgggcagggcacccacaucguguccuucgucgugaacgcccccaacggccuguacuucaugcacgugggguacuaccccagcaaccacaucgaggucguguccgcguacggccucugcgacgccgccaaccccacgaacugcaucgccccggugaacggguacuucaucaagaccaacaacacccggaucgucgacgaguggagcuacaccggcagcuccuucuacgcccccgagcccaucacgagccugaacaccaaguacguggcgccccaggugaccuaccagaacaucuccaccaaccugccgccgccccuccuggggaacagcaccggcaucgacuuccaggacgagcuggacgaguucuucaagaacgucuccacgagcauccccaacuucggcucccucacccagaucaacaccacccugcuggaccucacguacgagaugcugagccugcagcaggucgugaaggcccucaacgaguccuacaucgaccugaaggagcuggggaacuacaccuacuacaacaaguggcccugguacaucuggcucggcuucaucgccgggcugguggcccuggcccucugcguguucuucauccugugcugcaccggcugcgggaccaacugcaugggcaagcugaagugcaaccgcugcugcgaccgcuacgaggaguacgaccucgagccccacaaggugcacguccacuga

SEQ ID NO: 14815 - RNA, 4062 nt, Artificial Sequence
  MERS-CoV/Riyadh_14_2013__AHI48572.1 spike protein CDS gc (1-1353)(V1060P_L1061P)
augauccacagcguguuccugcucauguuccugcugacccccaccgaguccuacgucgacgugggcccggacagcgugaaguccgccugcaucgaggucgacauccagcagacguucuucgacaagaccuggccccgccccaucgacgugagcaaggccgacgggaucaucuacccccagggccggaccuacuccaacaucaccaucacguaccagggccucuucccguaccagggcgaccacggggacauguacguguacagcgcgggccacgccaccggcaccacgccccagaagcuguucgucgccaacuacucccaggacgugaagcaguucgccaacggguucgugguccgcaucggcgccgcggccaacagcaccgggaccgugaucaucucccccagcaccuccgccaccauccggaagaucuaccccgccuucaugcugggcagcuccguggggaacuucagcgacggcaagaugggccgcuucuucaaccacacgcucguccugcugccggacgggugcggcacccuccugcgggcguucuacugcauccuggagccccgcuccgggaaccacugccccgccggcaacagcuacaccuccuucgccaccuaccacacgcccgccaccgacugcagcgacggcaacuacaaccggaacgccucccucaacagcuucaaggaguacuucaaccugcgcaacugcaccuucauguacaccuacaacaucacggaggacgagauccuggagugguucgggaucacccagaccgcgcagggcgugcaccucuucagcucccgguacguggaccuguacgggggcaacauguuccaguucgccacccugccggucuacgacacgaucaaguacuacagcaucaucccccacuccauccgcagcauccaguccgaccggaaggccugggccgccuucuacguguacaagcuccagccccugaccuuccugcucgacuucagcguggacggguacauccgccgggcgaucgacugcggcuucaacgaccugucccagcugcacugcagcuacgaguccuucgacgucgagagcggcguguacuccgugagcuccuucgaggccaagcccagcggguccgucguggagcaggccgagggcguggagugcgacuucagcccgcuccuguccgggaccccgccccaggucuacaacuucaagcgccugguguucaccaacugcaacuacaaccucacgaagcugcugagccucuucuccgucaacgacuucacgugcagccagaucagccccgccgccaucgcguccaacugcuacagcucccugauccuggacuacuucagcuacccccucuccaugaaguccgaccugagcgugagcuccgccgggcccaucagccaguucaacuacaagcaguccuucagcaacccgaccugccugauccucgccaccgugccccacaaccugaccaccaucaccaagccccugaaguacuccuacaucaacaagugcagccggcuccuguccgacgaccgcaccgaggucccccagcuggugaacgccaaccaguacagccccugcguguccaucguccccagcacggugugggaggacggggacuacuaccggaagcagcucagcccgcuggagggcggcggguggcugguggccuccggcagcaccgucgcgaugaccgagcagcuccagaugggguucggcaucaccgugcaguacgggaccgacacgaacuccgugugccccaagcuggaguucgccaacgacaccaagaucgccagccagcugggcaacugcgucgaguacucccuguacggcgugagcgggcgcggcguguuccagaacugcaccgccgucggggugcggcagcagcgcuucguguacgacgcguaccagaaccucgucggcuacuacuccgacgacggcaacuacuacugccugcgggccugcgugagcgugcccgucuccgugaucuacgacaaggagaccaagacgcacgccacccuguucgggagcguggccugcgagcacaucuccagcaccaugucccaguacagccgcuccacccgcagcaugcucaagcggcgcgacuccacguacggcccgcugcagacccccgucgggugcgugcugggccucgugaacagcucccuguucgucgaggacugcaagcugccccucgggcagagccugugcgcccugcccgacaccccgagcacccucacgccccgguccgugcgcagcgugcccggcgagaugcggcuggcguccaucgccuucaaccaccccauccaggucgaccagcugaacagcuccuacuucaagcucagcaucccgaccaacuucuccuucggcgugacccaggaguacauccagaccacgauccagaaggugaccgucgacugcaagcaguacgugugcaacggguuccagaagugcgagcagcugcugcgcgaguacggccaguucugcagcaagaucaaccaggcccuccacggggccaaccugcggcaggacgacuccgugcgcaaccuguucgccagcgucaaguccagccaguccagccccaucauccccggcuucgggggcgacuucaaccucacccugcuggagcccguguccaucagcaccggcucccggagcgcgcgcuccgccaucgaggaccuccuguucgacaaggugacgaucgccgacccgggguacaugcagggcuacgacgacugcaugcagcaggggcccgccagcgcccgggaccugaucugcgcgcaguacgucgccggcuacaaggugcucccgccccugauggacgugaacauggaggccgccuacaccagcucccugcucgggagcaucgcgggcgucggcuggaccgccgggcuguccagcuucgccgccauccccuucgcccaguccaucuucuaccgccugaacggcguggggaucacccagcagguccucagcgagaaccagaagcugaucgcgaacaaguucaaccaggcccugggcgccaugcagacgggguucaccaccaccaacgaggccuuccggaaggugcaggacgccgugaacaacaacgcgcaggcccucuccaagcuggccagcgagcuguccaacacguucggcgccaucagcgccuccaucggcgacaucauccagcgccucgacccgcccgagcaggacgcgcagaucgaccggcugaucaacgggcgccugaccacccucaacgccuucguggcccagcagcugguccggagcgaguccgccgcgcugagcgcccagcucgccaaggacaaggugaacgagugcgugaaggcccaguccaagcgcagcggcuucugcgggcagggcacccacaucgucuccuucguggucaacgcccccaacggccuguacuucaugcacgugggguacuaccccagcaaccacaucgagguggucuccgcguacggccugugcgacgccgccaaccccacgaacugcaucgcccccgugaacggguacuucaucaagaccaacaacacccggaucguggacgaguggagcuacaccggcagcuccuucuacgcccccgagccgaucacgagccucaacaccaaguacgucgcgccccaggugaccuaccagaacaucuccaccaaccugcccccgccccugcucgggaacagcaccggcaucgacuuccaggacgagcuggacgaguucuucaagaacguguccacgagcauccccaacuucggcucccugacccagaucaacaccacccuccuggaccugacguacgagaugcucagccugcagcaggucgugaaggcccugaacgaguccuacaucgaccucaaggagcuggggaacuacaccuacuacaacaaguggcccugguacaucuggcugggcuucaucgccgggcucguggcccuggcccugugcgucuucuucauccucugcugcaccggcugcgggaccaacugcaugggcaagcugaagugcaaccgcugcugcgaccgcuacgaggaguacgaccuggagccgcacaaggugcacgugcacuga

SEQ ID NO: 14816 - RNA, 4062 nt, Artificial Sequence
  MERS-CoV/Riyadh_14_2013__AHI48572.1 spike protein CDS gc (1-1353)(R1020Q)
augauccacagcguguuccugcucauguuccugcugacccccaccgaguccuacgucgacgugggcccggacagcgugaaguccgccugcaucgaggucgacauccagcagacguucuucgacaagaccuggccccgccccaucgacgugagcaaggccgacgggaucaucuacccccagggccggaccuacuccaacaucaccaucacguaccagggccucuucccguaccagggcgaccacggggacauguacguguacagcgcgggccacgccaccggcaccacgccccagaagcuguucgucgccaacuacucccaggacgugaagcaguucgccaacggguucgugguccgcaucggcgccgcggccaacagcaccgggaccgugaucaucucccccagcaccuccgccaccauccggaagaucuaccccgccuucaugcugggcagcuccguggggaacuucagcgacggcaagaugggccgcuucuucaaccacacgcucguccugcugccggacgggugcggcacccuccugcgggcguucuacugcauccuggagccccgcuccgggaaccacugccccgccggcaacagcuacaccuccuucgccaccuaccacacgcccgccaccgacugcagcgacggcaacuacaaccggaacgccucccucaacagcuucaaggaguacuucaaccugcgcaacugcaccuucauguacaccuacaacaucacggaggacgagauccuggagugguucgggaucacccagaccgcgcagggcgugcaccucuucagcucccgguacguggaccuguacgggggcaacauguuccaguucgccacccugccggucuacgacacgaucaaguacuacagcaucaucccccacuccauccgcagcauccaguccgaccggaaggccugggccgccuucuacguguacaagcuccagccccugaccuuccugcucgacuucagcguggacggguacauccgccgggcgaucgacugcggcuucaacgaccugucccagcugcacugcagcuacgaguccuucgacgucgagagcggcguguacuccgugagcuccuucgaggccaagcccagcggguccgucguggagcaggccgagggcguggagugcgacuucagcccgcuccuguccgggaccccgccccaggucuacaacuucaagcgccugguguucaccaacugcaacuacaaccucacgaagcugcugagccucuucuccgucaacgacuucacgugcagccagaucagccccgccgccaucgcguccaacugcuacagcucccugauccuggacuacuucagcuacccccucuccaugaaguccgaccugagcgugagcuccgccgggcccaucagccaguucaacuacaagcaguccuucagcaacccgaccugccugauccucgccaccgugccccacaaccugaccaccaucaccaagccccugaaguacuccuacaucaacaagugcagccggcuccuguccgacgaccgcaccgaggucccccagcuggugaacgccaaccaguacagccccugcguguccaucguccccagcacggugugggaggacggggacuacuaccggaagcagcucagcccgcuggagggcggcggguggcugguggccuccggcagcaccgucgcgaugaccgagcagcuccagaugggguucggcaucaccgugcaguacgggaccgacacgaacuccgugugccccaagcuggaguucgccaacgacaccaagaucgccagccagcugggcaacugcgucgaguacucccuguacggcgugagcgggcgcggcguguuccagaacugcaccgccgucggggugcggcagcagcgcuucguguacgacgcguaccagaaccucgucggcuacuacuccgacgacggcaacuacuacugccugcgggccugcgugagcgugcccgucuccgugaucuacgacaaggagaccaagacgcacgccacccuguucgggagcguggccugcgagcacaucuccagcaccaugucccaguacagccgcuccacccgcagcaugcucaagcggcgcgacuccacguacggcccgcugcagacccccgucgggugcgugcugggccucgugaacagcucccuguucgucgaggacugcaagcugccccucgggcagagccugugcgcccugcccgacaccccgagcacccucacgccccgguccgugcgcagcgugcccggcgagaugcggcuggcguccaucgccuucaaccaccccauccaggucgaccagcugaacagcuccuacuucaagcucagcaucccgaccaacuucuccuucggcgugacccaggaguacauccagaccacgauccagaaggugaccgucgacugcaagcaguacgugugcaacggguuccagaagugcgagcagcugcugcgcgaguacggccaguucugcagcaagaucaaccaggcccuccacggggccaaccugcggcaggacgacuccgugcgcaaccuguucgccagcgucaaguccagccaguccagccccaucauccccggcuucgggggcgacuucaaccucacccugcuggagcccguguccaucagcaccggcucccggagcgcgcgcuccgccaucgaggaccuccuguucgacaaggugacgaucgccgacccgggguacaugcagggcuacgacgacugcaugcagcaggggcccgccagcgcccgggaccugaucugcgcgcaguacgucgccggcuacaaggugcucccgccccugauggacgugaacauggaggccgccuacaccagcucccugcucgggagcaucgcgggcgucggcuggaccgccgggcuguccagcuucgccgccauccccuucgcccaguccaucuucuaccgccugaacggcguggggaucacccagcagguccucagcgagaaccagaagcugaucgcgaacaaguucaaccaggcccugggcgccaugcagacgggguucaccaccaccaacgaggccuuccagaaggugcaggacgccgugaacaacaacgcgcaggcccucuccaagcuggccagcgagcuguccaacacguucggcgccaucagcgccuccaucggcgacaucauccagcggcucgacgugcuggagcaggacgcgcagaucgaccgccugaucaacgggcggcucaccacccugaacgccuucgucgcccagcagcuggugcgcagcgaguccgccgcgcucagcgcccagcuggccaaggacaaggugaacgagugcgucaaggcccaguccaagcggagcggcuucugcgggcagggcacccacaucguguccuucgucgugaacgcccccaacggccuguacuucaugcacgugggguacuaccccagcaaccacaucgaggucguguccgcguacggccucugcgacgccgccaaccccacgaacugcaucgccccggugaacggguacuucaucaagaccaacaacacccgcaucgucgacgaguggagcuacaccggcagcuccuucuacgcccccgagcccaucacgagccugaacaccaaguacguggcgccccaggugaccuaccagaacaucuccaccaaccugccgccgccccuccuggggaacagcaccggcaucgacuuccaggacgagcuggacgaguucuucaagaacgucuccacgagcauccccaacuucggcucccucacccagaucaacaccacccugcuggaccucacguacgagaugcugagccugcagcaggucgugaaggcccucaacgaguccuacaucgaccugaaggagcuggggaacuacaccuacuacaacaaguggcccugguacaucuggcucggcuucaucgccgggcugguggcccuggcccucugcguguucuucauccugugcugcaccggcugcgggaccaacugcaugggcaagcugaagugcaaccggugcugcgaccgcuacgaggaguacgaccucgagccccacaaggugcacguccacuga

SEQ ID NO: 14817 - RNA, 1767 nt, Artificial Sequence
  MERS-CoV/Riyadh_14_2013__AHI48572.1 spike protein CDS gc (1-17_726-1296)(R1020Q)
augauccacagcguguuccugcucauguuccugcugacccccaccgaguccgacugcaagcucccccugggccagagccugugcgcccuccccgacacgcccuccacccugacgccccgcagcguccgguccgugccgggggagaugcgccuggccagcaucgcguucaaccaccccauccagguggaccagcucaacuccagcuacuucaagcuguccauccccaccaacuucagcuucggcgucacccaggaguacauccagaccaccauccagaaggugaccguggacugcaagcaguacgucugcaacggguuccagaagugcgagcagcugcuccgggaguacggccaguucugcuccaagaucaaccaggcccugcacggggccaaccugcgccaggacgacagcgugcggaaccucuucgccuccgucaagagcucccagagcucccccaucaucccgggcuucggcggggacuucaaccugacgcugcucgagcccgugagcaucuccaccggcagccgcagcgcccgguccgcgaucgaggaccugcuguucgacaaggugaccaucgccgaccccggguacaugcagggcuacgacgacugcaugcagcaggggcccgccagcgcccgcgaccucaucugcgcgcaguacguggccggcuacaagguccugccgccccugauggacgugaacauggaggccgccuacaccuccagccuccugggcuccaucgccggggugggcuggacggcggggcugagcuccuucgccgccauccccuucgcccagagcaucuucuaccggcucaacggcgucggcaucacccagcagguccuguccgagaaccagaagcugaucgccaacaaguucaaccaggcgcucggggccaugcagaccggcuucaccacgaccaacgaggccuuccagaaggugcaggacgccgugaacaacaacgcccaggcgcugagcaagcuggccuccgagcucagcaacaccuucggggccaucuccgccagcaucggcgacaucauccagcgccuggacgugcuggagcaggacgcccagaucgaccggcucaucaacgggcgccugaccacgcugaacgcguucguggcccagcagcucguccgguccgagagcgccgcccuguccgcgcagcuggccaaggacaaggugaacgagugcgugaaggcccagagcaagcgcuccggcuucugcggccaggggacccacaucgucagcuucguggucaacgcccccaacggccucuacuucaugcacgugggguacuacccgagcaaccacaucgagguggucuccgccuacggccugugcgacgcggccaaccccaccaacugcaucgcccccgugaacggguacuucaucaagaccaacaacacgcggaucguggacgaguggagcuacaccggcuccagcuucuacgcccccgagccgaucaccucccugaacaccaaguacgucgcgccccaggugacguaccagaacaucagcaccaaccucccgccgccccugcugggcaacuccaccgggaucgacuuccaggacgagcuggacgaguucuucaagaacgugagcaccuccauccccaacuucggcagccucacgcagaucaacaccacccugcuggaccucaccuacgagaugcugucccugcagcaggucgugaaggcccucaacgagagcuacaucgaccugaaggagcuggggaacuacacguacuacaacaaguggcccuga

SEQ ID NO: 14818 - RNA, 1848 nt, Artificial Sequence
  MERS-CoV/Riyadh_14_2013__AHI48572.1 spike protein CDS gc (1-17_726-1296)(R1020Q)_LeucineZipper
augauccacagcguguuccugcucauguuccugcugacccccaccgaguccgacugcaagcucccccugggccagagccugugcgcccuccccgacacgcccuccacccugacgccccgcagcguccgguccgugccgggggagaugcgccuggccagcaucgcguucaaccaccccauccagguggaccagcucaacuccagcuacuucaagcuguccauccccaccaacuucagcuucggcgucacccaggaguacauccagaccaccauccagaaggugaccguggacugcaagcaguacgucugcaacggguuccagaagugcgagcagcugcuccgggaguacggccaguucugcuccaagaucaaccaggcccugcacggggccaaccugcgccaggacgacagcgugcggaaccucuucgccuccgucaagagcucccagagcucccccaucaucccgggcuucggcggggacuucaaccugacgcugcucgagcccgugagcaucuccaccggcagccgcagcgcccgguccgcgaucgaggaccugcuguucgacaaggugaccaucgccgaccccggguacaugcagggcuacgacgacugcaugcagcaggggcccgccagcgcccgcgaccucaucugcgcgcaguacguggccggcuacaagguccugccgccccugauggacgugaacauggaggccgccuacaccuccagccuccugggcuccaucgccggggugggcuggacggcggggcugagcuccuucgccgccauccccuucgcccagagcaucuucuaccggcucaacggcgucggcaucacccagcagguccuguccgagaaccagaagcugaucgccaacaaguucaaccaggcgcucggggccaugcagaccggcuucaccacgaccaacgaggccuuccagaaggugcaggacgccgugaacaacaacgcccaggcgcugagcaagcuggccuccgagcucagcaacaccuucggggccaucuccgccagcaucggcgacaucauccagcgccuggacgugcuggagcaggacgcccagaucgaccggcucaucaacgggcgccugaccacgcugaacgcguucguggcccagcagcucguccgguccgagagcgccgcccuguccgcgcagcuggccaaggacaaggugaacgagugcgugaaggcccagagcaagcgcuccggcuucugcggccaggggacccacaucgucagcuucguggucaacgcccccaacggccucuacuucaugcacgugggguacuacccgagcaaccacaucgagguggucuccgccuacggccugugcgacgcggccaaccccaccaacugcaucgcccccgugaacggguacuucaucaagaccaacaacacgcggaucguggacgaguggagcuacaccggcuccagcuucuacgcccccgagccgaucaccucccugaacaccaaguacgucgcgccccaggugacguaccagaacaucagcaccaaccucccgccgccccugcugggcaacuccaccgggaucgacuuccaggacgagcuggacgaguucuucaagaacgugagcaccuccauccccaacuucggcagccucacgcagaucaacaccacccugcuggaccucaccuacgagaugcugucccugcagcaggucgugaaggcccucaacgagagcuacaucgaccugaaggagcuggggaacuacacguacuacaacaaguggcccgacaagaucgaggagauccucuccaagaucuaccacaucgagaacgagaucgcccgcaucaagaagcugaucggcgaggccuga

SEQ ID NO: 14819 - RNA, 4062 nt, Artificial Sequence
  MERS-CoV/England 1__YP_007188579.1 spike protein CDS gc (1-1353)
augauccacagcguguuccugcucauguuccugcugacccccaccgaguccuacgucgacgugggcccggacagcgugaaguccgccugcaucgaggucgacauccagcagacguucuucgacaagaccuggccccgccccaucgacgugagcaaggccgacgggaucaucuacccccagggccggaccuacuccaacaucaccaucacguaccagggccucuucccguaccagggcgaccacggggacauguacguguacagcgcgggccacgccaccggcaccacgccccagaagcuguucgucgccaacuacucccaggacgugaagcaguucgccaacggguucgugguccgcaucggcgccgcggccaacagcaccgggaccgugaucaucucccccagcaccuccgccaccauccggaagaucuaccccgccuucaugcugggcagcuccguggggaacuucagcgacggcaagaugggccgcuucuucaaccacacgcucguccugcugccggacgggugcggcacccuccugcgggcguucuacugcauccuggagccccgcuccgggaaccacugccccgccggcaacagcuacaccuccuucgccaccuaccacacgcccgccaccgacugcagcgacggcaacuacaaccggaacgccucccucaacagcuucaaggaguacuucaaccugcgcaacugcaccuucauguacaccuacaacaucacggaggacgagauccuggagugguucgggaucacccagaccgcgcagggcgugcaccucuucagcucccgguacguggaccuguacgggggcaacauguuccaguucgccacccugccggucuacgacacgaucaaguacuacagcaucaucccccacuccauccgcagcauccaguccgaccggaaggccugggccgccuucuacguguacaagcuccagccccugaccuuccugcucgacuucagcguggacggguacauccgccgggcgaucgacugcggcuucaacgaccugucccagcugcacugcagcuacgaguccuucgacgucgagagcggcguguacuccgugagcuccuucgaggccaagcccagcggguccgucguggagcaggccgagggcguggagugcgacuucagcccgcuccuguccgggaccccgccccaggucuacaacuucaagcgccugguguucaccaacugcaacuacaaccucacgaagcugcugagccucuucuccgucaacgacuucacgugcagccagaucagccccgccgccaucgcguccaacugcuacagcucccugauccuggacuacuucagcuacccccucuccaugaaguccgaccugagcgugagcuccgccgggcccaucagccaguucaacuacaagcaguccuucagcaacccgaccugccugauccucgccaccgugccccacaaccugaccaccaucaccaagccccugaaguacuccuacaucaacaagugcagccgguuccucuccgacgaccgcaccgaggucccccagcuggugaacgccaaccaguacagccccugcguguccaucguccccagcacggugugggaggacggggacuacuaccggaagcagcugagcccgcucgagggcggcggguggcugguggccuccggcagcaccgucgcgaugaccgagcagcugcagaugggguucggcaucaccgugcaguacgggaccgacacgaacuccgugugccccaagcucgaguucgccaacgacaccaagaucgccagccagcugggcaacugcgucgaguacucccuguacggcgugagcgggcgcggcguguuccagaacugcaccgccgucggggugcggcagcagcgcuucguguacgacgcguaccagaaccuggucggcuacuacuccgacgacggcaacuacuacugccuccgggccugcgugagcgugcccgucuccgugaucuacgacaaggagaccaagacgcacgccacccuguucgggagcguggccugcgagcacaucuccagcaccaugucccaguacagccgcuccacccgcagcaugcugaagcggcgcgacuccacguacggcccgcuccagacccccgucgggugcgugcugggccuggugaacagcucccucuucgucgaggacugcaagcugccccuggggcagagccucugcgcccugcccgacaccccgagcacccugacgccccgguccgugcgcagcgugcccggcgagaugcggcucgcguccaucgccuucaaccaccccauccaggucgaccagcugaacagcuccuacuucaagcugagcaucccgaccaacuucuccuucggcgugacccaggaguacauccagaccacgauccagaaggugaccgucgacugcaagcaguacgugugcaacggguuccagaagugcgagcagcuccugcgcgaguacggccaguucugcagcaagaucaaccaggcccugcacggggccaaccuccggcaggacgacuccgugcgcaaccuguucgccagcgucaaguccagccaguccagccccaucauccccggcuucgggggcgacuucaaccugacccuccuggagcccguguccaucagcaccggcucccggagcgcgcgcuccgccaucgaggaccuccuguucgacaaggugacgaucgccgacccgggguacaugcagggcuacgacgacugcaugcagcaggggcccgccagcgcccgggaccugaucugcgcgcaguacgucgccggcuacaaggugcugccgccccucauggacgugaacauggaggccgccuacaccagcucccugcuggggagcaucgcgggcgucggcuggaccgccgggcucuccagcuucgccgccauccccuucgcccaguccaucuucuaccgccugaacggcguggggaucacccagcagguccugagcgagaaccagaagcucaucgcgaacaaguucaaccaggcccugggcgccaugcagacgggguucaccaccaccaacgaggccuuccacaaggugcaggacgccgugaacaacaacgcgcaggcccuguccaagcucgccagcgagcuguccaacacguucggcgccaucagcgccuccaucggcgacaucauccagcggcuggacgugcucgagcaggacgcgcagaucgaccgccugaucaacgggcggcugaccacccucaacgccuucgucgcccagcagcuggugcgcagcgaguccgccgcgcugagcgcccagcucgccaaggacaaggugaacgagugcgucaaggcccaguccaagcggagcggcuucugcgggcagggcacccacaucguguccuucgucgugaacgcccccaacggccuguacuucaugcacgugggguacuaccccagcaaccacaucgaggucguguccgcguacggccugugcgacgccgccaaccccacgaacugcaucgccccggugaacggguacuucaucaagaccaacaacacccgcaucgucgacgaguggagcuacaccggcagcuccuucuacgcccccgagcccaucacgagccucaacaccaaguacguggcgccccaggugaccuaccagaacaucuccaccaaccugccgccgccccugcucgggaacagcaccggcaucgacuuccaggacgagcuggacgaguucuucaagaacgucuccacgagcauccccaacuucggcucccugacccagaucaacaccacccuccuggaccugacguacgagaugcucagccugcagcaggucgugaaggcccugaacgaguccuacaucgaccucaaggagcuggggaacuacaccuacuacaacaaguggcccugguacaucuggcugggcuucaucgccgggcucguggcccuggcccugugcguguucuucauccucugcugcaccggcugcgggaccaacugcaugggcaagcugaagugcaaccggugcugcgaccgcuacgaggaguacgaccuggagccccacaaggugcacguccacuga

SEQ ID NO: 14820 - RNA, 4062 nt, Artificial Sequence
  MERS-CoV/England 1__YP_007188579.1 spike protein CDS gc (1-1353)(V1060P_L1061P)
augauccacagcguguuccugcucauguuccugcugacccccaccgaguccuacgucgacgugggcccggacagcgugaaguccgccugcaucgaggucgacauccagcagacguucuucgacaagaccuggccccgccccaucgacgugagcaaggccgacgggaucaucuacccccagggccggaccuacuccaacaucaccaucacguaccagggccucuucccguaccagggcgaccacggggacauguacguguacagcgcgggccacgccaccggcaccacgccccagaagcuguucgucgccaacuacucccaggacgugaagcaguucgccaacggguucgugguccgcaucggcgccgcggccaacagcaccgggaccgugaucaucucccccagcaccuccgccaccauccggaagaucuaccccgccuucaugcugggcagcuccguggggaacuucagcgacggcaagaugggccgcuucuucaaccacacgcucguccugcugccggacgggugcggcacccuccugcgggcguucuacugcauccuggagccccgcuccgggaaccacugccccgccggcaacagcuacaccuccuucgccaccuaccacacgcccgccaccgacugcagcgacggcaacuacaaccggaacgccucccucaacagcuucaaggaguacuucaaccugcgcaacugcaccuucauguacaccuacaacaucacggaggacgagauccuggagugguucgggaucacccagaccgcgcagggcgugcaccucuucagcucccgguacguggaccuguacgggggcaacauguuccaguucgccacccugccggucuacgacacgaucaaguacuacagcaucaucccccacuccauccgcagcauccaguccgaccggaaggccugggccgccuucuacguguacaagcuccagccccugaccuuccugcucgacuucagcguggacggguacauccgccgggcgaucgacugcggcuucaacgaccugucccagcugcacugcagcuacgaguccuucgacgucgagagcggcguguacuccgugagcuccuucgaggccaagcccagcggguccgucguggagcaggccgagggcguggagugcgacuucagcccgcuccuguccgggaccccgccccaggucuacaacuucaagcgccugguguucaccaacugcaacuacaaccucacgaagcugcugagccucuucuccgucaacgacuucacgugcagccagaucagccccgccgccaucgcguccaacugcuacagcucccugauccuggacuacuucagcuacccccucuccaugaaguccgaccugagcgugagcuccgccgggcccaucagccaguucaacuacaagcaguccuucagcaacccgaccugccugauccucgccaccgugccccacaaccugaccaccaucaccaagccccugaaguacuccuacaucaacaagugcagccgguuccucuccgacgaccgcaccgaggucccccagcuggugaacgccaaccaguacagccccugcguguccaucguccccagcacggugugggaggacggggacuacuaccggaagcagcugagcccgcucgagggcggcggguggcugguggccuccggcagcaccgucgcgaugaccgagcagcugcagaugggguucggcaucaccgugcaguacgggaccgacacgaacuccgugugccccaagcucgaguucgccaacgacaccaagaucgccagccagcugggcaacugcgucgaguacucccuguacggcgugagcgggcgcggcguguuccagaacugcaccgccgucggggugcggcagcagcgcuucguguacgacgcguaccagaaccuggucggcuacuacuccgacgacggcaacuacuacugccuccgggccugcgugagcgugcccgucuccgugaucuacgacaaggagaccaagacgcacgccacccuguucgggagcguggccugcgagcacaucuccagcaccaugucccaguacagccgcuccacccgcagcaugcugaagcggcgcgacuccacguacggcccgcuccagacccccgucgggugcgugcugggccuggugaacagcucccucuucgucgaggacugcaagcugccccuggggcagagccucugcgcccugcccgacaccccgagcacccugacgccccgguccgugcgcagcgugcccggcgagaugcggcucgcguccaucgccuucaaccaccccauccaggucgaccagcugaacagcuccuacuucaagcugagcaucccgaccaacuucuccuucggcgugacccaggaguacauccagaccacgauccagaaggugaccgucgacugcaagcaguacgugugcaacggguuccagaagugcgagcagcuccugcgcgaguacggccaguucugcagcaagaucaaccaggcccugcacggggccaaccuccggcaggacgacuccgugcgcaaccuguucgccagcgucaaguccagccaguccagccccaucauccccggcuucgggggcgacuucaaccugacccuccuggagcccguguccaucagcaccggcucccggagcgcgcgcuccgccaucgaggaccuccuguucgacaaggugacgaucgccgacccgggguacaugcagggcuacgacgacugcaugcagcaggggcccgccagcgcccgggaccugaucugcgcgcaguacgucgccggcuacaaggugcugccgccccucauggacgugaacauggaggccgccuacaccagcucccugcuggggagcaucgcgggcgucggcuggaccgccgggcucuccagcuucgccgccauccccuucgcccaguccaucuucuaccgccugaacggcguggggaucacccagcagguccugagcgagaaccagaagcucaucgcgaacaaguucaaccaggcccugggcgccaugcagacgggguucaccaccaccaacgaggccuuccacaaggugcaggacgccgugaacaacaacgcgcaggcccuguccaagcucgccagcgagcuguccaacacguucggcgccaucagcgccuccaucggcgacaucauccagcggcuggacccgcccgagcaggacgcgcagaucgaccgccucaucaacgggcggcugaccacccugaacgccuucguggcccagcagcucguccgcagcgaguccgccgcgcugagcgcccagcuggccaaggacaaggugaacgagugcgugaaggcccaguccaagcggagcggcuucugcgggcagggcacccacaucgucuccuucguggucaacgcccccaacggccucuacuucaugcacgugggguacuaccccagcaaccacaucgagguggucuccgcguacggccugugcgacgccgccaaccccacgaacugcaucgcccccgugaacggguacuucaucaagaccaacaacacccgcaucguggacgaguggagcuacaccggcagcuccuucuacgcccccgagccgaucacgagccugaacaccaaguacgucgcgccccaggugaccuaccagaacaucuccaccaaccugcccccgccccuccuggggaacagcaccggcaucgacuuccaggacgagcucgacgaguucuucaagaacguguccacgagcauccccaacuucggcucccugacccagaucaacaccacccugcucgaccugacguacgagaugcugagccuccagcaggucgugaaggcccugaacgaguccuacaucgaccugaaggagcucgggaacuacaccuacuacaacaaguggcccugguacaucuggcugggcuucaucgccgggcugguggcccucgcccugugcgucuucuucauccugugcugcaccggcugcgggaccaacugcaugggcaagcucaagugcaaccggugcugcgaccgcuacgaggaguacgaccuggagccgcacaaggugcacgugcacuga

SEQ ID NO: 14821 - RNA, 3876 nt, Artificial Sequence
  MERS-CoV/England 1__YP_007188579.1 spike protein CDS gc (variant)
augauccacagcguguuccugcucauguuccugcugacccccaccgaguccuacgucgacgugggcccggacagcgugaaguccgccugcaucgaggucgacauccagcagacguucuucgacaagaccuggccccgccccaucgacgugagcaaggccgacgggaucaucuacccccagggccggaccuacuccaacaucaccaucacguaccagggccucuucccguaccagggcgaccacggggacauguacguguacagcgcgggccacgccaccggcaccacgccccagaagcuguucgucgccaacuacucccaggacgugaagcaguucgccaacggguucgugguccgcaucggcgccgcggccaacagcaccgggaccgugaucaucucccccagcaccuccgccaccauccggaagaucuaccccgccuucaugcugggcagcuccguggggaacuucagcgacggcaagaugggccgcuucuucaaccacacgcucguccugcugccggacgggugcggcacccuccugcgggcguucuacugcauccuggagccccgcuccgggaaccacugccccgccggcaacagcuacaccuccuucgccaccuaccacacgcccgccaccgacugcagcgacggcaacuacaaccggaacgccucccucaacagcuucaaggaguacuucaaccugcgcaacugcaccuucauguacaccuacaacaucacggaggacgagauccuggagugguucgggaucacccagaccgcgcagggcgugcaccucuucagcucccgguacguggaccuguacgggggcaacauguuccaguucgccacccugccggucuacgacacgaucaaguacuacagcaucaucccccacuccauccgcagcauccaguccgaccggaaggccugggccgccuucuacguguacaagcuccagccccugaccuuccugcucgacuucagcguggacggguacauccgccgggcgaucgacugcggcuucaacgaccugucccagcugcacugcagcuacgaguccuucgacgucgagagcggcguguacuccgugagcuccuucgaggccaagcccagcggguccgucguggagcaggccgagggcguggagugcgacuucagcccgcuccuguccgggaccccgccccaggucuacaacuucaagcgccugguguucaccaacugcaacuacaaccucacgaagcugcugagccucuucuccgucaacgacuucacgugcagccagaucagccccgccgccaucgcguccaacugcuacagcucccugauccuggacuacuucagcuacccccucuccaugaaguccgaccugagcgugagcuccgccgggcccaucagccaguucaacuacaagcaguccuucagcaacccgaccugccugauccucgccaccgugccccacaaccugaccaccaucaccaagccccugaaguacuccuacaucaacaagugcagccgguuccucuccgacgaccgcaccgaggucccccagcuggugaacgccaaccaguacagccccugcguguccaucguccccagcacggugugggaggacggggacuacuaccggaagcagcugagcccgcucgagggcggcggguggcugguggccuccggcagcaccgucgcgaugaccgagcagcugcagaugggguucggcaucaccgugcaguacgggaccgacacgaacuccgugugccccaagcucgaguucgccaacgacaccaagaucgccagccagcugggcaacugcgucgaguacucccuguacggcgugagcgggcgcggcguguuccagaacugcaccgccgucggggugcggcagcagcgcuucguguacgacgcguaccagaaccuggucggcuacuacuccgacgacggcaacuacuacugccuccgggccugcgugagcgugcccgucuccgugaucuacgacaaggagaccaagacgcacgccacccuguucgggagcguggccugcgagcacaucuccagcaccaugucccaguacagccgcuccacccgcagcaugcugaagcggcgcgacuccacguacggcccgcuccagacccccgucgggugcgugcugggccuggugaacagcucccucuucgucgaggacugcaagcugccccuggggcagagccucugcgcccugcccgacaccccgagcacccugacgccccgguccgugcgcagcgugcccggcgagaugcggcucgcguccaucgccuucaaccaccccauccaggucgaccagcugaacagcuccuacuucaagcugagcaucccgaccaacuucuccuucggcgugacccaggaguacauccagaccacgauccagaaggugaccgucgacugcaagcaguacgugugcaacggguuccagaagugcgagcagcuccugcgcgaguacggccaguucugcagcaagaucaaccaggcccugcacggggccaaccuccggcaggacgacuccgugcgcaaccuguucgccagcgucaaguccagccaguccagccccaucauccccggcuucgggggcgacuucaaccugacccuccuggagcccguguccaucagcaccggcucccggagcgcgcgcuccgccaucgaggaccuccuguucgacaaggugacgaucgccgacccgggguacaugcagggcuacgacgacugcaugcagcaggggcccgccagcgcccgggaccugaucugcgcgcaguacgucgccggcuacaaggugcugccgccccucauggacgugaacauggaggccgccuacaccagcucccugcuggggagcaucgcgggcgucggcuggaccgccgggcucuccagcuucgccgccauccccuucgcccaguccaucuucuaccgccugaacggcguggggaucacccagcagguccugagcgagaaccagaagcucaucgcgaacaaguucaaccaggcccugggcgccaugcagacgggguucaccaccaccaacgaggccuuccacaaggugcaggacgccgugaacaacaacgcgcaggcccuguccaagcucgccagcgagcuguccaacacguucggcgccaucagcgccuccaucggcgacaucauccagcggcuggacccgcccgagcaggacgcgcagaucgaccgccucaucaacgggcggcugaccacccugaacgccuucguggcccagcagcucguccgcagcgaguccgccgcgcugagcgcccagcuggccaaggacaaggugaacgagugcgugaaggcccaguccaagcggagcggcuucugcgggcagggcacccacaucgucuccuucguggucaacgcccccaacggccucuacuucaugcacgugggguacuaccccagcaaccacaucgagguggucuccgcguacggccugugcgacgccgccaaccccacgaacugcaucgcccccgugaacggguacuucaucaagaccaacaacacccgcaucguggacgaguggagcuacaccggcagcuccuucuacgcccccgagccgaucacgagccugaacaccaaguacgucgcgccccaggugaccuaccagaacaucuccaccaaccugcccccgccccuccuggggaacagcaccggcaucgacuuccaggacgagcucgacgaguucuucaagaacguguccacgagcauccccaacuucggcucccugacccagaucaacaccacccugcucgaccugacguacgagaugcugagccuccagcaggucgugaaggcccugaacgaguccuacaucgaccugaaggagcucgggaacuacaccuacuga

SEQ ID NO: 14822 - RNA, 3876 nt, Artificial Sequence
  MERS-CoV/England 1__YP_007188579.1 spike protein CDS gc (variant)
augauccacagcguguuccugcucauguuccugcugacccccaccgaguccuacgucgacgugggcccggacagcgugaaguccgccugcaucgaggucgacauccagcagacguucuucgacaagaccuggccccgccccaucgacgugagcaaggccgacgggaucaucuacccccagggccggaccuacuccaacaucaccaucacguaccagggccucuucccguaccagggcgaccacggggacauguacguguacagcgccggccacgccaccggcaccacgccccagaagcuguucgucgccaacuacucccaggacgugaagcaguucgccaacggguucgugguccgcaucggcgccgcggccaacagcaccgggaccgugaucaucucccccagcaccuccgccaccauccggaagaucuaccccgccuucaugcugggcagcuccguggggaacuucagcgacggcaagaugggccgcuucuucaaccacacgcucguccugcugccggacgggugcggcacccuccugcgggcguucuacugcauccuggagccccgcuccgggaaccacugccccgccggcaacagcuacaccuccuucgccaccuaccacacgcccgccaccgacugcagcgacggcaacuacaaccggaacgccucccucaacagcuucaaggaguacuucaaccugcgcaacugcaccuucauguacaccuacaacaucacggaggacgagauccuggagugguucgggaucacccagaccgcgcagggcgugcaccucuucagcucccgguacguggaccuguacgggggcaacauguuccaguucgccacccugccggucuacgacacgaucaaguacuacagcaucaucccccacuccauccgcagcauccaguccgaccggaaggccugggccgccuucuacguguacaagcuccagccccugaccuuccugcucgacuucagcguggacggguacauccgccgggcgaucgacugcggcuucaacgaccugucccagcugcacugcagcuacgaguccuucgacgucgagagcggcguguacuccgugagcuccuucgaggccaagcccagcggguccgucguggagcaggccgagggcguggagugcgacuucagcccgcuccuguccgggaccccgccccaggucuacaacuucaagcgccugguguucaccaacugcaacuacaaccucacgaagcugcugagccucuucuccgucaacgacuucacgugcagccagaucagccccgccgccaucgcguccaacugcuacagcucccugauccuggacuacuucagcuacccccucuccaugaaguccgaccugagcgugagcuccgccgggcccaucagccaguucaacuacaagcaguccuucagcaacccgaccugccugauccucgccaccgugccccacaaccugaccaccaucaccaagccccugaaguacuccuacaucaacaagugcagccgguuccucuccgacgaccgcaccgaggucccccagcuggugaacgccaaccaguacagccccugcguguccaucguccccagcacggugugggaggacggggacuacuaccggaagcagcugagcccgcucgagggcggcggguggcugguggccuccggcagcaccgucgcgaugaccgagcagcugcagaugggguucggcaucaccgugcaguacgggaccgacacgaacuccgugugccccaagcucgaguucgccaacgacaccaagaucgccagccagcugggcaacugcgucgaguacucccuguacggcgugagcgggcgcggcguguuccagaacugcaccgccgucggggugcggcagcagcgcuucguguacgacgcguaccagaaccuggucggcuacuacuccgacgacggcaacuacuacugccuccgggccugcgugagcgugcccgucuccgugaucuacgacaaggagaccaagacgcacgccacccuguucgggagcguggccugcgagcacaucuccagcaccaugucccaguacagccgcuccacccgcagcaugcugaagcggcgcgacuccacguacggcccgcuccagacccccgucgggugcgugcugggccuggugaacagcucccucuucgucgaggacugcaagcugccccuggggcagagccucugcgcccugcccgacaccccgagcacccugacgcccgcguccgugggcagcgugcccggcgagaugcggcucgccuccaucgccuucaaccaccccauccaggucgaccagcugaacagcuccuacuucaagcugagcaucccgaccaacuucuccuucggggugacccaggaguacauccagaccacgauccagaaggugaccgucgacugcaagcaguacgugugcaacggcuuccagaagugcgagcagcuccugcgcgaguacgggcaguucugcagcaagaucaaccaggcccugcacggcgccaaccuccggcaggacgacuccgugcgcaaccuguucgcgagcgucaaguccagccaguccagccccaucauccccggguucggcggcgacuucaaccugacccuccuggagcccguguccaucagcaccgggucccggagcgcccgcuccgccaucgaggaccuccuguucgacaaggugacgaucgccgacccgggcuacaugcagggguacgacgacugcaugcagcagggccccgccagcgcgcgggaccugaucugcgcccaguacgucgccggguacaaggugcugccgccccucauggacgugaacauggaggccgcguacaccagcucccugcugggcagcaucgccggcgucggguggaccgccggccucuccagcuucgccgccauccccuucgcgcaguccaucuucuaccgccugaacggggugggcaucacccagcagguccugagcgagaaccagaagcucaucgccaacaaguucaaccaggcccugggggccaugcagacgggcuucaccaccaccaacgaggccuuccacaaggugcaggacgcggugaacaacaacgcccaggcccuguccaagcucgccagcgagcuguccaacacguucggcgccaucagcgcguccaucggggacaucauccagcggcuggacccgcccgagcaggacgcccagaucgaccgccucaucaacggccggcugaccacccugaacgccuucguggcccagcagcucguccgcagcgaguccgcggcccugagcgcccagcuggccaaggacaaggugaacgagugcgugaaggcccaguccaagcggagcggguucugcggccagggcacccacaucgucuccuucguggucaacgcgcccaacgggcucuacuucaugcacgugggcuacuaccccagcaaccacaucgagguggucuccgccuacgggcugugcgacgccgccaaccccacgaacugcaucgcccccgugaacggcuacuucaucaagaccaacaacacccgcaucguggacgaguggagcuacaccgggagcuccuucuacgcgcccgagccgaucacgagccugaacaccaaguacgucgcgccccaggugaccuaccagaacaucuccaccaaccugcccccgccccuccugggcaacagcaccggcaucgacuuccaggacgagcucgacgaguucuucaagaacguguccacgagcauccccaacuucgggucccugacccagaucaacaccacccugcucgaccugacguacgagaugcugagccuccagcaggucgugaaggcccugaacgaguccuacaucgaccugaaggagcucggcaacuacaccuacuga

SEQ ID NO: 14823 - RNA, 3876 nt, Artificial Sequence
  MERS-CoV/England 1__YP_007188579.1 spike protein CDS gc (variant)
augauccacagcguguuccugcucauguuccugcugacccccaccgaguccuacgucgacgugggcccggacagcgugaaguccgccugcaucgaggucgacauccagcagacguucuucgacaagaccuggccccgccccaucgacgugagcaaggccgacgggaucaucuacccccagggccggaccuacuccaacaucaccaucacguaccagggccucuucccguaccagggcgaccacggggacauguacguguacagcgccggccacgccaccggcaccacgccccagaagcuguucgucgccaacuacucccaggacgugaagcaguucgccaacggguucgugguccgcaucggcgccgcggccaacagcaccgggaccgugaucaucucccccagcaccuccgccaccauccggaagaucuaccccgccuucaugcugggcagcuccguggggaacuucagcgacggcaagaugggccgcuucuucaaccacacgcucguccugcugccggacgggugcggcacccuccugcgggcguucuacugcauccuggagccccgcuccgggaaccacugccccgccggcaacagcuacaccuccuucgccaccuaccacacgcccgccaccgacugcagcgacggcaacuacaaccggaacgccucccucaacagcuucaaggaguacuucaaccugcgcaacugcaccuucauguacaccuacaacaucacggaggacgagauccuggagugguucgggaucacccagaccgcgcagggcgugcaccucuucagcucccgguacguggaccuguacgggggcaacauguuccaguucgccacccugccggucuacgacacgaucaaguacuacagcaucaucccccacuccauccgcagcauccaguccgaccggaaggccugggccgccuucuacguguacaagcuccagccccugaccuuccugcucgacuucagcguggacggguacauccgccgggcgaucgacugcggcuucaacgaccugucccagcugcacugcagcuacgaguccuucgacgucgagagcggcguguacuccgugagcuccuucgaggccaagcccagcggguccgucguggagcaggccgagggcguggagugcgacuucagcccgcuccuguccgggaccccgccccaggucuacaacuucaagcgccugguguucaccaacugcaacuacaaccucacgaagcugcugagccucuucuccgucaacgacuucacgugcagccagaucagccccgccgccaucgcguccaacugcuacagcucccugauccuggacuacuucagcuacccccucuccaugaaguccgaccugagcgugagcuccgccgggcccaucagccaguucaacuacaagcaguccuucagcaacccgaccugccugauccucgccaccgugccccacaaccugaccaccaucaccaagccccugaaguacuccuacaucaacaagugcagccgguuccucuccgacgaccgcaccgaggucccccagcuggugaacgccaaccaguacagccccugcguguccaucguccccagcacggugugggaggacggggacuacuaccggaagcagcugagcccgcucgagggcggcggguggcugguggccuccggcagcaccgucgcgaugaccgagcagcugcagaugggguucggcaucaccgugcaguacgggaccgacacgaacuccgugugccccaagcucgaguucgccaacgacaccaagaucgccagccagcugggcaacugcgucgaguacucccuguacggcgugagcgggcgcggcguguuccagaacugcaccgccgucggggugcggcagcagcgcuucguguacgacgcguaccagaaccuggucggcuacuacuccgacgacggcaacuacuacugccuccgggccugcgugagcgugcccgucuccgugaucuacgacaaggagaccaagacgcacgccacccuguucgggagcguggccugcgagcacaucuccagcaccaugucccaguacagccgcuccacccgcagcaugcugaagcggcgcgacuccacguacggcccgcuccagacccccgucgggugcgugcugggccuggugaacagcucccucuucgucgaggacugcaagcugccccuggggcagagccucugcgcccugcccgacaccccgagcacccugacgcccgcguccgugggcagcgugcccggcgagaugcggcucgccuccaucgccuucaaccaccccauccaggucgaccagcugaacagcuccuacuucaagcugagcaucccgaccaacuucuccuucggggugacccaggaguacauccagaccacgauccagaaggugaccgucgacugcaagcaguacgugugcaacggcuuccagaagugcgagcagcuccugcgcgaguacgggcaguucugcagcaagaucaaccaggcccugcacggcgccaaccuccggcaggacgacuccgugcgcaaccuguucgcgagcgucaaguccagccaguccagccccaucauccccggguucggcggcgacuucaaccugacccuccuggagcccguguccaucagcaccggguccggcagcgccggguccgccaucgaggaccuccuguucgacaaggugacgaucgccgacccgggcuacaugcagggguacgacgacugcaugcagcagggccccgccagcgcgcgggaccugaucugcgcccaguacgucgccggcuacaaggugcugccgccccucauggacgugaacauggaggccgcguacaccagcucccugcuggggagcaucgccggcgucggguggaccgccggccucuccagcuucgccgccauccccuucgcgcaguccaucuucuaccgccugaacggggugggcaucacccagcagguccugagcgagaaccagaagcucaucgccaacaaguucaaccaggcccugggcgccaugcagacgggguucaccaccaccaacgaggccuuccacaaggugcaggacgcggugaacaacaacgcccaggcccuguccaagcucgccagcgagcuguccaacacguucggcgccaucagcgcguccaucggggacaucauccagcggcuggacccgcccgagcaggacgcccagaucgaccgccucaucaacggccggcugaccacccugaacgccuucguggcccagcagcucguccgcagcgaguccgcggcccugagcgcccagcuggccaaggacaaggugaacgagugcgugaaggcccaguccaagcggagcggcuucugcgggcagggcacccacaucgucuccuucguggucaacgcgcccaacgggcucuacuucaugcacgugggcuacuaccccagcaaccacaucgagguggucuccgccuacgggcugugcgacgccgccaaccccacgaacugcaucgcccccgugaacggcuacuucaucaagaccaacaacacccgcaucguggacgaguggagcuacaccggcagcuccuucuacgcgcccgagccgaucacgagccugaacaccaaguacgucgcgccccaggugaccuaccagaacaucuccaccaaccugcccccgccccuccuggggaacagcaccggcaucgacuuccaggacgagcucgacgaguucuucaagaacguguccacgagcauccccaacuucgggucccugacccagaucaacaccacccugcucgaccugacguacgagaugcugagccuccagcaggucgugaaggcccugaacgaguccuacaucgaccugaaggagcucggcaacuacaccuacuga

SEQ ID NO: 14824 - RNA, 3957 nt, Artificial Sequence
  MERS-CoV/England 1__YP_007188579.1 spike protein CDS gc (variant)
augauccacagcguguuccugcucauguuccugcugacccccaccgaguccuacgucgacgugggcccggacagcgugaaguccgccugcaucgaggucgacauccagcagacguucuucgacaagaccuggccccgccccaucgacgugagcaaggccgacgggaucaucuacccccagggccggaccuacuccaacaucaccaucacguaccagggccucuucccguaccagggcgaccacggggacauguacguguacagcgccggccacgccaccggcaccacgccccagaagcuguucgucgccaacuacucccaggacgugaagcaguucgccaacggguucgugguccgcaucggcgccgcggccaacagcaccgggaccgugaucaucucccccagcaccuccgccaccauccggaagaucuaccccgccuucaugcugggcagcuccguggggaacuucagcgacggcaagaugggccgcuucuucaaccacacgcucguccugcugccggacgggugcggcacccuccugcgggcguucuacugcauccuggagccccgcuccgggaaccacugccccgccggcaacagcuacaccuccuucgccaccuaccacacgcccgccaccgacugcagcgacggcaacuacaaccggaacgccucccucaacagcuucaaggaguacuucaaccugcgcaacugcaccuucauguacaccuacaacaucacggaggacgagauccuggagugguucgggaucacccagaccgcgcagggcgugcaccucuucagcucccgguacguggaccuguacgggggcaacauguuccaguucgccacccugccggucuacgacacgaucaaguacuacagcaucaucccccacuccauccgcagcauccaguccgaccggaaggccugggccgccuucuacguguacaagcuccagccccugaccuuccugcucgacuucagcguggacggguacauccgccgggcgaucgacugcggcuucaacgaccugucccagcugcacugcagcuacgaguccuucgacgucgagagcggcguguacuccgugagcuccuucgaggccaagcccagcggguccgucguggagcaggccgagggcguggagugcgacuucagcccgcuccuguccgggaccccgccccaggucuacaacuucaagcgccugguguucaccaacugcaacuacaaccucacgaagcugcugagccucuucuccgucaacgacuucacgugcagccagaucagccccgccgccaucgcguccaacugcuacagcucccugauccuggacuacuucagcuacccccucuccaugaaguccgaccugagcgugagcuccgccgggcccaucagccaguucaacuacaagcaguccuucagcaacccgaccugccugauccucgccaccgugccccacaaccugaccaccaucaccaagccccugaaguacuccuacaucaacaagugcagccgguuccucuccgacgaccgcaccgaggucccccagcuggugaacgccaaccaguacagccccugcguguccaucguccccagcacggugugggaggacggggacuacuaccggaagcagcugagcccgcucgagggcggcggguggcugguggccuccggcagcaccgucgcgaugaccgagcagcugcagaugggguucggcaucaccgugcaguacgggaccgacacgaacuccgugugccccaagcucgaguucgccaacgacaccaagaucgccagccagcugggcaacugcgucgaguacucccuguacggcgugagcgggcgcggcguguuccagaacugcaccgccgucggggugcggcagcagcgcuucguguacgacgcguaccagaaccuggucggcuacuacuccgacgacggcaacuacuacugccuccgggccugcgugagcgugcccgucuccgugaucuacgacaaggagaccaagacgcacgccacccuguucgggagcguggccugcgagcacaucuccagcaccaugucccaguacagccgcuccacccgcagcaugcugaagcggcgcgacuccacguacggcccgcuccagacccccgucgggugcgugcugggccuggugaacagcucccucuucgucgaggacugcaagcugccccuggggcagagccucugcgcccugcccgacaccccgagcacccugacgcccgcguccgugggcagcgugcccggcgagaugcggcucgccuccaucgccuucaaccaccccauccaggucgaccagcugaacagcuccuacuucaagcugagcaucccgaccaacuucuccuucggggugacccaggaguacauccagaccacgauccagaaggugaccgucgacugcaagcaguacgugugcaacggcuuccagaagugcgagcagcuccugcgcgaguacgggcaguucugcagcaagaucaaccaggcccugcacggcgccaaccuccggcaggacgacuccgugcgcaaccuguucgcgagcgucaaguccagccaguccagccccaucauccccggguucggcggcgacuucaaccugacccuccuggagcccguguccaucagcaccgggucccggagcgcccgcuccgccaucgaggaccuccuguucgacaaggugacgaucgccgacccgggcuacaugcagggguacgacgacugcaugcagcagggccccgccagcgcgcgggaccugaucugcgcccaguacgucgccggguacaaggugcugccgccccucauggacgugaacauggaggccgcguacaccagcucccugcugggcagcaucgccggcgucggguggaccgccggccucuccagcuucgccgccauccccuucgcgcaguccaucuucuaccgccugaacggggugggcaucacccagcagguccugagcgagaaccagaagcucaucgccaacaaguucaaccaggcccugggggccaugcagacgggcuucaccaccaccaacgaggccuuccacaaggugcaggacgcggugaacaacaacgcccaggcccuguccaagcucgccagcgagcuguccaacacguucggcgccaucagcgcguccaucggggacaucauccagcggcuggacccgcccgagcaggacgcccagaucgaccgccucaucaacggccggcugaccacccugaacgccuucguggcccagcagcucguccgcagcgaguccgcggcccugagcgcccagcuggccaaggacaaggugaacgagugcgugaaggcccaguccaagcggagcggguucugcggccagggcacccacaucgucuccuucguggucaacgcgcccaacgggcucuacuucaugcacgugggcuacuaccccagcaaccacaucgagguggucuccgccuacgggcugugcgacgccgccaaccccacgaacugcaucgcccccgugaacggcuacuucaucaagaccaacaacacccgcaucguggacgaguggagcuacaccgggagcuccuucuacgcgcccgagccgaucacgagccugaacaccaaguacgucgcgccccaggugaccuaccagaacaucuccaccaaccugcccccgccccuccugggcaacagcaccggcaucgacuuccaggacgagcucgacgaguucuucaagaacguguccacgagcauccccaacuucgggucccugacccagaucaacaccacccugcucgaccugacguacgagaugcugagccuccagcaggucgugaaggcccugaacgaguccuacaucgaccugaaggagcucggcaacuacaccuacgggggcuacauccccgaggccccgcgggacgggcaggccuacgugcgcaaggacggcgaguggguccugcugagcaccuucuga

SEQ ID NO: 14825 - RNA, 3957 nt, Artificial Sequence
  MERS-CoV/England 1__YP_007188579.1 spike protein CDS gc (variant)
augauccacagcguguuccugcucauguuccugcugacccccaccgaguccuacgucgacgugggcccggacagcgugaaguccgccugcaucgaggucgacauccagcagacguucuucgacaagaccuggccccgccccaucgacgugagcaaggccgacgggaucaucuacccccagggccggaccuacuccaacaucaccaucacguaccagggccucuucccguaccagggcgaccacggggacauguacguguacagcgccggccacgccaccggcaccacgccccagaagcuguucgucgccaacuacucccaggacgugaagcaguucgccaacggguucgugguccgcaucggcgccgcggccaacagcaccgggaccgugaucaucucccccagcaccuccgccaccauccggaagaucuaccccgccuucaugcugggcagcuccguggggaacuucagcgacggcaagaugggccgcuucuucaaccacacgcucguccugcugccggacgggugcggcacccuccugcgggcguucuacugcauccuggagccccgcuccgggaaccacugccccgccggcaacagcuacaccuccuucgccaccuaccacacgcccgccaccgacugcagcgacggcaacuacaaccggaacgccucccucaacagcuucaaggaguacuucaaccugcgcaacugcaccuucauguacaccuacaacaucacggaggacgagauccuggagugguucgggaucacccagaccgcgcagggcgugcaccucuucagcucccgguacguggaccuguacgggggcaacauguuccaguucgccacccugccggucuacgacacgaucaaguacuacagcaucaucccccacuccauccgcagcauccaguccgaccggaaggccugggccgccuucuacguguacaagcuccagccccugaccuuccugcucgacuucagcguggacggguacauccgccgggcgaucgacugcggcuucaacgaccugucccagcugcacugcagcuacgaguccuucgacgucgagagcggcguguacuccgugagcuccuucgaggccaagcccagcggguccgucguggagcaggccgagggcguggagugcgacuucagcccgcuccuguccgggaccccgccccaggucuacaacuucaagcgccugguguucaccaacugcaacuacaaccucacgaagcugcugagccucuucuccgucaacgacuucacgugcagccagaucagccccgccgccaucgcguccaacugcuacagcucccugauccuggacuacuucagcuacccccucuccaugaaguccgaccugagcgugagcuccgccgggcccaucagccaguucaacuacaagcaguccuucagcaacccgaccugccugauccucgccaccgugccccacaaccugaccaccaucaccaagccccugaaguacuccuacaucaacaagugcagccgguuccucuccgacgaccgcaccgaggucccccagcuggugaacgccaaccaguacagccccugcguguccaucguccccagcacggugugggaggacggggacuacuaccggaagcagcugagcccgcucgagggcggcggguggcugguggccuccggcagcaccgucgcgaugaccgagcagcugcagaugggguucggcaucaccgugcaguacgggaccgacacgaacuccgugugccccaagcucgaguucgccaacgacaccaagaucgccagccagcugggcaacugcgucgaguacucccuguacggcgugagcgggcgcggcguguuccagaacugcaccgccgucggggugcggcagcagcgcuucguguacgacgcguaccagaaccuggucggcuacuacuccgacgacggcaacuacuacugccuccgggccugcgugagcgugcccgucuccgugaucuacgacaaggagaccaagacgcacgccacccuguucgggagcguggccugcgagcacaucuccagcaccaugucccaguacagccgcuccacccgcagcaugcugaagcggcgcgacuccacguacggcccgcuccagacccccgucgggugcgugcugggccuggugaacagcucccucuucgucgaggacugcaagcugccccuggggcagagccucugcgcccugcccgacaccccgagcacccugacgcccgcguccgugggcagcgugcccggcgagaugcggcucgccuccaucgccuucaaccaccccauccaggucgaccagcugaacagcuccuacuucaagcugagcaucccgaccaacuucuccuucggggugacccaggaguacauccagaccacgauccagaaggugaccgucgacugcaagcaguacgugugcaacggcuuccagaagugcgagcagcuccugcgcgaguacgggcaguucugcagcaagaucaaccaggcccugcacggcgccaaccuccggcaggacgacuccgugcgcaaccuguucgcgagcgucaaguccagccaguccagccccaucauccccggguucggcggcgacuucaaccugacccuccuggagcccguguccaucagcaccggguccggcagcgccggguccgccaucgaggaccuccuguucgacaaggugacgaucgccgacccgggcuacaugcagggguacgacgacugcaugcagcagggccccgccagcgcgcgggaccugaucugcgcccaguacgucgccggcuacaaggugcugccgccccucauggacgugaacauggaggccgcguacaccagcucccugcuggggagcaucgccggcgucggguggaccgccggccucuccagcuucgccgccauccccuucgcgcaguccaucuucuaccgccugaacggggugggcaucacccagcagguccugagcgagaaccagaagcucaucgccaacaaguucaaccaggcccugggcgccaugcagacgggguucaccaccaccaacgaggccuuccacaaggugcaggacgcggugaacaacaacgcccaggcccuguccaagcucgccagcgagcuguccaacacguucggcgccaucagcgcguccaucggggacaucauccagcggcuggacccgcccgagcaggacgcccagaucgaccgccucaucaacggccggcugaccacccugaacgccuucguggcccagcagcucguccgcagcgaguccgcggcccugagcgcccagcuggccaaggacaaggugaacgagugcgugaaggcccaguccaagcggagcggcuucugcgggcagggcacccacaucgucuccuucguggucaacgcgcccaacgggcucuacuucaugcacgugggcuacuaccccagcaaccacaucgagguggucuccgccuacgggcugugcgacgccgccaaccccacgaacugcaucgcccccgugaacggcuacuucaucaagaccaacaacacccgcaucguggacgaguggagcuacaccggcagcuccuucuacgcgcccgagccgaucacgagccugaacaccaaguacgucgcgccccaggugaccuaccagaacaucuccaccaaccugcccccgccccuccuggggaacagcaccggcaucgacuuccaggacgagcucgacgaguucuucaagaacguguccacgagcauccccaacuucgggucccugacccagaucaacaccacccugcucgaccugacguacgagaugcugagccuccagcaggucgugaaggcccugaacgaguccuacaucgaccugaaggagcucggcaacuacaccuacgggggcuacauccccgaggccccgcgggacggccaggccuacgugcgcaaggacggggaguggguccugcugagcaccuucuga

SEQ ID NO: 14826 - RNA, 4062 nt, Artificial Sequence
  MERS-CoV/MERS-CoV-Jeddah-human-1__AHE78108.1 spike protein CDS human (1-1353)
augauccacagcguguuccugcucauguuucuucugacccccacagaguccuacgucgacguuggcccugauucugugaagucagccugcauugaaguagacauacagcaaacuuucuuugauaaaacguggccaagaccgaucgacgugaguaaggcugaugggauuaucuauccccagggaaggaccuacagcaacauuacaaucacuuaucaggguuuguucccuuaccagggcgaccauggggauauguaugucuacuccgcaggacacgccaccggcacaaccccacaaaaauuauuuguggcgaauuauucucaggacguuaagcaguucgcuaacgguuuugugguccggauaggggccgcagccaauucgacuggaacagugaucauuucacccagcaccagugcuacgauccgcaaaauuuacccugcauucaugcugggcuccucuguaggcaacuuuagcgaugggaagaugggacgauucuuuaaucauacucuaguucuccugccagacgguuguggcacccuucugcgugccuucuacugcaucuuggagcccagauccgggaaccacuguccugcuggaaauucauauacaaguuuugccacuuaccauaccccagcgacagauugcagcgacggcaacuauaauaggaacgcaucucucaauuccuucaaggaauacuucaaccugcggaauuguaccuuuauguauacguacaacauaacugaggaugaaauucuggagugguucgguaucacacagaccgcccaaggggugcaccucuuuucaagccgcuaugucgacuuauacggaggcaauauguuccaguuugcuacucugccgguguacgacacaauuaaauauuacaguaucaucccccacucuauuagauccauacagagcgauaggaaggccugggcagcuuucuauguguacaaacuucagccuuugaccuuucugcuagacuucucggucgauggcuauauccggcgcgccauugacugcggguuuaacgaucucucucaacugcauuguuccuacgagucauucgacguugaaaguggaguguauagcguauccucuuuugaggcgaagccaagcgguucaguggucgaacaggccgagggcguggagugcgauuucaguccccuucuguccgggacgccuccacagguuuacaacuuuaaacgauugguguucaccaauuguaacuacaaucucacaaagcuguuaagccuguucucugucaacgacuuuacuugcucacaaaucagucccgcagcuauagccagcaauuguuauuccucucucauucuugauuacuucucguauccgcugagcaugaaguccgacuugucagugaguucugcuggaccuaucagccaguuuaacuacaaacaguccuucucaaauccaaccugccuaauccuggccacaguaccccacaaccucacuaccauuacaaagccucugaaauauagcuacaucaauaagugcucuagacuucuguccgaugacaggaccgaaguuccccaguuggugaacgcaaaucaauauaguccaugugucagcauugugcccucuacugucugggaggacggcgauuacuaccggaaacagcucuccccucuggaaggugggggcugguuaguggccucaggaaguacgguugcuaugacagagcagcugcagaugggcuuugggauaaccgugcaauauggaacugacaccaacagcguaugcccaaagcuagaguucgcgaaugauacaaaaaucgcaucgcagcucgguaacugugucgaauacucccuguauggcgugucugggcguggaguuuuucagaauugcaccgccgugggcguccgccagcaaagauucguguacgacgcuuaucagaaccuuguagguuacuauagcgaugacgggaacuacuacuguuugagggccugcgugucaguuccggucagugugauuuaugauaaggagacuaagacacaugcaacgcuguuuggcuccguggccugugaacacaucucuagcaccaugucccaguacucacggagcacucgaaguaugcucaaacgcagagacucuacauauggaccccugcagaccccugucggcugcguucuugggcugguaaauuccagcuuguucguggaggauuguaagcucccacugggacaaucguuaugcgcucugcccgacacaccuucaacucuaaccccaaggucugugcggaguguccccggugaaaugcgccucgccuccaucgcauuuaaccacccgauucagguggaucagcugaauagcucuuacuucaaacuuagcauaccuacgaacuuuuccuucggcguuacccaagaguauauccagacaacuauucagaaggugaccgucgacuguaaacaguacgugugcaauggguuccaaaagugcgaacaguugcugagagaguauggacaguuuuguucaaagaucaaccaggcgcuccauggcgcuaaucugaggcaagaugacaguguucguaacuuauucgccagcgugaaaucuucccagucaaguccaauuauccccgguuuugggggcgacuucaaucugacacuuuuggagccuguaagcauauccacuggaucucggucggcacgaagcgccaucgaagaucuccuguuugacaaggucaccauugcugaucccggcuacaugcagggguacgacgauugcaugcagcaaggaccagccucagcaagagaccuaaucugugcucaguauguggccggcuacaaagugcugccuccccucauggaugucaacauggaggcggccuauacguccagucugcuugguucuauugcugggguuggauggacagcaggcuugagcuccuucgccgcuaucccauuugcccagucaauauucuacaggcugaauggugugggcauuacccaacagguauuaucugaaaaccagaagcucaucgcaaauaaauuuaaccaggcgcugggggccaugcaaacuggauucacaaccacuaaugaggcuuuucacaaggugcaggacgccgucaacaacaaugcacaggcucuuagcaagcuggccagugaauuguccaacaccuucggcgcaauuagcgccucuaucggggauauaauccagcgccucgacgugcuggagcaagaugcucagauugaccggcuaaucaauggaagacugacaacgcucaacgcguucguugcccagcagcuggugaggucagaguccgcagcucuuagugcccaauuggccaaagauaaggucaaugaaugcgugaaagcucagagcaagcgcucgggcuuuuguggucaggggacccauauuguuucuuucguggucaacgcaccgaauggacuguauuuuaugcacguaggcuacuauccuuccaaccauaucgaggugguuagcgccuacgguuuaugcgacgcggcuaaucccacuaacuguauagccccagugaauggcuacuucauuaaaacaaacaauacccgaaucgucgacgaauggucauauacagggaguucuuuuuacgcacccgagccuaucacuucccucaacaccaaguauguggccccacagguaacguaccaaaauauuagcacaaaccugcccccuccgcuucugggaaacucaaccggcaucgauuuccaggacgagcuagaugaauuuuucaagaaugugaguacuagcauuccaaacuuugggucccucacccagauaaauacaacucuguuggaccugaccuaugagauguuaucucuccaacaggucguuaaagcucugaacgaaagcuacaucgaucuuaaggagcugggaaauuauacauacuacaacaaauggcccugguauauuugguugggcuucaucgcaggucucguggcccuggcgcuaugcguguuuuucauucuguguugcacgggguguggaaccaauugcaugggcaaacuuaagugcaaccgguguugcgaccguuacgaagaguaugaucucgagccucacaagguccacgugcauuga

SEQ ID NO: 14827 - RNA, 4062 nt, Artificial Sequence
  MERS-CoV/MERS-CoV-Jeddah-human-1__AHE78108.1 spike protein CDS human (1-1353)(V1060P_L1061P)
augauccacagcguguuccugcucauguuucuucugacccccacagaguccuacgucgacguuggcccugauucugugaagucagccugcauugaaguagacauacagcaaacuuucuuugauaaaacguggccaagaccgaucgacgugaguaaggcugaugggauuaucuauccccagggaaggaccuacagcaacauuacaaucacuuaucaggguuuguucccuuaccagggcgaccauggggauauguaugucuacuccgcaggacacgccaccggcacaaccccacaaaaauuauuuguggcgaauuauucucaggacguuaagcaguucgcuaacgguuuugugguccggauaggggccgcagccaauucgacuggaacagugaucauuucacccagcaccagugcuacgauccgcaaaauuuacccugcauucaugcugggcuccucuguaggcaacuuuagcgaugggaagaugggacgauucuuuaaucauacucuaguucuccugccagacgguuguggcacccuucugcgugccuucuacugcaucuuggagcccagauccgggaaccacuguccugcuggaaauucauauacaaguuuugccacuuaccauaccccagcgacagauugcagcgacggcaacuauaauaggaacgcaucucucaauuccuucaaggaauacuucaaccugcggaauuguaccuuuauguauacguacaacauaacugaggaugaaauucuggagugguucgguaucacacagaccgcccaaggggugcaccucuuuucaagccgcuaugucgacuuauacggaggcaauauguuccaguuugcuacucugccgguguacgacacaauuaaauauuacaguaucaucccccacucuauuagauccauacagagcgauaggaaggccugggcagcuuucuauguguacaaacuucagccuuugaccuuucugcuagacuucucggucgauggcuauauccggcgcgccauugacugcggguuuaacgaucucucucaacugcauuguuccuacgagucauucgacguugaaaguggaguguauagcguauccucuuuugaggcgaagccaagcgguucaguggucgaacaggccgagggcguggagugcgauuucaguccccuucuguccgggacgccuccacagguuuacaacuuuaaacgauugguguucaccaauuguaacuacaaucucacaaagcuguuaagccuguucucugucaacgacuuuacuugcucacaaaucagucccgcagcuauagccagcaauuguuauuccucucucauucuugauuacuucucguauccgcugagcaugaaguccgacuugucagugaguucugcuggaccuaucagccaguuuaacuacaaacaguccuucucaaauccaaccugccuaauccuggccacaguaccccacaaccucacuaccauuacaaagccucugaaauauagcuacaucaauaagugcucuagacuucuguccgaugacaggaccgaaguuccccaguuggugaacgcaaaucaauauaguccaugugucagcauugugcccucuacugucugggaggacggcgauuacuaccggaaacagcucuccccucuggaaggugggggcugguuaguggccucaggaaguacgguugcuaugacagagcagcugcagaugggcuuugggauaaccgugcaauauggaacugacaccaacagcguaugcccaaagcuagaguucgcgaaugauacaaaaaucgcaucgcagcucgguaacugugucgaauacucccuguauggcgugucugggcguggaguuuuucagaauugcaccgccgugggcguccgccagcaaagauucguguacgacgcuuaucagaaccuuguagguuacuauagcgaugacgggaacuacuacuguuugagggccugcgugucaguuccggucagugugauuuaugauaaggagacuaagacacaugcaacgcuguuuggcuccguggccugugaacacaucucuagcaccaugucccaguacucacggagcacucgaaguaugcucaaacgcagagacucuacauauggaccccugcagaccccugucggcugcguucuugggcugguaaauuccagcuuguucguggaggauuguaagcucccacugggacaaucguuaugcgcucugcccgacacaccuucaacucuaaccccaaggucugugcggaguguccccggugaaaugcgccucgccuccaucgcauuuaaccacccgauucagguggaucagcugaauagcucuuacuucaaacuuagcauaccuacgaacuuuuccuucggcguuacccaagaguauauccagacaacuauucagaaggugaccgucgacuguaaacaguacgugugcaauggguuccaaaagugcgaacaguugcugagagaguauggacaguuuuguucaaagaucaaccaggcgcuccauggcgcuaaucugaggcaagaugacaguguucguaacuuauucgccagcgugaaaucuucccagucaaguccaauuauccccgguuuugggggcgacuucaaucugacacuuuuggagccuguaagcauauccacuggaucucggucggcacgaagcgccaucgaagaucuccuguuugacaaggucaccauugcugaucccggcuacaugcagggguacgacgauugcaugcagcaaggaccagccucagcaagagaccuaaucugugcucaguauguggccggcuacaaagugcugccuccccucauggaugucaacauggaggcggccuauacguccagucugcuugguucuauugcugggguuggauggacagcaggcuugagcuccuucgccgcuaucccauuugcccagucaauauucuacaggcugaauggugugggcauuacccaacagguauuaucugaaaaccagaagcucaucgcaaauaaauuuaaccaggcgcugggggccaugcaaacuggauucacaaccacuaaugaggcuuuucacaaggugcaggacgccgucaacaacaaugcacaggcucuuagcaagcuggccagugaauuguccaacaccuucggcgcaauuagcgccucuaucggggauauaauccagcgccucgacccgccugagcaagaugcucagauugaccggcugaucaauggaagacuaacaacgcugaacgcguucguggcccagcagcucguuaggucagaguccgcagcucugagugcccaacuugccaaagauaaggugaaugaaugcgucaaagcucagagcaagcgcucgggcuuuuguggucaggggacccauauugugucuuucguugugaacgcacccaauggauuguauuuuaugcacgucggcuacuauccauccaaccauaucgagguagugagcgccuacggucugugcgacgcggcuaaucccacuaacuguauagccccuguuaauggcuacuucauuaaaacaaacaauacccgaaucguggacgaauggucauauacagggaguucuuuuuacgcaccagagcccaucacuuccuuaaacaccaaguaugucgccccucaggugacguaccaaaauauuagcacaaaccucccgccaccccugcuuggaaacucaaccggcaucgauuuccaggacgagcuggaugaauuuuucaagaauguaaguacuagcauuccuaacuuugggucccuaacccagauaaauacaacucuccuggacuugaccuaugagaugcugucuuuacaacagguggucaaagcucucaacgaaagcuacaucgaucugaaggagcuuggaaauuauacauacuacaacaaauggccaugguauauuuggcugggcuucaucgcagguuugguugcccucgcgcugugcguguuuuucauucuauguugcacgggguguggaaccaauugcaugggcaagcugaaaugcaaccgguguugcgaccguuacgaagaguaugaucuugagccccacaaggugcacguccauuga

SEQ ID NO: 14828 - RNA, 4062 nt, Artificial Sequence
  MERS-CoV/Al-Hasa_4_2013__AGN70929.1 spike protein CDS human (1-1353)
augauccacagcguguuccugcucauguuucuucugacccccacagaguccuacgucgacguuggcccugauucugugaagucagccugcauugaaguagacauacagcaaacuuucuuugauaaaacguggccaagaccgaucgacgugaguaaggcugaugggauuaucuauccccagggaaggaccuacagcaacauuacaaucacuuaucaggguuuguucccuuaccagggcgaccauggggauauguaugucuacuccgcaggacacgccaccggcacaaccccacaaaaauuauuuguggcgaauuauucucaggacguuaagcaguucgcuaacgguuuugugguccggauaggggccgcagccaauucgacuggaacagugaucauuucacccagcaccagugcuacgauccgcaaaauuuacccugcauucaugcugggcuccucuguaggcaacuuuagcgaugggaagaugggacgauucuuuaaucauacucuaguucuccugccagacgguuguggcacccuucugcgugccuucuacugcaucuuggagcccagauccgggaaccacuguccugcuggaaauucauauacaaguuuugccacuuaccauaccccagcgacagauugcagcgacggcaacuauaauaggaacgcaucucucaauuccuucaaggaauacuucaaccugcggaauuguaccuuuauguauacguacaacauaacugaggaugaaauucuggagugguucgguaucacacagaccgcccaaggggugcaccucuuuucaagccgcuaugucgacuuauacggaggcaauauguuccaguuugcuacucugccgguguacgacacaauuaaauauuacaguaucaucccccacucuauuagauccauacagagcgauaggaaggccugggcagcuuucuauguguacaaacuucagccuuugaccuuucugcuagacuucucggucgauggcuauauccggcgcgccauugacugcggguuuaacgaucucucucaacugcauuguuccuacgagucauucgacguugaaaguggaguguauagcguauccucuuuugaggcgaagccaagcgguucaguggucgaacaggccgagggcguggagugcgauuucaguccccuucuguccgggacgccuccacagguuuacaacuuuaaacgauugguguucaccaauuguaacuacaaucucacaaagcuguuaagccuguucucugucaacgacuuuacuugcucacaaaucagucccgcagcuauagccagcaauuguuauuccucucucauucuugauuacuucucguauccgcugagcaugaaguccgacuugucagugaguucugcuggaccuaucagccaguuuaacuacaaacaguccuucucaaauccaaccugccuaauccuggccacaguaccccacaaccucacuaccauuacaaagccucugaaauauagcuacaucaauaagugcucuagacuucuguccgaugacaggaccgaaguuccccaguuggugaacgcaaaucaauauaguccaugugucagcauugugcccucuacugucugggaggacggcgauuacuaccggaaacagcucuccccucuggaaggugggggcugguuaguggccucaggaaguacgguugcuaugacagagcagcugcagaugggcuuugggauaaccgugcaauauggaacugacaccaacagcguaugcccaaagcuagaguucgcgaaugauacaaaaaucgcaucgcagcucgguaacugugucgaauacucccuguauggcgugucugggcguggaguuuuucagaauugcaccgccgugggcguccgccagcaaagauucguguacgacgcuuaucagaaccuuguagguuacuauagcgaugacgggaacuacuacuguuugagggccugcgugucaguuccggucagugugauuuaugauaaggagacuaagacacaugcaacgcuguuuggcuccguggccugugaacacaucucuagcaccaugucccaguacucacggagcacucgaaguaugcucaaacgcagagacucuacauauggaccccugcagaccccugucggcugcguucuugggcugguaaauuccagcuuguucguggaggauuguaagcucccacugggacaaucguuaugcgcucugcccgacacaccuucaacucuaaccccaaggucugugcggaguguccccggugaaaugcgccucgccuccaucgcauuuaaccacccgauucagguggaucagcugaauagcucuuacuucaaacuuagcauaccuacgaacuuuuccuucggcguuacccaagaguauauccagacaacuauucagaaggugaccgucgacuguaaacaguacgugugcaauggguuccaaaagugcgaacaguugcugagagaguauggacaguuuuguucaaagaucaaccaggcgcuccauggcgcuaaucugaggcaagaugacaguguucguaacuuauucgccagcgugaaaucuucccagucaaguccaauuauccccgguuuugggggcgacuucaaucugacacuuuuggagccuguaagcauauccacuggaucucggucggcacgaagcgccaucgaagaucuccuguuugacaaggucaccauugcugaucccggcuacaugcagggguacgacgauugcaugcagcaaggaccagccucagcaagagaccuaaucugugcucaguauguggccggcuacaaagugcugccuccccucauggaugucaacauggaggcggccuauacguccagucugcuugguucuauugcugggguuggauggacagcaggcuugagcuccuucgccgcuaucccauuugcccagucaauauucuacaggcugaauggugugggcauuacccaacagguauuaucugaaaaccagaagcucaucgcaaauaaauuuaaccaggcgcugggggccaugcaaacuggauucacaaccacuaaugaggcuuuucgcaaggugcaggacgccgucaacaacaaugcacaggcucuuagcaagcuggccagugaauuguccaacaccuucggcgcaauuagcgccucuaucggggauauaauccagcggcucgacgugcuggagcaagaugcucagauugacagacuaaucaauggaaggcugacaacgcucaacgcguucguugcccagcagcuggugcgcucagaguccgcagcucuuagugcccaauuggccaaagauaaggucaaugaaugcgugaaagcucagagcaagcgaucgggcuuuuguggucaggggacccacauuguuucuuucguggucaacgcaccgaauggacuguauuuuaugcauguaggcuacuauccuuccaaccacaucgaggugguuagcgccuacgguuuaugcgacgcggcuaaucccacuaacuguauagccccagugaauggcuacuucauuaaaacaaacaauacccggaucgucgacgaauggucauauacagggaguucuuuuuacgcacccgagccuaucacuucccucaacaccaaguauguggccccacauguaacguaccagaauauuagcacaaaccugcccccuccgcuucugggaaacucaaccggcaucgauuuccaagacgagcuagaugaauuuuucaagaaugugaguacuagcauuccaaacuuugggucccucacccagauaaauacaacucuguuggaccugaccuaugagauguuaucucuccagcaagucguuaaagcucugaacgaaagcuacaucgaucuuaaggagcugggaaauuauacauacuacaacaaauggcccugguauauuugguugggcuucaucgcaggucucguggcccuggcgcuaugcguguuuuucauucuguguugcacgggguguggaaccaauugcaugggcaaacuuaagugcaaccguuguugcgacagauacgaagaguaugaucucgagccucacaagguccacgugcauuga

SEQ ID NO: 14829 - RNA, 4062 nt, Artificial Sequence
  MERS-CoV/Al-Hasa_4_2013__AGN70929.1 spike protein CDS human (1-1353)(V1060P_L1061P)
augauccacagcguguuccugcucauguuucuucugacccccacagaguccuacgucgacguuggcccugauucugugaagucagccugcauugaaguagacauacagcaaacuuucuuugauaaaacguggccaagaccgaucgacgugaguaaggcugaugggauuaucuauccccagggaaggaccuacagcaacauuacaaucacuuaucaggguuuguucccuuaccagggcgaccauggggauauguaugucuacuccgcaggacacgccaccggcacaaccccacaaaaauuauuuguggcgaauuauucucaggacguuaagcaguucgcuaacgguuuugugguccggauaggggccgcagccaauucgacuggaacagugaucauuucacccagcaccagugcuacgauccgcaaaauuuacccugcauucaugcugggcuccucuguaggcaacuuuagcgaugggaagaugggacgauucuuuaaucauacucuaguucuccugccagacgguuguggcacccuucugcgugccuucuacugcaucuuggagcccagauccgggaaccacuguccugcuggaaauucauauacaaguuuugccacuuaccauaccccagcgacagauugcagcgacggcaacuauaauaggaacgcaucucucaauuccuucaaggaauacuucaaccugcggaauuguaccuuuauguauacguacaacauaacugaggaugaaauucuggagugguucgguaucacacagaccgcccaaggggugcaccucuuuucaagccgcuaugucgacuuauacggaggcaauauguuccaguuugcuacucugccgguguacgacacaauuaaauauuacaguaucaucccccacucuauuagauccauacagagcgauaggaaggccugggcagcuuucuauguguacaaacuucagccuuugaccuuucugcuagacuucucggucgauggcuauauccggcgcgccauugacugcggguuuaacgaucucucucaacugcauuguuccuacgagucauucgacguugaaaguggaguguauagcguauccucuuuugaggcgaagccaagcgguucaguggucgaacaggccgagggcguggagugcgauuucaguccccuucuguccgggacgccuccacagguuuacaacuuuaaacgauugguguucaccaauuguaacuacaaucucacaaagcuguuaagccuguucucugucaacgacuuuacuugcucacaaaucagucccgcagcuauagccagcaauuguuauuccucucucauucuugauuacuucucguauccgcugagcaugaaguccgacuugucagugaguucugcuggaccuaucagccaguuuaacuacaaacaguccuucucaaauccaaccugccuaauccuggccacaguaccccacaaccucacuaccauuacaaagccucugaaauauagcuacaucaauaagugcucuagacuucuguccgaugacaggaccgaaguuccccaguuggugaacgcaaaucaauauaguccaugugucagcauugugcccucuacugucugggaggacggcgauuacuaccggaaacagcucuccccucuggaaggugggggcugguuaguggccucaggaaguacgguugcuaugacagagcagcugcagaugggcuuugggauaaccgugcaauauggaacugacaccaacagcguaugcccaaagcuagaguucgcgaaugauacaaaaaucgcaucgcagcucgguaacugugucgaauacucccuguauggcgugucugggcguggaguuuuucagaauugcaccgccgugggcguccgccagcaaagauucguguacgacgcuuaucagaaccuuguagguuacuauagcgaugacgggaacuacuacuguuugagggccugcgugucaguuccggucagugugauuuaugauaaggagacuaagacacaugcaacgcuguuuggcuccguggccugugaacacaucucuagcaccaugucccaguacucacggagcacucgaaguaugcucaaacgcagagacucuacauauggaccccugcagaccccugucggcugcguucuugggcugguaaauuccagcuuguucguggaggauuguaagcucccacugggacaaucguuaugcgcucugcccgacacaccuucaacucuaaccccaaggucugugcggaguguccccggugaaaugcgccucgccuccaucgcauuuaaccacccgauucagguggaucagcugaauagcucuuacuucaaacuuagcauaccuacgaacuuuuccuucggcguuacccaagaguauauccagacaacuauucagaaggugaccgucgacuguaaacaguacgugugcaauggguuccaaaagugcgaacaguugcugagagaguauggacaguuuuguucaaagaucaaccaggcgcuccauggcgcuaaucugaggcaagaugacaguguucguaacuuauucgccagcgugaaaucuucccagucaaguccaauuauccccgguuuugggggcgacuucaaucugacacuuuuggagccuguaagcauauccacuggaucucggucggcacgaagcgccaucgaagaucuccuguuugacaaggucaccauugcugaucccggcuacaugcagggguacgacgauugcaugcagcaaggaccagccucagcaagagaccuaaucugugcucaguauguggccggcuacaaagugcugccuccccucauggaugucaacauggaggcggccuauacguccagucugcuugguucuauugcugggguuggauggacagcaggcuugagcuccuucgccgcuaucccauuugcccagucaauauucuacaggcugaauggugugggcauuacccaacagguauuaucugaaaaccagaagcucaucgcaaauaaauuuaaccaggcgcugggggccaugcaaacuggauucacaaccacuaaugaggcuuuucgcaaggugcaggacgccgucaacaacaaugcacaggcucuuagcaagcuggccagugaauuguccaacaccuucggcgcaauuagcgccucuaucggggauauaauccagcggcucgacccgccugagcaagaugcucagauugacagacugaucaauggaaggcuaacaacgcugaacgcguucguggcccagcagcucguucgcucagaguccgcagcucugagugcccaacuugccaaagauaaggugaaugaaugcgucaaagcucagagcaagcgaucgggcuuuuguggucaggggacccacauugugucuuucguugugaacgcacccaauggauuguauuuuaugcaugucggcuacuauccauccaaccacaucgagguagugagcgccuacggucugugcgacgcggcuaaucccacuaacuguauagccccuguuaauggcuacuucauuaaaacaaacaauacccggaucguggacgaauggucauauacagggaguucuuuuuacgcaccagagcccaucacuuccuuaaacaccaaguaugucgccccucaugugacguaccagaauauuagcacaaaccucccgccaccccugcuuggaaacucaaccggcaucgauuuccaagacgagcuggaugaauuuuucaagaauguaaguacuagcauuccuaacuuugggucccuaacccagauaaauacaacucuccuggacuugaccuaugagaugcugucuuuacagcaaguggucaaagcucucaacgaaagcuacaucgaucugaaggagcuuggaaauuauacauacuacaacaaauggccaugguauauuuggcugggcuucaucgcagguuugguugcccucgcgcugugcguguuuuucauucuauguugcacgggguguggaaccaauugcaugggcaagcugaaaugcaaccguuguugcgacagauacgaagaguaugaucuugagccccacaaggugcacguccauuga

SEQ ID NO: 14830 - RNA, 4062 nt, Artificial Sequence
  MERS-CoV/Riyadh_14_2013__AHI48572.1 spike protein CDS human (1-1353)
augauccacagcguguuccugcucauguuucuucugacccccacagaguccuacgucgacguuggcccugauucugugaagucagccugcauugaaguagacauacagcaaacuuucuuugauaaaacguggccaagaccgaucgacgugaguaaggcugaugggauuaucuauccccagggaaggaccuacagcaacauuacaaucacuuaucaggguuuguucccuuaccagggcgaccauggggauauguaugucuacuccgcaggacacgccaccggcacaaccccacaaaaauuauuuguggcgaauuauucucaggacguuaagcaguucgcuaacgguuuugugguccggauaggggccgcagccaauucgacuggaacagugaucauuucacccagcaccagugcuacgauccgcaaaauuuacccugcauucaugcugggcuccucuguaggcaacuuuagcgaugggaagaugggacgauucuuuaaucauacucuaguucuccugccagacgguuguggcacccuucugcgugccuucuacugcaucuuggagcccagauccgggaaccacuguccugcuggaaauucauauacaaguuuugccacuuaccauaccccagcgacagauugcagcgacggcaacuauaauaggaacgcaucucucaauuccuucaaggaauacuucaaccugcggaauuguaccuuuauguauacguacaacauaacugaggaugaaauucuggagugguucgguaucacacagaccgcccaaggggugcaccucuuuucaagccgcuaugucgacuuauacggaggcaauauguuccaguuugcuacucugccgguguacgacacaauuaaauauuacaguaucaucccccacucuauuagauccauacagagcgauaggaaggccugggcagcuuucuauguguacaaacuucagccuuugaccuuucugcuagacuucucggucgauggcuauauccggcgcgccauugacugcggguuuaacgaucucucucaacugcauuguuccuacgagucauucgacguugaaaguggaguguauagcguauccucuuuugaggcgaagccaagcgguucaguggucgaacaggccgagggcguggagugcgauuucaguccccuucuguccgggacgccuccacagguuuacaacuuuaaacgauugguguucaccaauuguaacuacaaucucacaaagcuguuaagccuguucucugucaacgacuuuacuugcucacaaaucagucccgcagcuauagccagcaauuguuauuccucucucauucuugauuacuucucguauccgcugagcaugaaguccgacuugucagugaguucugcuggaccuaucagccaguuuaacuacaaacaguccuucucaaauccaaccugccuaauccuggccacaguaccccacaaccucacuaccauuacaaagccucugaaauauagcuacaucaauaagugcucuagacuucuguccgaugacaggaccgaaguuccccaguuggugaacgcaaaucaauauaguccaugugucagcauugugcccucuacugucugggaggacggcgauuacuaccggaaacagcucuccccucuggaaggugggggcugguuaguggccucaggaaguacgguugcuaugacagagcagcugcagaugggcuuugggauaaccgugcaauauggaacugacaccaacagcguaugcccaaagcuagaguucgcgaaugauacaaaaaucgcaucgcagcucgguaacugugucgaauacucccuguauggcgugucugggcguggaguuuuucagaauugcaccgccgugggcguccgccagcaaagauucguguacgacgcuuaucagaaccuuguagguuacuauagcgaugacgggaacuacuacuguuugagggccugcgugucaguuccggucagugugauuuaugauaaggagacuaagacacaugcaacgcuguuuggcuccguggccugugaacacaucucuagcaccaugucccaguacucacggagcacucgaaguaugcucaaacgcagagacucuacauauggaccccugcagaccccugucggcugcguucuugggcugguaaauuccagcuuguucguggaggauuguaagcucccacugggacaaucguuaugcgcucugcccgacacaccuucaacucuaaccccaaggucugugcggaguguccccggugaaaugcgccucgccuccaucgcauuuaaccacccgauucagguggaucagcugaauagcucuuacuucaaacuuagcauaccuacgaacuuuuccuucggcguuacccaagaguauauccagacaacuauucagaaggugaccgucgacuguaaacaguacgugugcaauggguuccaaaagugcgaacaguugcugagagaguauggacaguuuuguucaaagaucaaccaggcgcuccauggcgcuaaucugaggcaagaugacaguguucguaacuuauucgccagcgugaaaucuucccagucaaguccaauuauccccgguuuugggggcgacuucaaucugacacuuuuggagccuguaagcauauccacuggaucucggucggcacgaagcgccaucgaagaucuccuguuugacaaggucaccauugcugaucccggcuacaugcagggguacgacgauugcaugcagcaaggaccagccucagcaagagaccuaaucugugcucaguauguggccggcuacaaagugcugccuccccucauggaugucaacauggaggcggccuauacguccagucugcuugguucuauugcugggguuggauggacagcaggcuugagcuccuucgccgcuaucccauuugcccagucaauauucuacaggcugaauggugugggcauuacccaacagguauuaucugaaaaccagaagcucaucgcaaauaaauuuaaccaggcgcugggggccaugcaaacuggauucacaaccacuaaugaggcuuuucgcaaggugcaggacgccgucaacaacaaugcacaggcucuuagcaagcuggccagugaauuguccaacaccuucggcgcaauuagcgccucuaucggggauauaauccagcggcucgacgugcuggagcaagaugcucagauugacagacuaaucaauggaaggcugacaacgcucaacgcguucguugcccagcagcuggugcgcucagaguccgcagcucuuagugcccaauuggccaaagauaaggucaaugaaugcgugaaagcucagagcaagcgaucgggcuuuuguggucaggggacccacauuguuucuuucguggucaacgcaccgaauggacuguauuuuaugcauguaggcuacuauccuuccaaccacaucgaggugguuagcgccuacgguuuaugcgacgcggcuaaucccacuaacuguauagccccagugaauggcuacuucauuaaaacaaacaauacccggaucgucgacgaauggucauauacagggaguucuuuuuacgcacccgagccuaucacuucccucaacaccaaguauguggccccacagguaacguaccaaaauauuagcacaaaccugcccccuccgcuucugggaaacucaaccggcaucgauuuccaggacgagcuagaugaauuuuucaagaaugugaguacuagcauuccaaacuuugggucccucacccagauaaauacaacucuguuggaccugaccuaugagauguuaucucuccaacaggucguuaaagcucugaacgaaagcuacaucgaucuuaaggagcugggaaauuauacauacuacaacaaauggcccugguauauuugguugggcuucaucgcaggucucguggcccuggcgcuaugcguguuuuucauucuguguugcacgggguguggaaccaauugcaugggcaaacuuaagugcaaccguuguugcgacagauacgaagaguaugaucucgagccucauaagguccacgugcacuga

SEQ ID NO: 14831 - RNA, 4062 nt, Artificial Sequence
  MERS-CoV/Riyadh_14_2013__AHI48572.1 spike protein CDS human (1-1353)(V1060P_L1061P)
augauccacagcguguuccugcucauguuucuucugacccccacagaguccuacgucgacguuggcccugauucugugaagucagccugcauugaaguagacauacagcaaacuuucuuugauaaaacguggccaagaccgaucgacgugaguaaggcugaugggauuaucuauccccagggaaggaccuacagcaacauuacaaucacuuaucaggguuuguucccuuaccagggcgaccauggggauauguaugucuacuccgcaggacacgccaccggcacaaccccacaaaaauuauuuguggcgaauuauucucaggacguuaagcaguucgcuaacgguuuugugguccggauaggggccgcagccaauucgacuggaacagugaucauuucacccagcaccagugcuacgauccgcaaaauuuacccugcauucaugcugggcuccucuguaggcaacuuuagcgaugggaagaugggacgauucuuuaaucauacucuaguucuccugccagacgguuguggcacccuucugcgugccuucuacugcaucuuggagcccagauccgggaaccacuguccugcuggaaauucauauacaaguuuugccacuuaccauaccccagcgacagauugcagcgacggcaacuauaauaggaacgcaucucucaauuccuucaaggaauacuucaaccugcggaauuguaccuuuauguauacguacaacauaacugaggaugaaauucuggagugguucgguaucacacagaccgcccaaggggugcaccucuuuucaagccgcuaugucgacuuauacggaggcaauauguuccaguuugcuacucugccgguguacgacacaauuaaauauuacaguaucaucccccacucuauuagauccauacagagcgauaggaaggccugggcagcuuucuauguguacaaacuucagccuuugaccuuucugcuagacuucucggucgauggcuauauccggcgcgccauugacugcggguuuaacgaucucucucaacugcauuguuccuacgagucauucgacguugaaaguggaguguauagcguauccucuuuugaggcgaagccaagcgguucaguggucgaacaggccgagggcguggagugcgauuucaguccccuucuguccgggacgccuccacagguuuacaacuuuaaacgauugguguucaccaauuguaacuacaaucucacaaagcuguuaagccuguucucugucaacgacuuuacuugcucacaaaucagucccgcagcuauagccagcaauuguuauuccucucucauucuugauuacuucucguauccgcugagcaugaaguccgacuugucagugaguucugcuggaccuaucagccaguuuaacuacaaacaguccuucucaaauccaaccugccuaauccuggccacaguaccccacaaccucacuaccauuacaaagccucugaaauauagcuacaucaauaagugcucuagacuucuguccgaugacaggaccgaaguuccccaguuggugaacgcaaaucaauauaguccaugugucagcauugugcccucuacugucugggaggacggcgauuacuaccggaaacagcucuccccucuggaaggugggggcugguuaguggccucaggaaguacgguugcuaugacagagcagcugcagaugggcuuugggauaaccgugcaauauggaacugacaccaacagcguaugcccaaagcuagaguucgcgaaugauacaaaaaucgcaucgcagcucgguaacugugucgaauacucccuguauggcgugucugggcguggaguuuuucagaauugcaccgccgugggcguccgccagcaaagauucguguacgacgcuuaucagaaccuuguagguuacuauagcgaugacgggaacuacuacuguuugagggccugcgugucaguuccggucagugugauuuaugauaaggagacuaagacacaugcaacgcuguuuggcuccguggccugugaacacaucucuagcaccaugucccaguacucacggagcacucgaaguaugcucaaacgcagagacucuacauauggaccccugcagaccccugucggcugcguucuugggcugguaaauuccagcuuguucguggaggauuguaagcucccacugggacaaucguuaugcgcucugcccgacacaccuucaacucuaaccccaaggucugugcggaguguccccggugaaaugcgccucgccuccaucgcauuuaaccacccgauucagguggaucagcugaauagcucuuacuucaaacuuagcauaccuacgaacuuuuccuucggcguuacccaagaguauauccagacaacuauucagaaggugaccgucgacuguaaacaguacgugugcaauggguuccaaaagugcgaacaguugcugagagaguauggacaguuuuguucaaagaucaaccaggcgcuccauggcgcuaaucugaggcaagaugacaguguucguaacuuauucgccagcgugaaaucuucccagucaaguccaauuauccccgguuuugggggcgacuucaaucugacacuuuuggagccuguaagcauauccacuggaucucggucggcacgaagcgccaucgaagaucuccuguuugacaaggucaccauugcugaucccggcuacaugcagggguacgacgauugcaugcagcaaggaccagccucagcaagagaccuaaucugugcucaguauguggccggcuacaaagugcugccuccccucauggaugucaacauggaggcggccuauacguccagucugcuugguucuauugcugggguuggauggacagcaggcuugagcuccuucgccgcuaucccauuugcccagucaauauucuacaggcugaauggugugggcauuacccaacagguauuaucugaaaaccagaagcucaucgcaaauaaauuuaaccaggcgcugggggccaugcaaacuggauucacaaccacuaaugaggcuuuucgcaaggugcaggacgccgucaacaacaaugcacaggcucuuagcaagcuggccagugaauuguccaacaccuucggcgcaauuagcgccucuaucggggauauaauccagcggcucgacccgccugagcaagaugcucagauugacagacugaucaauggaaggcuaacaacgcugaacgcguucguggcccagcagcucguucgcucagaguccgcagcucugagugcccaacuugccaaagauaaggugaaugaaugcgucaaagcucagagcaagcgaucgggcuuuuguggucaggggacccacauugugucuuucguugugaacgcacccaauggauuguauuuuaugcaugucggcuacuauccauccaaccacaucgagguagugagcgccuacggucugugcgacgcggcuaaucccacuaacuguauagccccuguuaauggcuacuucauuaaaacaaacaauacccggaucguggacgaauggucauauacagggaguucuuuuuacgcaccagagcccaucacuuccuuaaacaccaaguaugucgccccucaggugacguaccaaaauauuagcacaaaccucccgccaccccugcuuggaaacucaaccggcaucgauuuccaggacgagcuggaugaauuuuucaagaauguaaguacuagcauuccuaacuuugggucccuaacccagauaaauacaacucuccuggacuugaccuaugagaugcugucuuuacaacagguggucaaagcucucaacgaaagcuacaucgaucugaaggagcuuggaaauuauacauacuacaacaaauggccaugguauauuuggcugggcuucaucgcagguuugguugcccucgcgcugugcguguuuuucauucuauguugcacgggguguggaaccaauugcaugggcaagcugaaaugcaaccguuguugcgacagauacgaagaguaugaucuugagccccauaaggugcacguccacuga

SEQ ID NO: 14832 - RNA, 4062 nt, Artificial Sequence
  MERS-CoV/Riyadh_14_2013__AHI48572.1 spike protein CDS human (1-1353)(R1020Q)
augauccacagcguguuccugcucauguuucuucugacccccacagaguccuacgucgacguuggcccugauucugugaagucagccugcauugaaguagacauacagcaaacuuucuuugauaaaacguggccaagaccgaucgacgugaguaaggcugaugggauuaucuauccccagggaaggaccuacagcaacauuacaaucacuuaucaggguuuguucccuuaccagggcgaccauggggauauguaugucuacuccgcaggacacgccaccggcacaaccccacaaaaauuauuuguggcgaauuauucucaggacguuaagcaguucgcuaacgguuuugugguccggauaggggccgcagccaauucgacuggaacagugaucauuucacccagcaccagugcuacgauccgcaaaauuuacccugcauucaugcugggcuccucuguaggcaacuuuagcgaugggaagaugggacgauucuuuaaucauacucuaguucuccugccagacgguuguggcacccuucugcgugccuucuacugcaucuuggagcccagauccgggaaccacuguccugcuggaaauucauauacaaguuuugccacuuaccauaccccagcgacagauugcagcgacggcaacuauaauaggaacgcaucucucaauuccuucaaggaauacuucaaccugcggaauuguaccuuuauguauacguacaacauaacugaggaugaaauucuggagugguucgguaucacacagaccgcccaaggggugcaccucuuuucaagccgcuaugucgacuuauacggaggcaauauguuccaguuugcuacucugccgguguacgacacaauuaaauauuacaguaucaucccccacucuauuagauccauacagagcgauaggaaggccugggcagcuuucuauguguacaaacuucagccuuugaccuuucugcuagacuucucggucgauggcuauauccggcgcgccauugacugcggguuuaacgaucucucucaacugcauuguuccuacgagucauucgacguugaaaguggaguguauagcguauccucuuuugaggcgaagccaagcgguucaguggucgaacaggccgagggcguggagugcgauuucaguccccuucuguccgggacgccuccacagguuuacaacuuuaaacgauugguguucaccaauuguaacuacaaucucacaaagcuguuaagccuguucucugucaacgacuuuacuugcucacaaaucagucccgcagcuauagccagcaauuguuauuccucucucauucuugauuacuucucguauccgcugagcaugaaguccgacuugucagugaguucugcuggaccuaucagccaguuuaacuacaaacaguccuucucaaauccaaccugccuaauccuggccacaguaccccacaaccucacuaccauuacaaagccucugaaauauagcuacaucaauaagugcucuagacuucuguccgaugacaggaccgaaguuccccaguuggugaacgcaaaucaauauaguccaugugucagcauugugcccucuacugucugggaggacggcgauuacuaccggaaacagcucuccccucuggaaggugggggcugguuaguggccucaggaaguacgguugcuaugacagagcagcugcagaugggcuuugggauaaccgugcaauauggaacugacaccaacagcguaugcccaaagcuagaguucgcgaaugauacaaaaaucgcaucgcagcucgguaacugugucgaauacucccuguauggcgugucugggcguggaguuuuucagaauugcaccgccgugggcguccgccagcaaagauucguguacgacgcuuaucagaaccuuguagguuacuauagcgaugacgggaacuacuacuguuugagggccugcgugucaguuccggucagugugauuuaugauaaggagacuaagacacaugcaacgcuguuuggcuccguggccugugaacacaucucuagcaccaugucccaguacucacggagcacucgaaguaugcucaaacgcagagacucuacauauggaccccugcagaccccugucggcugcguucuugggcugguaaauuccagcuuguucguggaggauuguaagcucccacugggacaaucguuaugcgcucugcccgacacaccuucaacucuaaccccaaggucugugcggaguguccccggugaaaugcgccucgccuccaucgcauuuaaccacccgauucagguggaucagcugaauagcucuuacuucaaacuuagcauaccuacgaacuuuuccuucggcguuacccaagaguauauccagacaacuauucagaaggugaccgucgacuguaaacaguacgugugcaauggguuccaaaagugcgaacaguugcugagagaguauggacaguuuuguucaaagaucaaccaggcgcuccauggcgcuaaucugaggcaagaugacaguguucguaacuuauucgccagcgugaaaucuucccagucaaguccaauuauccccgguuuugggggcgacuucaaucugacacuuuuggagccuguaagcauauccacuggaucucggucggcacgaagcgccaucgaagaucuccuguuugacaaggucaccauugcugaucccggcuacaugcagggguacgacgauugcaugcagcaaggaccagccucagcaagagaccuaaucugugcucaguauguggccggcuacaaagugcugccuccccucauggaugucaacauggaggcggccuauacguccagucugcuugguucuauugcugggguuggauggacagcaggcuugagcuccuucgccgcuaucccauuugcccagucaauauucuacaggcugaauggugugggcauuacccaacagguauuaucugaaaaccagaagcucaucgcaaauaaauuuaaccaggcgcugggggccaugcaaacuggauucacaaccacuaaugaggcuuuucagaaggugcaggacgccgucaacaacaaugcacaggcucuuagcaagcuggccagugaauuguccaacaccuucggcgcaauuagcgccucuaucggggauauaauccaacgccucgacgugcuggagcaggaugcucagauugaccggcuaaucaauggaagacugacaacgcucaacgcguucguugcccagcaacuggugaggucagaguccgcagcucuuagugcccaguuggccaaagauaaggucaaugaaugcgugaaagcucagagcaagcgcucgggcuuuuguggucaggggacccacauuguuucuuucguggucaacgcaccgaauggacuguauuuuaugcauguaggcuacuauccuuccaaccacaucgaggugguuagcgccuacgguuuaugcgacgcggcuaaucccacuaacuguauagccccagugaauggcuacuucauuaaaacaaacaauacccgaaucgucgacgaauggucauauacagggaguucuuuuuacgcacccgagccuaucacuucccucaacaccaaguauguggccccacaaguaacguaccagaauauuagcacaaaccugcccccuccgcuucugggaaacucaaccggcaucgauuuccaggacgagcuagaugaauuuuucaagaaugugaguacuagcauuccaaacuuugggucccucacccaaauaaauacaacucuguuggaccugaccuaugagauguuaucucuccagcaggucguuaaagcucugaacgaaagcuacaucgaucuuaaggagcugggaaauuauacauacuacaacaaauggcccugguauauuugguugggcuucaucgcaggucucguggcccuggcgcuaugcguguuuuucauucuguguugcacgggguguggaaccaauugcaugggcaaacuuaagugcaaccgguguugcgaccguuacgaagaguaugaucucgagccucauaagguccacgugcacuga

SEQ ID NO: 14833 - RNA, 1767 nt, Artificial Sequence
  MERS-CoV/Riyadh_14_2013__AHI48572.1 spike protein CDS human (1-17_726-1296)(R1020Q)
augauccacagcguguuccugcucauguuucuucugacccccacagaguccgacugcaaguugccuuuaggccagucucugugugcccuaccagauacuccgucaacgcucacccccagaagugucaggagcguuccuggggaaaugcggcuggcuuccauugcauucaaccauccaauacaaguggaccagcuuaauucuucguacuuuaaacugucaauccccacaaacuucagcuuuggaguaacucaggaguauauucagaccacaauccaaaaggugaccgucgauugcaaacaguacguguguaaugguuuccagaagugcgaacaguugcuccgcgaguauggccaauuuuguaguaaaauuaaccaggcccugcacggggcgaaucugcgacaggacgauuccguucguaaccucuucgcuucugugaagucaucccagucaaguccuaucauaccaggauuuggcggugacuucaauuuaacucugcuugaacccgucagcaucucuacaggguccagaucagccaggagcgcaauugaggauuugcuguuugacaaggugaccaucgccgauccuggauacaugcaaggcuaugacgauugcaugcagcagggcccagcuagugcacgggaccuaauuugugcccaauacguagcuggguauaaaguucucccgccccugauggaugugaacauggaggccgcguacacgucuucccuucugggaagcaucgccggugucggcuggacugcaggguugucgucuuucgcugccauaccuuuugcacaguccauuuucuaccgccucaauggagugggcaucacccaacaggugcugucagaaaaccagaaguuaauugcuaauaaauucaaccaggcccugggugcgaugcagacaggguuuacuaccacaaaugaggccuuccagaagguccaagacgcaguuaacaauaacgcucaggcccucaguaaacuugcuagcgaacuguccaacaccuuuggagccaucucugcaagcaucggcgacauuauacagagauuggaugugcuagagcaggacgcccaaaucgauaggcugauuaauggccggcucacgacucugaacgcuuucguagcgcagcagcuugugcgcucagagagugcagcccuguccgcucaguuggccaaggacaaggucaaugaaugcgugaaagcacaaagcaagcgaucuggguuuuguggacaggguacacauaucguuucauucguggucaacgccccaaauggccucuauuuuaugcacgugggguacuaucccaguaaccauauagagguaguuagcgcuuacggacugugcgaugccgcaaauccuaccaacuguauugcgccagugaauggcuauuucaucaaaacuaacaauacaagaaucgucgacgaaugguccuacaccgguucuucguuuuaugcucccgagccgauuacgagcuuaaacaccaaguacguggccccucaggucacauaccaaaauaucuccacuaaccugcccccaccucuacucgggaauagcaccggcauugauuuccaggacgaacuggaugaguuuuucaaaaacgugaguacaucuauacccaacuuuggaagccuuacucagaucaauaccacauugcuggaccucaccuaugagaugcugucccuucagcaaguugugaaggcacugaacgaaucauacauugauuugaaagagcucggcaauuauacuuacuauaacaaguggccauga

SEQ ID NO: 14834 - RNA, 1848 nt, Artificial Sequence
  MERS-CoV/Riyadh_14_2013__AHI48572.1 spike protein CDS human (1-17_726-1296)(R1020Q)_LeucineZipper
augauccacagcguguuccugcucauguuucuucugacccccacagaguccgacugcaaguugccuuuaggccagucucugugugcccuaccagauacuccgucaacgcucacccccagaagugucaggagcguuccuggggaaaugcggcuggcuuccauugcauucaaccauccaauacaaguggaccagcuuaauucuucguacuuuaaacugucaauccccacaaacuucagcuuuggaguaacucaggaguauauucagaccacaauccaaaaggugaccgucgauugcaaacaguacguguguaaugguuuccagaagugcgaacaguugcuccgcgaguauggccaauuuuguaguaaaauuaaccaggcccugcacggggcgaaucugcgacaggacgauuccguucguaaccucuucgcuucugugaagucaucccagucaaguccuaucauaccaggauuuggcggugacuucaauuuaacucugcuugaacccgucagcaucucuacaggguccagaucagccaggagcgcaauugaggauuugcuguuugacaaggugaccaucgccgauccuggauacaugcaaggcuaugacgauugcaugcagcagggcccagcuagugcacgggaccuaauuugugcccaauacguagcuggguauaaaguucucccgccccugauggaugugaacauggaggccgcguacacgucuucccuucugggaagcaucgccggugucggcuggacugcaggguugucgucuuucgcugccauaccuuuugcacaguccauuuucuaccgccucaauggagugggcaucacccaacaggugcugucagaaaaccagaaguuaauugcuaauaaauucaaccaggcccugggugcgaugcagacaggguuuacuaccacaaaugaggccuuccagaagguccaagacgcaguuaacaauaacgcucaggcccucaguaaacuugcuagcgaacuguccaacaccuuuggagccaucucugcaagcaucggcgacauuauacagagauuggaugugcuagagcaggacgcccaaaucgauaggcugauuaauggccggcucacgacucugaacgcuuucguagcgcagcagcuugugcgcucagagagugcagcccuguccgcucaguuggccaaggacaaggucaaugaaugcgugaaagcacaaagcaagcgaucuggguuuuguggacaggguacacauaucguuucauucguggucaacgccccaaauggccucuauuuuaugcacgugggguacuaucccaguaaccauauagagguaguuagcgcuuacggacugugcgaugccgcaaauccuaccaacuguauugcgccagugaauggcuauuucaucaaaacuaacaauacaagaaucgucgacgaaugguccuacaccgguucuucguuuuaugcucccgagccgauuacgagcuuaaacaccaaguacguggccccucaggucacauaccaaaauaucuccacuaaccugcccccaccucuacucgggaauagcaccggcauugauuuccaggacgaacuggaugaguuuuucaaaaacgugaguacaucuauacccaacuuuggaagccuuacucagaucaauaccacauugcuggaccucaccuaugagaugcugucccuucagcaaguugugaaggcacugaacgaaucauacauugauuugaaagagcucggcaauuauacuuacuauaacaaguggccagacaagaucgaagagauccugagcaaaauuuaccacauagaaaaugagaucgccaggauuaagaaauuaaucggggaggcuuga

SEQ ID NO: 14835 - RNA, 4062 nt, Artificial Sequence
  MERS-CoV/England 1__YP_007188579.1 spike protein CDS human (1-1353)
augauccacagcguguuccugcucauguuucuucugacccccacagaguccuacgucgacguuggcccugauucugugaagucagccugcauugaaguagacauacagcaaacuuucuuugauaaaacguggccaagaccgaucgacgugaguaaggcugaugggauuaucuauccccagggaaggaccuacagcaacauuacaaucacuuaucaggguuuguucccuuaccagggcgaccauggggauauguaugucuacuccgcaggacacgccaccggcacaaccccacaaaaauuauuuguggcgaauuauucucaggacguuaagcaguucgcuaacgguuuugugguccggauaggggccgcagccaauucgacuggaacagugaucauuucacccagcaccagugcuacgauccgcaaaauuuacccugcauucaugcugggcuccucuguaggcaacuuuagcgaugggaagaugggacgauucuuuaaucauacucuaguucuccugccagacgguuguggcacccuucugcgugccuucuacugcaucuuggagcccagauccgggaaccacuguccugcuggaaauucauauacaaguuuugccacuuaccauaccccagcgacagauugcagcgacggcaacuauaauaggaacgcaucucucaauuccuucaaggaauacuucaaccugcggaauuguaccuuuauguauacguacaacauaacugaggaugaaauucuggagugguucgguaucacacagaccgcccaaggggugcaccucuuuucaagccgcuaugucgacuuauacggaggcaauauguuccaguuugcuacucugccgguguacgacacaauuaaauauuacaguaucaucccccacucuauuagauccauacagagcgauaggaaggccugggcagcuuucuauguguacaaacuucagccuuugaccuuucugcuagacuucucggucgauggcuauauccggcgcgccauugacugcggguuuaacgaucucucucaacugcauuguuccuacgagucauucgacguugaaaguggaguguauagcguauccucuuuugaggcgaagccaagcgguucaguggucgaacaggccgagggcguggagugcgauuucaguccccuucuguccgggacgccuccacagguuuacaacuuuaaacgauugguguucaccaauuguaacuacaaucucacaaagcuguuaagccuguucucugucaacgacuuuacuugcucacaaaucagucccgcagcuauagccagcaauuguuauuccucucucauucuugauuacuucucguauccgcugagcaugaaguccgacuugucagugaguucugcuggaccuaucagccaguuuaacuacaaacaguccuucucaaauccaaccugccuaauccuggccacaguaccccacaaccucacuaccauuacaaagccucugaaauauagcuacaucaauaagugcucuagauuucuuuccgaugacaggaccgaaguuccccagcuggugaacgcaaaucaauauaguccaugugucagcauugugcccucuacugucugggaggacggcgauuacuaccggaaacaguuguccccucucgaaggugggggcuggcugguggccucaggaaguacgguugcuaugacagagcaguuacagaugggcuucgggauaaccgugcaauauggaacugacaccaacagcguaugcccaaagcuggaauuugcgaaugauacaaaaaucgcaucgcagcuagguaacugugucgaguacucccucuauggcgugucugggcguggaguuuuccagaauugcaccgccgugggcguccgccagcaaagauuuguguacgacgcuuaucagaaccugguagguuacuauagcgaugacgggaacuacuacugucuuagggccugcgugucaguuccggucagugugauuuaugauaaggagacuaagacacaugcaacguuguucggcuccguggccugugaacacaucucuagcaccaugucccaguacucacggagcacucgaaguaugcugaaacgcagagacucuacauauggaccccuccagaccccugucggcugcguucuggggcuuguaaauuccagccuguuuguggaggauuguaaguugccacucggacaaucgcugugcgcuuuacccgacacaccuucaacucugaccccaaggucugugcggaguguccccggugaaaugcgccuagccuccaucgcauucaaccacccgauucagguggaucagcucaauagcucuuacuuuaaacugagcauaccuacgaacuucuccuucggcguuacccaagaguauauccagacaacuauucagaaggugaccgucgacuguaaacaguacgugugcaauggguuucaaaagugcgaacagcuuuugagagaguauggacaguucuguucaaagaucaaccaggcgcugcauggcgcuaaucucaggcaagaugacaguguucguaaccuguuugccagcgugaaaucuucccagucaaguccaauuauccccgguuucgggggcgacuuuaauuuaacacugcuugagccuguaagcauauccacuggaucucggucggcacgaagcgccaucgaagaucuccucuucgacaaggucaccauugcugaucccggcuacaugcagggguacgacgauugcaugcagcaaggaccagccucagcaagagaccugaucugugcucaguauguggccggcuacaaagugcuaccuccccugauggaugucaacauggaggcggccuauacguccagucuccuggguucuauugcugggguuggauggacagcaggccuuagcuccuuugccgcuaucccauucgcccagucaauauuuuacagguugaauggugugggcauuacccaacagguacugucugaaaaccagaaguuaaucgcaaauaaauucaaccaggcgcucggggccaugcaaacuggauuuacaaccacuaaugaggcuuuccacaaggugcaggacgccgucaacaacaaugcacaggcucugagcaaacuugccagugaacuguccaacaccuucggcgcaauuagcgccucuaucggggauauaauccagcgcuuggacgugcucgagcaagaugcucagauugaccggcugaucaauggaagacuaacaacgcugaacgcguuuguugcccagcagcucgugaggucagaguccgcagcucugagugcccaacuugccaaggauaaggucaaugaaugcgugaaagcucagagcaagcgcucgggcuucuguggucaggggacccauauuguuucuuuuguggucaacgcaccgaauggauuguauuucaugcacguaggcuacuauccuuccaaccauaucgaggugguuagcgccuacggucugugcgacgcggcuaaucccacuaacuguauagccccagugaauggcuacuuuauuaaaacaaacaauacccgaaucgucgacgaauggucauauacagggaguucuuucuacgcacccgagccuaucacuuccuuaaacaccaaguauguggccccacagguaacguaccaaaauauuagcacaaacuugcccccuccgcugcuuggaaacucaaccggcaucgauuuucaggacgagcuggaugaguucuuuaagaaugugaguacuagcauuccaaacuucgggucccuaacccagauaaauacaacucuccuggacuugaccuaugaaaugcugucuuuacaacaggucguuaaagcucucaacgaaagcuacaucgaucugaaggagcuuggaaauuauacauacuacaacaaauggcccugguauauuuggcugggcuuuaucgcagguuugguggcccucgcgcugugcguguucuuuauucuauguugcacgggguguggaaccaauugcaugggcaagcugaaaugcaaccgguguugcgaccguuacgaagaguaugaucuugagccucacaagguccacgugcauuga

SEQ ID NO: 14836 - RNA, 4062 nt, Artificial Sequence
  MERS-CoV/England 1__YP_007188579.1 spike protein CDS human (1-1353)(V1060P_L1061P)
augauccacagcguguuccugcucauguuucuucugacccccacagaguccuacgucgacguuggcccugauucugugaagucagccugcauugaaguagacauacagcaaacuuucuuugauaaaacguggccaagaccgaucgacgugaguaaggcugaugggauuaucuauccccagggaaggaccuacagcaacauuacaaucacuuaucaggguuuguucccuuaccagggcgaccauggggauauguaugucuacuccgcaggacacgccaccggcacaaccccacaaaaauuauuuguggcgaauuauucucaggacguuaagcaguucgcuaacgguuuugugguccggauaggggccgcagccaauucgacuggaacagugaucauuucacccagcaccagugcuacgauccgcaaaauuuacccugcauucaugcugggcuccucuguaggcaacuuuagcgaugggaagaugggacgauucuuuaaucauacucuaguucuccugccagacgguuguggcacccuucugcgugccuucuacugcaucuuggagcccagauccgggaaccacuguccugcuggaaauucauauacaaguuuugccacuuaccauaccccagcgacagauugcagcgacggcaacuauaauaggaacgcaucucucaauuccuucaaggaauacuucaaccugcggaauuguaccuuuauguauacguacaacauaacugaggaugaaauucuggagugguucgguaucacacagaccgcccaaggggugcaccucuuuucaagccgcuaugucgacuuauacggaggcaauauguuccaguuugcuacucugccgguguacgacacaauuaaauauuacaguaucaucccccacucuauuagauccauacagagcgauaggaaggccugggcagcuuucuauguguacaaacuucagccuuugaccuuucugcuagacuucucggucgauggcuauauccggcgcgccauugacugcggguuuaacgaucucucucaacugcauuguuccuacgagucauucgacguugaaaguggaguguauagcguauccucuuuugaggcgaagccaagcgguucaguggucgaacaggccgagggcguggagugcgauuucaguccccuucuguccgggacgccuccacagguuuacaacuuuaaacgauugguguucaccaauuguaacuacaaucucacaaagcuguuaagccuguucucugucaacgacuuuacuugcucacaaaucagucccgcagcuauagccagcaauuguuauuccucucucauucuugauuacuucucguauccgcugagcaugaaguccgacuugucagugaguucugcuggaccuaucagccaguuuaacuacaaacaguccuucucaaauccaaccugccuaauccuggccacaguaccccacaaccucacuaccauuacaaagccucugaaauauagcuacaucaauaagugcucuagauuucuuuccgaugacaggaccgaaguuccccagcuggugaacgcaaaucaauauaguccaugugucagcauugugcccucuacugucugggaggacggcgauuacuaccggaaacaguuguccccucucgaaggugggggcuggcugguggccucaggaaguacgguugcuaugacagagcaguuacagaugggcuucgggauaaccgugcaauauggaacugacaccaacagcguaugcccaaagcuggaauuugcgaaugauacaaaaaucgcaucgcagcuagguaacugugucgaguacucccucuauggcgugucugggcguggaguuuuccagaauugcaccgccgugggcguccgccagcaaagauuuguguacgacgcuuaucagaaccugguagguuacuauagcgaugacgggaacuacuacugucuuagggccugcgugucaguuccggucagugugauuuaugauaaggagacuaagacacaugcaacguuguucggcuccguggccugugaacacaucucuagcaccaugucccaguacucacggagcacucgaaguaugcugaaacgcagagacucuacauauggaccccuccagaccccugucggcugcguucuggggcuuguaaauuccagccuguuuguggaggauuguaaguugccacucggacaaucgcugugcgcuuuacccgacacaccuucaacucugaccccaaggucugugcggaguguccccggugaaaugcgccuagccuccaucgcauucaaccacccgauucagguggaucagcucaauagcucuuacuuuaaacugagcauaccuacgaacuucuccuucggcguuacccaagaguauauccagacaacuauucagaaggugaccgucgacuguaaacaguacgugugcaauggguuucaaaagugcgaacagcuuuugagagaguauggacaguucuguucaaagaucaaccaggcgcugcauggcgcuaaucucaggcaagaugacaguguucguaaccuguuugccagcgugaaaucuucccagucaaguccaauuauccccgguuucgggggcgacuuuaauuuaacacugcuugagccuguaagcauauccacuggaucucggucggcacgaagcgccaucgaagaucucuuguucgacaaggucaccauugcugaucccggcuacaugcagggguacgacgauugcaugcagcaaggaccagccucagcaagagaccugaucugugcucaguauguggccggcuacaaagugcuaccuccccugauggaugucaacauggaggcggccuauacguccagucuccuggguucuauugcugggguuggauggacagcaggccuuagcuccuuugccgcuaucccauucgcccagucaauauuuuacagguugaauggugugggcauuacccaacagguacugucugaaaaccagaaguuaaucgcaaauaaauucaaccaggcgcucggggccaugcaaacuggauuuacaaccacuaaugaggcuuuccacaaggugcaggacgccgucaacaacaaugcacaggcucugagcaaacuugccagugaacuguccaacaccuucggcgcaauuagcgccucuaucggggauauaauccagcgcuuggacccgccugagcaagaugcucagauugaccggcucaucaauggaagacugacaacgcuaaacgcguuuguggcccagcagcugguuaggucagaguccgcagcucucagugcccaacuggccaaagauaaggugaaugaaugcgucaaagcucagagcaagcgcucgggcuucuguggucaggggacccauauugugucuuuuguugugaacgcacccaauggacuuuauuucaugcacgucggcuacuauccauccaaccauaucgagguagugagcgccuacgguuugugcgacgcggcuaaucccacuaacuguauagccccuguuaauggcuacuuuauuaaaacaaacaauacccgaaucguggacgaauggucauauacagggaguucuuucuacgcaccagagcccaucacuucccugaacaccaaguaugucgccccucaggugacguaccaaaauauuagcacaaacuuaccgccaccccuccugggaaacucaaccggcaucgauuuucaggacgagcuugaugaguucuuuaagaauguaaguacuagcauuccuaacuucgggucccugacccagauaaauacaacucuacucgaccugaccuaugaaauguugucucugcaacagguggucaaggcuuuaaacgaaagcuacaucgaucucaaggagcugggaaauuauacauacuacaacaaauggccaugguauauuuggcuuggcuuuaucgcaggucugguugccuuggcgcucugcguguucuuuauucuguguugcacgggguguggaaccaauugcaugggcaagcuaaaaugcaaccgguguugcgaccguuacgaagaguaugaucuggagccccacaaggugcacguccauuga

SEQ ID NO: 14837 - RNA, 3876 nt, Artificial Sequence
  MERS-CoV/England 1__YP_007188579.1 spike protein CDS human (variant)
augauccacagcguguuccugcucauguuucuucugacccccacagaguccuacgucgacguuggcccugauucugugaagucagccugcauugaaguagacauacagcaaacuuucuuugauaaaacguggccaagaccgaucgacgugaguaaggcugaugggauuaucuauccccagggaaggaccuacagcaacauuacaaucacuuaucaggguuuguucccuuaccagggcgaccauggggauauguaugucuacuccgcaggacacgccaccggcacaaccccacaaaaauuauuuguggcgaauuauucucaggacguuaagcaguucgcuaacgguuuugugguccggauaggggccgcagccaauucgacuggaacagugaucauuucacccagcaccagugcuacgauccgcaaaauuuacccugcauucaugcugggcuccucuguaggcaacuuuagcgaugggaagaugggacgauucuuuaaucauacucuaguucuccugccagacgguuguggcacccuucugcgugccuucuacugcaucuuggagcccagauccgggaaccacuguccugcuggaaauucauauacaaguuuugccacuuaccauaccccagcgacagauugcagcgacggcaacuauaauaggaacgcaucucucaauuccuucaaggaauacuucaaccugcggaauuguaccuuuauguauacguacaacauaacugaggaugaaauucuggagugguucgguaucacacagaccgcccaaggggugcaccucuuuucaagccgcuaugucgacuuauacggaggcaauauguuccaguuugcuacucugccgguguacgacacaauuaaauauuacaguaucaucccccacucuauuagauccauacagagcgauaggaaggccugggcagcuuucuauguguacaaacuucagccuuugaccuuucugcuagacuucucggucgauggcuauauccggcgcgccauugacugcggguuuaacgaucucucucaacugcauuguuccuacgagucauucgacguugaaaguggaguguauagcguauccucuuuugaggcgaagccaagcgguucaguggucgaacaggccgagggcguggagugcgauuucaguccccuucuguccgggacgccuccacagguuuacaacuuuaaacgauugguguucaccaauuguaacuacaaucucacaaagcuguuaagccuguucucugucaacgacuuuacuugcucacaaaucagucccgcagcuauagccagcaauuguuauuccucucucauucuugauuacuucucguauccgcugagcaugaaguccgacuugucagugaguucugcuggaccuaucagccaguuuaacuacaaacaguccuucucaaauccaaccugccuaauccuggccacaguaccccacaaccucacuaccauuacaaagccucugaaauauagcuacaucaauaagugcucuagauuucuuuccgaugacaggaccgaaguuccccagcuggugaacgcaaaucaauauaguccaugugucagcauugugcccucuacugucugggaggacggcgauuacuaccggaaacaguuguccccucucgaaggugggggcuggcugguggccucaggaaguacgguugcuaugacagagcaguuacagaugggcuucgggauaaccgugcaauauggaacugacaccaacagcguaugcccaaagcuggaauuugcgaaugauacaaaaaucgcaucgcagcuagguaacugugucgaguacucccucuauggcgugucugggcguggaguuuuccagaauugcaccgccgugggcguccgccagcaaagauuuguguacgacgcuuaucagaaccugguagguuacuauagcgaugacgggaacuacuacugucuuagggccugcgugucaguuccggucagugugauuuaugauaaggagacuaagacacaugcaacguuguucggcuccguggccugugaacacaucucuagcaccaugucccaguacucacggagcacucgaaguaugcugaaacgcagagacucuacauauggaccccuccagaccccugucggcugcguucuggggcuuguaaauuccagccuguuuguggaggauuguaaguugccacucggacaaucgcugugcgcuuuacccgacacaccuucaacucugaccccaaggucugugcggaguguccccggugaaaugcgccuagccuccaucgcauucaaccacccgauucagguggaucagcucaauagcucuuacuuuaaacugagcauaccuacgaacuucuccuucggcguuacccaagaguauauccagacaacuauucagaaggugaccgucgacuguaaacaguacgugugcaauggguuucaaaagugcgaacagcuuuugagagaguauggacaguucuguucaaagaucaaccaggcgcugcauggcgcuaaucucaggcaagaugacaguguucguaaccuguuugccagcgugaaaucuucccagucaaguccaauuauccccgguuucgggggcgacuuuaauuuaacacugcuugagccuguaagcauauccacuggaucucggucggcacgaagcgccaucgaagaucucuuguucgacaaggucaccauugcugaucccggcuacaugcagggguacgacgauugcaugcagcaaggaccagccucagcaagagaccugaucugugcucaguauguggccggcuacaaagugcuaccuccccugauggaugucaacauggaggcggccuauacguccagucuccuggguucuauugcugggguuggauggacagcaggccuuagcuccuuugccgcuaucccauucgcccagucaauauuuuacagguugaauggugugggcauuacccaacagguacugucugaaaaccagaaguuaaucgcaaauaaauucaaccaggcgcucggggccaugcaaacuggauuuacaaccacuaaugaggcuuuccacaaggugcaggacgccgucaacaacaaugcacaggcucugagcaaacuugccagugaacuguccaacaccuucggcgcaauuagcgccucuaucggggauauaauccagcgcuuggacccgccugagcaagaugcucagauugaccggcucaucaauggaagacugacaacgcuaaacgcguuuguggcccagcagcugguuaggucagaguccgcagcucucagugcccaacuggccaaagauaaggugaaugaaugcgucaaagcucagagcaagcgcucgggcuucuguggucaggggacccauauugugucuuuuguugugaacgcacccaauggacuuuauuucaugcacgucggcuacuauccauccaaccauaucgagguagugagcgccuacgguuugugcgacgcggcuaaucccacuaacuguauagccccuguuaauggcuacuuuauuaaaacaaacaauacccgaaucguggacgaauggucauauacagggaguucuuucuacgcaccagagcccaucacuucccugaacaccaaguaugucgccccucaggugacguaccaaaauauuagcacaaacuuaccgccaccccuccugggaaacucaaccggcaucgauuuucaggacgagcuugaugaguucuuuaagaauguaaguacuagcauuccuaacuucgggucccugacccagauaaauacaacucuacucgaccugaccuaugaaauguugucucugcaacagguggucaaggcuuuaaacgaaagcuacaucgaucucaaggagcugggaaauuauacauacuga

SEQ ID NO: 14838 - RNA, 3876 nt, Artificial Sequence
  MERS-CoV/England 1__YP_007188579.1 spike protein CDS human (variant)
augauccacagcguguuccugcucauguuucuucugacccccacagaguccuacgucgacguuggcccugauucugugaagucagccugcauugaaguagacauacagcaaacuuucuuugauaaaacguggccaagaccgaucgacgugaguaaggcugaugggauuaucuauccccagggaaggaccuacagcaacauuacaaucacuuaucaggguuuguucccuuaccagggcgaccauggggauauguaugucuacuccgcaggacacgccaccggcacaaccccacaaaaauuauuuguggcgaauuauucucaggacguuaagcaguucgcuaacgguuuugugguccggauaggggccgcagccaauucgacuggaacagugaucauuucacccagcaccagugcuacgauccgcaaaauuuacccugcauucaugcugggcuccucuguaggcaacuuuagcgaugggaagaugggacgauucuuuaaucauacucuaguucuccugccagacgguuguggcacccuucugcgugccuucuacugcaucuuggagcccagauccgggaaccacuguccugcuggaaauucauauacaaguuuugccacuuaccauaccccagcgacagauugcagcgacggcaacuauaauaggaacgcaucucucaauuccuucaaggaauacuucaaccugcggaauuguaccuuuauguauacguacaacauaacugaggaugaaauucuggagugguucgguaucacacagaccgcccaaggggugcaccucuuuucaagccgcuaugucgacuuauacggaggcaauauguuccaguuugcuacucugccgguguacgacacaauuaaauauuacaguaucaucccccacucuauuagauccauacagagcgauaggaaggccugggcagcuuucuauguguacaaacuucagccuuugaccuuucugcuagacuucucggucgauggcuauauccggcgcgccauugacugcggguuuaacgaucucucucaacugcauuguuccuacgagucauucgacguugaaaguggaguguauagcguauccucuuuugaggcgaagccaagcgguucaguggucgaacaggccgagggcguggagugcgauuucaguccccuucuguccgggacgccuccacagguuuacaacuuuaaacgauugguguucaccaauuguaacuacaaucucacaaagcuguuaagccuguucucugucaacgacuuuacuugcucacaaaucagucccgcagcuauagccagcaauuguuauuccucucucauucuugauuacuucucguauccgcugagcaugaaguccgacuugucagugaguucugcuggaccuaucagccaguuuaacuacaaacaguccuucucaaauccaaccugccuaauccuggccacaguaccccacaaccucacuaccauuacaaagccucugaaauauagcuacaucaauaagugcucuagauuucuuuccgaugacaggaccgaaguuccccagcuggugaacgcaaaucaauauaguccaugugucagcauugugcccucuacugucugggaggacggcgauuacuaccggaaacaguuguccccucucgaaggugggggcuggcugguggccucaggaaguacgguugcuaugacagagcaguuacagaugggcuucgggauaaccgugcaauauggaacugacaccaacagcguaugcccaaagcuggaauuugcgaaugauacaaaaaucgcaucgcagcuagguaacugugucgaguacucccucuauggcgugucugggcguggaguuuuccagaauugcaccgccgugggcguccgccagcaaagauuuguguacgacgcuuaucagaaccugguagguuacuauagcgaugacgggaacuacuacugucuuagggccugcgugucaguuccggucagugugauuuaugauaaggagacuaagacacaugcaacguuguucggcuccguggccugugaacacaucucuagcaccaugucccaguacucacggagcacucgaaguaugcugaaacgcagagacucuacauauggaccccuccagaccccugucggcugcguucuggggcuuguaaauuccagccuguuuguggaggauuguaaguugccacucggacaaucgcugugcgcuuuacccgacacaccuucaacucugaccccagccucuguggguaguguccccggcgaaaugaggcuagcauccaucgcguucaaccacccgauucagguggaucagcucaauagcucuuacuuuaaacugagcauaccuacgaacuucuccuucgggguuacccaagaguauauccagacaacuauucagaaggugaccgucgacuguaaacaguacgugugcaauggauuucaaaagugcgaacagcuuuugcgggaguauggccaguucuguucaaagaucaaccaggcucugcauggugccaaucuccgccaagaugacaguguuagaaaccuguuugcaagcgugaaaucuucccagucaaguccaauuauccccggguucggcggagacuuuaauuuaacacugcuugagccuguaagcauauccacuggcucuaggucggcccguagcgcuaucgaagaucuucucuucgacaaggucaccauugccgaucccggguacaugcagggauacgacgauugcaugcagcaaggcccagcaucagcucgggaccugaucugugcccaguauguggcggguuacaaagugcuaccuccccugauggaugucaacauggaggccgcuuauacguccagucuccuggggucuauugcaggaguuggcuggacagccggucuuagcuccuuugcugccaucccauucgcacagucaauauuuuaccgauugaauggcguggggauuacccaacagguacugucugaaaaccagaaguuaaucgcgaauaaauucaaccaggcccucggagcuaugcaaacuggcuuuacaaccacuaaugaggccuuccacaaggugcaggacgcagucaacaacaaugcucaggcccugagcaaguuggcaagugaacuguccaacaccuucggggccauuagcgcuucuaucggagauauaauccagagauuggacccgccugagcaagaugcgcagauugacaggcucaucaauggccgccugacaacgcuaaacgccuuuguggcacagcagcugguucggucagaguccgcugcccucagugcccaacuggcuaaagauaaggugaaugaaugcgucaaagcacagagcaagagaucggguuucugugggcagggaacccauauugugucuuuuguugugaacgcccccaauggccuuuauuucaugcacgucgguuacuauccauccaaccauaucgagguagugagcgcguacggcuugugcgacgcugccaaucccacuaacuguauagcaccuguuaauggguacuuuauuaaaacaaacaauaccaggaucguggacgaauggucauauacaggaaguucuuucuacgccccagagcccaucacuucccugaacaccaaguaugucgcuccucaggugacguaccaaaauauuagcacaaacuuaccgccaccccuccugggcaacucaaccgggaucgauuuucaggacgagcuugaugaguucuuuaagaauguaaguacuagcauuccuaacuucggaucccugacccagauaaauacaacucuacucgaccugaccuaugaaauguugucucugcaacagguggucaaagcauuaaacgaaagcuacaucgaucucaaggagcugggcaauuauacauacuga

SEQ ID NO: 14839 - RNA, 3876 nt, Artificial Sequence
  MERS-CoV/England 1__YP_007188579.1 spike protein CDS human (variant)
augauccacagcguguuccugcucauguuucuucugacccccacagaguccuacgucgacguuggcccugauucugugaagucagccugcauugaaguagacauacagcaaacuuucuuugauaaaacguggccaagaccgaucgacgugaguaaggcugaugggauuaucuauccccagggaaggaccuacagcaacauuacaaucacuuaucaggguuuguucccuuaccagggcgaccauggggauauguaugucuacuccgcaggacacgccaccggcacaaccccacaaaaauuauuuguggcgaauuauucucaggacguuaagcaguucgcuaacgguuuugugguccggauaggggccgcagccaauucgacuggaacagugaucauuucacccagcaccagugcuacgauccgcaaaauuuacccugcauucaugcugggcuccucuguaggcaacuuuagcgaugggaagaugggacgauucuuuaaucauacucuaguucuccugccagacgguuguggcacccuucugcgugccuucuacugcaucuuggagcccagauccgggaaccacuguccugcuggaaauucauauacaaguuuugccacuuaccauaccccagcgacagauugcagcgacggcaacuauaauaggaacgcaucucucaauuccuucaaggaauacuucaaccugcggaauuguaccuuuauguauacguacaacauaacugaggaugaaauucuggagugguucgguaucacacagaccgcccaaggggugcaccucuuuucaagccgcuaugucgacuuauacggaggcaauauguuccaguuugcuacucugccgguguacgacacaauuaaauauuacaguaucaucccccacucuauuagauccauacagagcgauaggaaggccugggcagcuuucuauguguacaaacuucagccuuugaccuuucugcuagacuucucggucgauggcuauauccggcgcgccauugacugcggguuuaacgaucucucucaacugcauuguuccuacgagucauucgacguugaaaguggaguguauagcguauccucuuuugaggcgaagccaagcgguucaguggucgaacaggccgagggcguggagugcgauuucaguccccuucuguccgggacgccuccacagguuuacaacuuuaaacgauugguguucaccaauuguaacuacaaucucacaaagcuguuaagccuguucucugucaacgacuuuacuugcucacaaaucagucccgcagcuauagccagcaauuguuauuccucucucauucuugauuacuucucguauccgcugagcaugaaguccgacuugucagugaguucugcuggaccuaucagccaguuuaacuacaaacaguccuucucaaauccaaccugccuaauccuggccacaguaccccacaaccucacuaccauuacaaagccucugaaauauagcuacaucaauaagugcucuagauuucuuuccgaugacaggaccgaaguuccccagcuggugaacgcaaaucaauauaguccaugugucagcauugugcccucuacugucugggaggacggcgauuacuaccggaaacaguuguccccucucgaaggugggggcuggcugguggccucaggaaguacgguugcuaugacagagcaguuacagaugggcuucgggauaaccgugcaauauggaacugacaccaacagcguaugcccaaagcuggaauuugcgaaugauacaaaaaucgcaucgcagcuagguaacugugucgaguacucccucuauggcgugucugggcguggaguuuuccagaauugcaccgccgugggcguccgccagcaaagauuuguguacgacgcuuaucagaaccugguagguuacuauagcgaugacgggaacuacuacugucuuagggccugcgugucaguuccggucagugugauuuaugauaaggagacuaagacacaugcaacguuguucggcuccguggccugugaacacaucucuagcaccaugucccaguacucacggagcacucgaaguaugcugaaacgcagagacucuacauauggaccccuccagaccccugucggcugcguucuggggcuuguaaauuccagccuguuuguggaggauuguaaguugccacucggacaaucgcugugcgcuuuacccgacacaccuucaacucugaccccagccucuguggguaguguccccggcgaaaugaggcuagcauccaucgcguucaaccacccgauucagguggaucagcucaauagcucuuacuuuaaacugagcauaccuacgaacuucuccuucgggguuacccaagaguauauccagacaacuauucagaaggugaccgucgacuguaaacaguacgugugcaauggauuucaaaagugcgaacagcuuuugcgggaguauggccaguucuguucaaagaucaaccaggcucugcauggugccaaucuccgccaagaugacaguguuagaaaccuguuugcaagcgugaaaucuucccagucaaguccaauuauccccggguucggcggagacuuuaauuuaacacugcuugagccuguaagcauauccacuggcucugggucggccggaagcgcuaucgaagaucuucucuucgacaaggucaccauugccgaucccggcuacaugcaggguuacgacgauugcaugcagcaagggccagcaucagcuagggaccugaucugugcccaguauguggcgggauacaaagugcuaccuccccugauggaugucaacauggaggccgcuuauacguccagucuccugggcucuauugccgguguuggcuggacagcagggcuuagcuccuuugcugccaucccauucgcacagucaauauuuuaccguuugaauggagugggcauuacccaacagguacugucugaaaaccagaaguuaaucgcgaauaaauucaaccaggcccucggggcuaugcaaacuggauuuacaaccacuaaugaggccuuccacaaggugcaggacgcagucaacaacaaugcucaggcccugagcaaguuggcaagugaacuguccaacaccuucggcgccauuagcgcuucuaucggugauauaauccagcgguuggacccgccugagcaagaugcgcagauugaccgacucaucaaugggagacugacaacgcuaaacgccuuuguggcacagcagcugguuaggucagaguccgcugcccucagugcccaacuggcuaaagauaaggugaaugaaugcgucaaagcacagagcaagcgcucgggauucuguggccaggguacccauauugugucuuuuguugugaacgcccccaauggccuuuauuucaugcacgucggguacuauccauccaaccauaucgagguagugagcgcguacggauugugcgacgcugccaaucccacuaacuguauagcaccuguuaauggcuacuuuauuaaaacaaacaauacccggaucguggacgaauggucauauacagggaguucuuucuacgccccagagcccaucacuucccugaacaccaaguaugucgcuccucaggugacguaccaaaauauuagcacaaacuuaccgccaccccuccugggaaacucaaccggcaucgauuuucaggacgagcuugaugaguucuuuaagaauguaaguacuagcauuccuaacuucgguucccugacccagauaaauacaacucuacucgaccugaccuaugaaauguugucucugcaacagguggucaaagcauuaaacgaaagcuacaucgaucucaaggagcuggggaauuauacauacuga

SEQ ID NO: 14840 - RNA, 3957 nt, Artificial Sequence
  MERS-CoV/England 1__YP_007188579.1 spike protein CDS human (variant)
augauccacagcguguuccugcucauguuucuucugacccccacagaguccuacgucgacguuggcccugauucugugaagucagccugcauugaaguagacauacagcaaacuuucuuugauaaaacguggccaagaccgaucgacgugaguaaggcugaugggauuaucuauccccagggaaggaccuacagcaacauuacaaucacuuaucaggguuuguucccuuaccagggcgaccauggggauauguaugucuacuccgcaggacacgccaccggcacaaccccacaaaaauuauuuguggcgaauuauucucaggacguuaagcaguucgcuaacgguuuugugguccggauaggggccgcagccaauucgacuggaacagugaucauuucacccagcaccagugcuacgauccgcaaaauuuacccugcauucaugcugggcuccucuguaggcaacuuuagcgaugggaagaugggacgauucuuuaaucauacucuaguucuccugccagacgguuguggcacccuucugcgugccuucuacugcaucuuggagcccagauccgggaaccacuguccugcuggaaauucauauacaaguuuugccacuuaccauaccccagcgacagauugcagcgacggcaacuauaauaggaacgcaucucucaauuccuucaaggaauacuucaaccugcggaauuguaccuuuauguauacguacaacauaacugaggaugaaauucuggagugguucgguaucacacagaccgcccaaggggugcaccucuuuucaagccgcuaugucgacuuauacggaggcaauauguuccaguuugcuacucugccgguguacgacacaauuaaauauuacaguaucaucccccacucuauuagauccauacagagcgauaggaaggccugggcagcuuucuauguguacaaacuucagccuuugaccuuucugcuagacuucucggucgauggcuauauccggcgcgccauugacugcggguuuaacgaucucucucaacugcauuguuccuacgagucauucgacguugaaaguggaguguauagcguauccucuuuugaggcgaagccaagcgguucaguggucgaacaggccgagggcguggagugcgauuucaguccccuucuguccgggacgccuccacagguuuacaacuuuaaacgauugguguucaccaauuguaacuacaaucucacaaagcuguuaagccuguucucugucaacgacuuuacuugcucacaaaucagucccgcagcuauagccagcaauuguuauuccucucucauucuugauuacuucucguauccgcugagcaugaaguccgacuugucagugaguucugcuggaccuaucagccaguuuaacuacaaacaguccuucucaaauccaaccugccuaauccuggccacaguaccccacaaccucacuaccauuacaaagccucugaaauauagcuacaucaauaagugcucuagauuucuuuccgaugacaggaccgaaguuccccagcuggugaacgcaaaucaauauaguccaugugucagcauugugcccucuacugucugggaggacggcgauuacuaccggaaacaguuguccccucucgaaggugggggcuggcugguggccucaggaaguacgguugcuaugacagagcaguuacagaugggcuucgggauaaccgugcaauauggaacugacaccaacagcguaugcccaaagcuggaauuugcgaaugauacaaaaaucgcaucgcagcuagguaacugugucgaguacucccucuauggcgugucugggcguggaguuuuccagaauugcaccgccgugggcguccgccagcaaagauuuguguacgacgcuuaucagaaccugguagguuacuauagcgaugacgggaacuacuacugucuuagggccugcgugucaguuccggucagugugauuuaugauaaggagacuaagacacaugcaacguuguucggcuccguggccugugaacacaucucuagcaccaugucccaguacucacggagcacucgaaguaugcugaaacgcagagacucuacauauggaccccuccagaccccugucggcugcguucuggggcuuguaaauuccagccuguuuguggaggauuguaaguugccacucggacaaucgcugugcgcuuuacccgacacaccuucaacucugaccccagccucuguggguaguguccccggcgaaaugaggcuagcauccaucgcguucaaccacccgauucagguggaucagcucaauagcucuuacuuuaaacugagcauaccuacgaacuucuccuucgggguuacccaagaguauauccagacaacuauucagaaggugaccgucgacuguaaacaguacgugugcaauggauuucaaaagugcgaacagcuuuugcgggaguauggccaguucuguucaaagaucaaccaggcucugcauggugccaaucuccgccaagaugacaguguuagaaaccuguuugcaagcgugaaaucuucccagucaaguccaauuauccccggguucggcggagacuuuaauuuaacacugcuugagccuguaagcauauccacuggcucuaggucggcccguagcgcuaucgaagaucuucucuucgacaaggucaccauugccgaucccggguacaugcagggauacgacgauugcaugcagcaaggcccagcaucagcucgggaccugaucugugcccaguauguggcggguuacaaagugcuaccuccccugauggaugucaacauggaggccgcuuauacguccagucuccuggggucuauugcaggaguuggcuggacagccggucuuagcuccuuugcugccaucccauucgcacagucaauauuuuaccgauugaauggcguggggauuacccaacagguacugucugaaaaccagaaguuaaucgcgaauaaauucaaccaggcccucggagcuaugcaaacuggcuuuacaaccacuaaugaggccuuccacaaggugcaggacgcagucaacaacaaugcucaggcccugagcaaguuggcaagugaacuguccaacaccuucggggccauuagcgcuucuaucggagauauaauccagagauuggacccgccugagcaagaugcgcagauugacaggcucaucaauggccgccugacaacgcuaaacgccuuuguggcacagcagcugguucggucagaguccgcugcccucagugcccaacuggcuaaagauaaggugaaugaaugcgucaaagcacagagcaagagaucggguuucugugggcagggaacccauauugugucuuuuguugugaacgcccccaauggccuuuauuucaugcacgucgguuacuauccauccaaccauaucgagguagugagcgcguacggcuugugcgacgcugccaaucccacuaacuguauagcaccuguuaauggguacuuuauuaaaacaaacaauaccaggaucguggacgaauggucauauacaggaaguucuuucuacgccccagagcccaucacuucccugaacaccaaguaugucgcuccucaggugacguaccaaaauauuagcacaaacuuaccgccaccccuccugggcaacucaaccgggaucgauuuucaggacgagcuugaugaguucuuuaagaauguaaguacuagcauuccuaacuucggaucccugacccagauaaauacaacucuacucgaccugaccuaugaaauguugucucugcaacagguggucaaagcauuaaacgaaagcuacaucgaucucaaggagcugggcaauuauacauacgguggguacauuccagaagcgccccgcgacggacaggccuauguucgaaaagauggcgagugggugcuucuguccacguuuuga

SEQ ID NO: 14841 - RNA, 3957 nt, Artificial Sequence
  MERS-CoV/England 1__YP_007188579.1 spike protein CDS human (variant)
augauccacagcguguuccugcucauguuucuucugacccccacagaguccuacgucgacguuggcccugauucugugaagucagccugcauugaaguagacauacagcaaacuuucuuugauaaaacguggccaagaccgaucgacgugaguaaggcugaugggauuaucuauccccagggaaggaccuacagcaacauuacaaucacuuaucaggguuuguucccuuaccagggcgaccauggggauauguaugucuacuccgcaggacacgccaccggcacaaccccacaaaaauuauuuguggcgaauuauucucaggacguuaagcaguucgcuaacgguuuugugguccggauaggggccgcagccaauucgacuggaacagugaucauuucacccagcaccagugcuacgauccgcaaaauuuacccugcauucaugcugggcuccucuguaggcaacuuuagcgaugggaagaugggacgauucuuuaaucauacucuaguucuccugccagacgguuguggcacccuucugcgugccuucuacugcaucuuggagcccagauccgggaaccacuguccugcuggaaauucauauacaaguuuugccacuuaccauaccccagcgacagauugcagcgacggcaacuauaauaggaacgcaucucucaauuccuucaaggaauacuucaaccugcggaauuguaccuuuauguauacguacaacauaacugaggaugaaauucuggagugguucgguaucacacagaccgcccaaggggugcaccucuuuucaagccgcuaugucgacuuauacggaggcaauauguuccaguuugcuacucugccgguguacgacacaauuaaauauuacaguaucaucccccacucuauuagauccauacagagcgauaggaaggccugggcagcuuucuauguguacaaacuucagccuuugaccuuucugcuagacuucucggucgauggcuauauccggcgcgccauugacugcggguuuaacgaucucucucaacugcauuguuccuacgagucauucgacguugaaaguggaguguauagcguauccucuuuugaggcgaagccaagcgguucaguggucgaacaggccgagggcguggagugcgauuucaguccccuucuguccgggacgccuccacagguuuacaacuuuaaacgauugguguucaccaauuguaacuacaaucucacaaagcuguuaagccuguucucugucaacgacuuuacuugcucacaaaucagucccgcagcuauagccagcaauuguuauuccucucucauucuugauuacuucucguauccgcugagcaugaaguccgacuugucagugaguucugcuggaccuaucagccaguuuaacuacaaacaguccuucucaaauccaaccugccuaauccuggccacaguaccccacaaccucacuaccauuacaaagccucugaaauauagcuacaucaauaagugcucuagauuucuuuccgaugacaggaccgaaguuccccagcuggugaacgcaaaucaauauaguccaugugucagcauugugcccucuacugucugggaggacggcgauuacuaccggaaacaguuguccccucucgaaggugggggcuggcugguggccucaggaaguacgguugcuaugacagagcaguuacagaugggcuucgggauaaccgugcaauauggaacugacaccaacagcguaugcccaaagcuggaauuugcgaaugauacaaaaaucgcaucgcagcuagguaacugugucgaguacucccucuauggcgugucugggcguggaguuuuccagaauugcaccgccgugggcguccgccagcaaagauuuguguacgacgcuuaucagaaccugguagguuacuauagcgaugacgggaacuacuacugucuuagggccugcgugucaguuccggucagugugauuuaugauaaggagacuaagacacaugcaacguuguucggcuccguggccugugaacacaucucuagcaccaugucccaguacucacggagcacucgaaguaugcugaaacgcagagacucuacauauggaccccuccagaccccugucggcugcguucuggggcuuguaaauuccagccuguuuguggaggauuguaaguugccacucggacaaucgcugugcgcuuuacccgacacaccuucaacucugaccccagccucuguggguaguguccccggcgaaaugaggcuagcauccaucgcguucaaccacccgauucagguggaucagcucaauagcucuuacuuuaaacugagcauaccuacgaacuucuccuucgggguuacccaagaguauauccagacaacuauucagaaggugaccgucgacuguaaacaguacgugugcaauggauuucaaaagugcgaacagcuuuugcgggaguauggccaguucuguucaaagaucaaccaggcucugcauggugccaaucuccgccaagaugacaguguuagaaaccuguuugcaagcgugaaaucuucccagucaaguccaauuauccccggguucggcggagacuuuaauuuaacacugcuugagccuguaagcauauccacuggcucugggucggccggaagcgcuaucgaagaucuucucuucgacaaggucaccauugccgaucccggcuacaugcaggguuacgacgauugcaugcagcaagggccagcaucagcuagggaccugaucugugcccaguauguggcgggauacaaagugcuaccuccccugauggaugucaacauggaggccgcuuauacguccagucuccugggcucuauugccgguguuggcuggacagcagggcuuagcuccuuugcugccaucccauucgcacagucaauauuuuaccguuugaauggagugggcauuacccaacagguacugucugaaaaccagaaguuaaucgcgaauaaauucaaccaggcccucggggcuaugcaaacuggauuuacaaccacuaaugaggccuuccacaaggugcaggacgcagucaacaacaaugcucaggcccugagcaaguuggcaagugaacuguccaacaccuucggcgccauuagcgcuucuaucggugauauaauccagcgguuggacccgccugagcaagaugcgcagauugaccgacucaucaaugggagacugacaacgcuaaacgccuuuguggcacagcagcugguuaggucagaguccgcugcccucagugcccaacuggcuaaagauaaggugaaugaaugcgucaaagcacagagcaagcgcucgggauucuguggccaggguacccauauugugucuuuuguugugaacgcccccaauggccuuuauuucaugcacgucggguacuauccauccaaccauaucgagguagugagcgcguacggauugugcgacgcugccaaucccacuaacuguauagcaccuguuaauggcuacuuuauuaaaacaaacaauacccggaucguggacgaauggucauauacagggaguucuuucuacgccccagagcccaucacuucccugaacaccaaguaugucgcuccucaggugacguaccaaaauauuagcacaaacuuaccgccaccccuccugggaaacucaaccggcaucgauuuucaggacgagcuugaugaguucuuuaagaauguaaguacuagcauuccuaacuucgguucccugacccagauaaauacaacucuacucgaccugaccuaugaaauguugucucugcaacagguggucaaagcauuaaacgaaagcuacaucgaucucaaggagcuggggaauuauacauacggaggcuacauuccagaagcccccagagacggucaggcguauguuaggaaagauggcgagugggugcuucuguccacguuuuga

SEQ ID NO: 14842 - RNA, 4334 nt, Artificial Sequence
  MERS-CoV/MERS-CoV-Jeddah-human-1__AHE78108.1 spike protein mRNA gc (1-1353)
aggagagucccgcagucggcguccagcggcucugcuuguucgugugugugucguugcaggccuuauucaagcuuaccaugauccacagcguguuccugcucauguuccugcugacccccaccgaguccuacgucgacgugggcccggacagcgugaaguccgccugcaucgaggucgacauccagcagacguucuucgacaagaccuggccccgccccaucgacgugagcaaggccgacgggaucaucuacccccagggccggaccuacuccaacaucaccaucacguaccagggccucuucccguaccagggggaccacggggacauguacguguacagcgcgggccacgccaccggcaccacgccccagaagcuguucgucgccaacuacucccaggacgugaagcaguucgccaacggguucgugguccgcaucggcgccgcggccaacagcaccgggaccgugaucaucucccccagcaccuccgccaccauccggaagaucuaccccgccuucaugcugggcagcuccguggggaacuucagcgacggcaagaugggccgcuucuucaaccacacgcucguccugcugccggacgggugcggcacccuccugcgggcguucuacugcauccuggagccccgcuccgggaaccacugccccgccggcaacagcuacaccuccuucgccaccuaccacacgcccgccaccgacugcagcgacggcaacuacaaccggaacgccucccucaacagcuucaaggaguacuucaaccugcgcaacugcaccuucauguacaccuacaacaucacggaggacgagauccuggagugguucgggaucacccagaccgcgcagggcgugcaccucuucagcucccgguacguggaccuguacgggggcaacauguuccaguucgccacccugccggucuacgacacgaucaaguacuacagcaucaucccccacuccauccgcagcauccaguccgaccggaaggccugggccgccuucuacguguacaagcuccagccccugaccuuccugcucgacuucagcguggacggguacauccgccgggcgaucgacugcggcuucaacgaccugucccagcugcacugcagcuacgaguccuucgacgucgagagcggcguguacuccgugagcuccuucgaggccaagcccagcggguccgucguggagcaggccgagggcguggagugcgacuucagcccgcuccuguccgggaccccgccccaggucuacaacuucaagcgccugguguucaccaacugcaacuacaaccucacgaagcugcugagccucuucuccgucaacgacuucacgugcagccagaucagccccgccgccaucgcguccaacugcuacagcucccugauccuggacuacuucagcuacccccucuccaugaaguccgaccugagcgugagcuccgccggccccaucagccaguucaacuacaagcaguccuucagcaacccgaccugccugauccucgccaccgugccccacaaccugaccaccaucaccaagccccugaaguacuccuacaucaacaagugcagccggcuccuguccgacgaccgcaccgaggucccccagcuggugaacgccaaccaguacagccccugcguguccaucguccccagcacggugugggaggacggggacuacuaccggaagcagcucagcccgcuggagggcggcggguggcugguggccuccggcagcaccgucgcgaugaccgagcagcuccagaugggguucggcaucaccgugcaguacgggaccgacacgaacuccgugugccccaagcuggaguucgccaacgacaccaagaucgccagccagcugggcaacugcgucgaguacucccucuacggcgugagcgggcgcggcguguuccagaacugcaccgccgucggggugcggcagcagcgcuucguguacgacgcguaccagaaccuggucggcuacuacuccgacgacggcaacuacuacugccugcgggccugcgugagcgugcccgucuccgugaucuacgacaaggagaccaagacgcacgccacccuguucgggagcguggccugcgagcacaucuccagcaccaugucccaguacagccgcuccacccgcagcaugcucaagcggcgcgacuccacguacggcccgcugcagacccccgucgggugcgugcugggccucgugaacagcucccuguucgucgaggacugcaagcugccccucgggcagagccugugcgcccugcccgacaccccgagcacccucacgccccgguccgugcgcagcgugcccggcgagaugcggcuggcguccaucgccuucaaccaccccauccaggucgaccagcugaacagcuccuacuucaagcucagcaucccgaccaacuucuccuucggcgugacccaggaguacauccagaccacgauccagaaggugaccgucgacugcaagcaguacgugugcaacggguuccagaagugcgagcagcugcugcgcgaguacggccaguucugcagcaagaucaaccaggcccuccacggggccaaccugcggcaggacgacuccgugcgcaaccuguucgccagcgucaaguccagccaguccagccccaucauccccggcuucgggggcgacuucaaccucacccugcuggagcccguguccaucagcaccggcucccggagcgcgcgcuccgccaucgaggaccuccuguucgacaaggugacgaucgccgacccgggguacaugcagggcuacgacgacugcaugcagcaggggcccgccagcgcccgggaccugaucugcgcgcaguacgucgccggcuacaaggugcucccgccccugauggacgugaacauggaggccgccuacaccagcucccugcucgggagcaucgcgggcgucggcuggaccgccgggcuguccagcuucgccgccauccccuucgcccaguccaucuucuaccgccugaacggcguggggaucacccagcagguccucagcgagaaccagaagcugaucgcgaacaaguucaaccaggcccugggcgccaugcagacgggguucaccaccaccaacgaggccuuccacaaggugcaggacgccgugaacaacaacgcgcaggcccucuccaagcuggccagcgagcuguccaacacguucggcgccaucagcgccuccaucggcgacaucauccagcggcucgacgugcuggagcaggacgcgcagaucgaccgccugaucaacgggcggcucaccacccugaacgccuucgucgcccagcagcuggugcgcagcgaguccgccgcgcucagcgcccagcuggccaaggacaaggugaacgagugcgucaaggcccaguccaagcggagcggcuucugcgggcagggcacccacaucguguccuucgucgugaacgcccccaacggccuguacuucaugcacgugggguacuaccccagcaaccacaucgaggucguguccgcguacggccucugcgacgccgccaaccccacgaacugcaucgccccggugaacggguacuucaucaagaccaacaacacccgcaucgucgacgaguggagcuacaccggcagcuccuucuacgcccccgagcccaucacgagccugaacaccaaguacguggcgccccaggugaccuaccagaacaucuccaccaaccugccgccgccccuccuggggaacagcaccggcaucgacuuccaggacgagcuggacgaguucuucaagaacgucuccacgagcauccccaacuucggcucccucacccagaucaacaccacccugcuggaccucacguacgagaugcugagccugcagcaggucgugaaggcccucaacgaguccuacaucgaccugaaggagcuggggaacuacaccuacuacaacaaguggcccugguacaucuggcucggcuucaucgccgggcugguggcccuggcccucugcguguucuucauccugugcugcaccggcugcgggaccaacugcaugggcaagcugaagugcaaccggugcugcgaccgcuacgaggaguacgaccucgagccccacaaggugcacguccacugaggacuagucccuguucccagagcccacuuuuuuuucuuuuuuugaaauaaaauagccugucuuucagaucucaaaggcucuuuucagagccaccaaaaaaaaaaaaaaaaaaaaaaaaaaaaaaaaaaaaaaaaaaaaaaaaaaaaaaaaaaaaaaaaaaaaaaaaaaaaaaaaaaaaaaaaaaaaaaaaaaaaa

SEQ ID NO: 14843 - RNA, 4334 nt, Artificial Sequence
  MERS-CoV/MERS-CoV-Jeddah-human-1__AHE78108.1 spike protein mRNA gc (1-1353)(V1060P_L1061P)
aggagagucccgcagucggcguccagcggcucugcuuguucgugugugugucguugcaggccuuauucaagcuuaccaugauccacagcguguuccugcucauguuccugcugacccccaccgaguccuacgucgacgugggcccggacagcgugaaguccgccugcaucgaggucgacauccagcagacguucuucgacaagaccuggccccgccccaucgacgugagcaaggccgacgggaucaucuacccccagggccggaccuacuccaacaucaccaucacguaccagggccucuucccguaccagggggaccacggggacauguacguguacagcgcgggccacgccaccggcaccacgccccagaagcuguucgucgccaacuacucccaggacgugaagcaguucgccaacggguucgugguccgcaucggcgccgcggccaacagcaccgggaccgugaucaucucccccagcaccuccgccaccauccggaagaucuaccccgccuucaugcugggcagcuccguggggaacuucagcgacggcaagaugggccgcuucuucaaccacacgcucguccugcugccggacgggugcggcacccuccugcgggcguucuacugcauccuggagccccgcuccgggaaccacugccccgccggcaacagcuacaccuccuucgccaccuaccacacgcccgccaccgacugcagcgacggcaacuacaaccggaacgccucccucaacagcuucaaggaguacuucaaccugcgcaacugcaccuucauguacaccuacaacaucacggaggacgagauccuggagugguucgggaucacccagaccgcgcagggcgugcaccucuucagcucccgguacguggaccuguacgggggcaacauguuccaguucgccacccugccggucuacgacacgaucaaguacuacagcaucaucccccacuccauccgcagcauccaguccgaccggaaggccugggccgccuucuacguguacaagcuccagccccugaccuuccugcucgacuucagcguggacggguacauccgccgggcgaucgacugcggcuucaacgaccugucccagcugcacugcagcuacgaguccuucgacgucgagagcggcguguacuccgugagcuccuucgaggccaagcccagcggguccgucguggagcaggccgagggcguggagugcgacuucagcccgcuccuguccgggaccccgccccaggucuacaacuucaagcgccugguguucaccaacugcaacuacaaccucacgaagcugcugagccucuucuccgucaacgacuucacgugcagccagaucagccccgccgccaucgcguccaacugcuacagcucccugauccuggacuacuucagcuacccccucuccaugaaguccgaccugagcgugagcuccgccggccccaucagccaguucaacuacaagcaguccuucagcaacccgaccugccugauccucgccaccgugccccacaaccugaccaccaucaccaagccccugaaguacuccuacaucaacaagugcagccggcuccuguccgacgaccgcaccgaggucccccagcuggugaacgccaaccaguacagccccugcguguccaucguccccagcacggugugggaggacggggacuacuaccggaagcagcucagcccgcuggagggcggcggguggcugguggccuccggcagcaccgucgcgaugaccgagcagcuccagaugggguucggcaucaccgugcaguacgggaccgacacgaacuccgugugccccaagcuggaguucgccaacgacaccaagaucgccagccagcugggcaacugcgucgaguacucccucuacggcgugagcgggcgcggcguguuccagaacugcaccgccgucggggugcggcagcagcgcuucguguacgacgcguaccagaaccuggucggcuacuacuccgacgacggcaacuacuacugccugcgggccugcgugagcgugcccgucuccgugaucuacgacaaggagaccaagacgcacgccacccuguucgggagcguggccugcgagcacaucuccagcaccaugucccaguacagccgcuccacccgcagcaugcucaagcggcgcgacuccacguacggcccgcugcagacccccgucgggugcgugcugggccucgugaacagcucccuguucgucgaggacugcaagcugccccucgggcagagccugugcgcccugcccgacaccccgagcacccucacgccccgguccgugcgcagcgugcccggcgagaugcggcuggcguccaucgccuucaaccaccccauccaggucgaccagcugaacagcuccuacuucaagcucagcaucccgaccaacuucuccuucggcgugacccaggaguacauccagaccacgauccagaaggugaccgucgacugcaagcaguacgugugcaacggguuccagaagugcgagcagcugcugcgcgaguacggccaguucugcagcaagaucaaccaggcccuccacggggccaaccugcggcaggacgacuccgugcgcaaccuguucgccagcgucaaguccagccaguccagccccaucauccccggcuucgggggcgacuucaaccucacccugcuggagcccguguccaucagcaccggcucccggagcgcgcgcuccgccaucgaggaccuccuguucgacaaggugacgaucgccgacccgggguacaugcagggcuacgacgacugcaugcagcaggggcccgccagcgcccgggaccugaucugcgcgcaguacgucgccggcuacaaggugcucccgccccugauggacgugaacauggaggccgccuacaccagcucccugcucgggagcaucgcgggcgucggcuggaccgccgggcuguccagcuucgccgccauccccuucgcccaguccaucuucuaccgccugaacggcguggggaucacccagcagguccucagcgagaaccagaagcugaucgcgaacaaguucaaccaggcccugggcgccaugcagacgggguucaccaccaccaacgaggccuuccacaaggugcaggacgccgugaacaacaacgcgcaggcccucuccaagcuggccagcgagcuguccaacacguucggcgccaucagcgccuccaucggcgacaucauccagcggcucgacccgcccgagcaggacgcgcagaucgaccgccugaucaacgggcggcucaccacccugaacgccuucgucgcccagcagcuggugcgcagcgaguccgccgcgcucagcgcccagcuggccaaggacaaggugaacgagugcgucaaggcccaguccaagcggagcggcuucugcgggcagggcacccacaucguguccuucgucgugaacgcccccaacggccuguacuucaugcacgugggguacuaccccagcaaccacaucgaggucguguccgcguacggccucugcgacgccgccaaccccacgaacugcaucgccccggugaacggguacuucaucaagaccaacaacacccgcaucgucgacgaguggagcuacaccggcagcuccuucuacgcccccgagcccaucacgagccugaacaccaaguacguggcgccccaggugaccuaccagaacaucuccaccaaccugccgccgccccuccuggggaacagcaccggcaucgacuuccaggacgagcuggacgaguucuucaagaacgucuccacgagcauccccaacuucggcucccucacccagaucaacaccacccugcuggaccucacguacgagaugcugagccugcagcaggucgugaaggcccucaacgaguccuacaucgaccugaaggagcuggggaacuacaccuacuacaacaaguggcccugguacaucuggcucggcuucaucgccgggcugguggcccuggcccucugcguguucuucauccugugcugcaccggcugcgggaccaacugcaugggcaagcugaagugcaaccggugcugcgaccgcuacgaggaguacgaccucgagccccacaaggugcacguccacugaggacuagucccuguucccagagcccacuuuuuuuucuuuuuuugaaauaaaauagccugucuuucagaucucaaaggcucuuuucagagccaccaaaaaaaaaaaaaaaaaaaaaaaaaaaaaaaaaaaaaaaaaaaaaaaaaaaaaaaaaaaaaaaaaaaaaaaaaaaaaaaaaaaaaaaaaaaaaaaaaaaaa

SEQ ID NO: 14844 - RNA, 4334 nt, Artificial Sequence
  MERS-CoV/Al-Hasa_4_2013__AGN70929.1 spike protein mRNA gc (1-1353)
aggagagucccgcagucggcguccagcggcucugcuuguucgugugugugucguugcaggccuuauucaagcuuaccaugauccacagcguguuccugcucauguuccugcugacccccaccgaguccuacgucgacgugggcccggacagcgugaaguccgccugcaucgaggucgacauccagcagacguucuucgacaagaccuggccccgccccaucgacgugagcaaggccgacgggaucaucuacccccagggccggaccuacuccaacaucaccaucacguaccagggccucuucccguaccagggcgaccacggggacauguacguguacagcgcgggccacgccaccggcaccacgccccagaagcuguucgucgccaacuacucccaggacgugaagcaguucgccaacggguucgugguccgcaucggcgccgcggccaacagcaccgggaccgugaucaucucccccagcaccuccgccaccauccggaagaucuaccccgccuucaugcugggcagcuccguggggaacuucagcgacggcaagaugggccgcuucuucaaccacacgcucguccugcugccggacgggugcggcacccuccugcgggcguucuacugcauccuggagccccgcuccgggaaccacugccccgccggcaacagcuacaccuccuucgccaccuaccacacgcccgccaccgacugcagcgacggcaacuacaaccggaacgccucccucaacagcuucaaggaguacuucaaccugcgcaacugcaccuucauguacaccuacaacaucacggaggacgagauccuggagugguucgggaucacccagaccgcgcagggcgugcaccucuucagcucccgguacguggaccuguacgggggcaacauguuccaguucgccacccugccggucuacgacacgaucaaguacuacagcaucaucccccacuccauccgcagcauccaguccgaccggaaggccugggccgccuucuacguguacaagcuccagccccugaccuuccugcucgacuucagcguggacggguacauccgccgggcgaucgacugcggcuucaacgaccugucccagcugcacugcagcuacgaguccuucgacgucgagagcggcguguacuccgugagcuccuucgaggccaagcccagcggguccgucguggagcaggccgagggcguggagugcgacuucagcccgcuccuguccgggaccccgccccaggucuacaacuucaagcgccugguguucaccaacugcaacuacaaccucacgaagcugcugagccucuucuccgucaacgacuucacgugcagccagaucagccccgccgccaucgcguccaacugcuacagcucccugauccuggacuacuucagcuacccccucuccaugaaguccgaccugagcgugagcuccgccgggcccaucagccaguucaacuacaagcaguccuucagcaacccgaccugccugauccucgccaccgugccccacaaccugaccaccaucaccaagccccugaaguacuccuacaucaacaagugcagccggcuccuguccgacgaccgcaccgaggucccccagcuggugaacgccaaccaguacagccccugcguguccaucguccccagcacggugugggaggacggggacuacuaccggaagcagcucagcccgcuggagggcggcggguggcugguggccuccggcagcaccgucgcgaugaccgagcagcuccagaugggguucggcaucaccgugcaguacgggaccgacacgaacuccgugugccccaagcuggaguucgccaacgacaccaagaucgccagccagcugggcaacugcgucgaguacucccuguacggcgugagcgggcgcggcguguuccagaacugcaccgccgucggggugcggcagcagcgcuucguguacgacgcguaccagaaccucgucggcuacuacuccgacgacggcaacuacuacugccugcgggccugcgugagcgugcccgucuccgugaucuacgacaaggagaccaagacgcacgccacccuguucgggagcguggccugcgagcacaucuccagcaccaugucccaguacagccgcuccacccgcagcaugcucaagcggcgcgacuccacguacggcccgcugcagacccccgucgggugcgugcugggccucgugaacagcucccuguucgucgaggacugcaagcugccccucgggcagagccugugcgcccugcccgacaccccgagcacccucacgccccgguccgugcgcagcgugcccggcgagaugcggcuggcguccaucgccuucaaccaccccauccaggucgaccagcugaacagcuccuacuucaagcucagcaucccgaccaacuucuccuucggcgugacccaggaguacauccagaccacgauccagaaggugaccgucgacugcaagcaguacgugugcaacggguuccagaagugcgagcagcugcugcgcgaguacggccaguucugcagcaagaucaaccaggcccuccacggggccaaccugcggcaggacgacuccgugcgcaaccuguucgccagcgucaaguccagccaguccagccccaucauccccggcuucgggggcgacuucaaccucacccugcuggagcccguguccaucagcaccggcucccggagcgcgcgcuccgccaucgaggaccuccuguucgacaaggugacgaucgccgacccgggguacaugcagggcuacgacgacugcaugcagcaggggcccgccagcgcccgggaccugaucugcgcgcaguacgucgccggcuacaaggugcucccgccccugauggacgugaacauggaggccgccuacaccagcucccugcucgggagcaucgcgggcgucggcuggaccgccgggcuguccagcuucgccgccauccccuucgcccaguccaucuucuaccgccugaacggcguggggaucacccagcagguccucagcgagaaccagaagcugaucgcgaacaaguucaaccaggcccugggcgccaugcagacgggguucaccaccaccaacgaggccuuccggaaggugcaggacgccgugaacaacaacgcgcaggcccucuccaagcuggccagcgagcuguccaacacguucggcgccaucagcgccuccaucggcgacaucauccagcgccucgacgugcuggagcaggacgcgcagaucgaccggcugaucaacgggcgccucaccacccugaacgccuucgucgcccagcagcuggugcggagcgaguccgccgcgcucagcgcccagcuggccaaggacaaggugaacgagugcgucaaggcccaguccaagcgcagcggcuucugcgggcagggcacccacaucguguccuucgucgugaacgcccccaacggccuguacuucaugcacgugggguacuaccccagcaaccacaucgaggucguguccgcguacggccucugcgacgccgccaaccccacgaacugcaucgccccggugaacggguacuucaucaagaccaacaacacccggaucgucgacgaguggagcuacaccggcagcuccuucuacgcccccgagcccaucacgagccugaacaccaaguacguggcgccccacgugaccuaccagaacaucuccaccaaccugccgccgccccuccuggggaacagcaccggcaucgacuuccaggacgagcuggacgaguucuucaagaacgucuccacgagcauccccaacuucggcucccucacccagaucaacaccacccugcuggaccucacguacgagaugcugagccugcagcaggucgugaaggcccucaacgaguccuacaucgaccugaaggagcuggggaacuacaccuacuacaacaaguggcccugguacaucuggcucggcuucaucgccgggcugguggcccuggcccucugcguguucuucauccugugcugcaccggcugcgggaccaacugcaugggcaagcugaagugcaaccgcugcugcgaccgcuacgaggaguacgaccucgagccccacaaggugcacguccacugaggacuagucccuguucccagagcccacuuuuuuuucuuuuuuugaaauaaaauagccugucuuucagaucucaaaggcucuuuucagagccaccaaaaaaaaaaaaaaaaaaaaaaaaaaaaaaaaaaaaaaaaaaaaaaaaaaaaaaaaaaaaaaaaaaaaaaaaaaaaaaaaaaaaaaaaaaaaaaaaaaaaa

SEQ ID NO: 14845 - RNA, 4334 nt, Artificial Sequence
  MERS-CoV/Al-Hasa_4_2013__AGN70929.1 spike protein mRNA gc (1-1353)(V1060P_L1061P)
aggagagucccgcagucggcguccagcggcucugcuuguucgugugugugucguugcaggccuuauucaagcuuaccaugauccacagcguguuccugcucauguuccugcugacccccaccgaguccuacgucgacgugggcccggacagcgugaaguccgccugcaucgaggucgacauccagcagacguucuucgacaagaccuggccccgccccaucgacgugagcaaggccgacgggaucaucuacccccagggccggaccuacuccaacaucaccaucacguaccagggccucuucccguaccagggcgaccacggggacauguacguguacagcgcgggccacgccaccggcaccacgccccagaagcuguucgucgccaacuacucccaggacgugaagcaguucgccaacggguucgugguccgcaucggcgccgcggccaacagcaccgggaccgugaucaucucccccagcaccuccgccaccauccggaagaucuaccccgccuucaugcugggcagcuccguggggaacuucagcgacggcaagaugggccgcuucuucaaccacacgcucguccugcugccggacgggugcggcacccuccugcgggcguucuacugcauccuggagccccgcuccgggaaccacugccccgccggcaacagcuacaccuccuucgccaccuaccacacgcccgccaccgacugcagcgacggcaacuacaaccggaacgccucccucaacagcuucaaggaguacuucaaccugcgcaacugcaccuucauguacaccuacaacaucacggaggacgagauccuggagugguucgggaucacccagaccgcgcagggcgugcaccucuucagcucccgguacguggaccuguacgggggcaacauguuccaguucgccacccugccggucuacgacacgaucaaguacuacagcaucaucccccacuccauccgcagcauccaguccgaccggaaggccugggccgccuucuacguguacaagcuccagccccugaccuuccugcucgacuucagcguggacggguacauccgccgggcgaucgacugcggcuucaacgaccugucccagcugcacugcagcuacgaguccuucgacgucgagagcggcguguacuccgugagcuccuucgaggccaagcccagcggguccgucguggagcaggccgagggcguggagugcgacuucagcccgcuccuguccgggaccccgccccaggucuacaacuucaagcgccugguguucaccaacugcaacuacaaccucacgaagcugcugagccucuucuccgucaacgacuucacgugcagccagaucagccccgccgccaucgcguccaacugcuacagcucccugauccuggacuacuucagcuacccccucuccaugaaguccgaccugagcgugagcuccgccgggcccaucagccaguucaacuacaagcaguccuucagcaacccgaccugccugauccucgccaccgugccccacaaccugaccaccaucaccaagccccugaaguacuccuacaucaacaagugcagccggcuccuguccgacgaccgcaccgaggucccccagcuggugaacgccaaccaguacagccccugcguguccaucguccccagcacggugugggaggacggggacuacuaccggaagcagcucagcccgcuggagggcggcggguggcugguggccuccggcagcaccgucgcgaugaccgagcagcuccagaugggguucggcaucaccgugcaguacgggaccgacacgaacuccgugugccccaagcuggaguucgccaacgacaccaagaucgccagccagcugggcaacugcgucgaguacucccuguacggcgugagcgggcgcggcguguuccagaacugcaccgccgucggggugcggcagcagcgcuucguguacgacgcguaccagaaccucgucggcuacuacuccgacgacggcaacuacuacugccugcgggccugcgugagcgugcccgucuccgugaucuacgacaaggagaccaagacgcacgccacccuguucgggagcguggccugcgagcacaucuccagcaccaugucccaguacagccgcuccacccgcagcaugcucaagcggcgcgacuccacguacggcccgcugcagacccccgucgggugcgugcugggccucgugaacagcucccuguucgucgaggacugcaagcugccccucgggcagagccugugcgcccugcccgacaccccgagcacccucacgccccgguccgugcgcagcgugcccggcgagaugcggcuggcguccaucgccuucaaccaccccauccaggucgaccagcugaacagcuccuacuucaagcucagcaucccgaccaacuucuccuucggcgugacccaggaguacauccagaccacgauccagaaggugaccgucgacugcaagcaguacgugugcaacggguuccagaagugcgagcagcugcugcgcgaguacggccaguucugcagcaagaucaaccaggcccuccacggggccaaccugcggcaggacgacuccgugcgcaaccuguucgccagcgucaaguccagccaguccagccccaucauccccggcuucgggggcgacuucaaccucacccugcuggagcccguguccaucagcaccggcucccggagcgcgcgcuccgccaucgaggaccuccuguucgacaaggugacgaucgccgacccgggguacaugcagggcuacgacgacugcaugcagcaggggcccgccagcgcccgggaccugaucugcgcgcaguacgucgccggcuacaaggugcucccgccccugauggacgugaacauggaggccgccuacaccagcucccugcucgggagcaucgcgggcgucggcuggaccgccgggcuguccagcuucgccgccauccccuucgcccaguccaucuucuaccgccugaacggcguggggaucacccagcagguccucagcgagaaccagaagcugaucgcgaacaaguucaaccaggcccugggcgccaugcagacgggguucaccaccaccaacgaggccuuccggaaggugcaggacgccgugaacaacaacgcgcaggcccucuccaagcuggccagcgagcuguccaacacguucggcgccaucagcgccuccaucggcgacaucauccagcgccucgacccgcccgagcaggacgcgcagaucgaccggcugaucaacgggcgccugaccacccucaacgccuucguggcccagcagcugguccggagcgaguccgccgcgcugagcgcccagcucgccaaggacaaggugaacgagugcgugaaggcccaguccaagcgcagcggcuucugcgggcagggcacccacaucgucuccuucguggucaacgcccccaacggccuguacuucaugcacgugggguacuaccccagcaaccacaucgagguggucuccgcguacggccugugcgacgccgccaaccccacgaacugcaucgcccccgugaacggguacuucaucaagaccaacaacacccggaucguggacgaguggagcuacaccggcagcuccuucuacgcccccgagccgaucacgagccucaacaccaaguacgucgcgccccacgugaccuaccagaacaucuccaccaaccugcccccgccccugcucgggaacagcaccggcaucgacuuccaggacgagcuggacgaguucuucaagaacguguccacgagcauccccaacuucggcucccugacccagaucaacaccacccuccuggaccugacguacgagaugcucagccugcagcaggucgugaaggcccugaacgaguccuacaucgaccucaaggagcuggggaacuacaccuacuacaacaaguggcccugguacaucuggcugggcuucaucgccgggcucguggcccuggcccugugcgucuucuucauccucugcugcaccggcugcgggaccaacugcaugggcaagcugaagugcaaccgcugcugcgaccgcuacgaggaguacgaccuggagccgcacaaggugcacgugcacugaggacuagucccuguucccagagcccacuuuuuuuucuuuuuuugaaauaaaauagccugucuuucagaucucaaaggcucuuuucagagccaccaaaaaaaaaaaaaaaaaaaaaaaaaaaaaaaaaaaaaaaaaaaaaaaaaaaaaaaaaaaaaaaaaaaaaaaaaaaaaaaaaaaaaaaaaaaaaaaaaaaaa

SEQ ID NO: 14846 - RNA, 4334 nt, Artificial Sequence
  MERS-CoV/Riyadh_14_2013__AHI48572.1 spike protein mRNA gc (1-1353)
aggagagucccgcagucggcguccagcggcucugcuuguucgugugugugucguugcaggccuuauucaagcuuaccaugauccacagcguguuccugcucauguuccugcugacccccaccgaguccuacgucgacgugggcccggacagcgugaaguccgccugcaucgaggucgacauccagcagacguucuucgacaagaccuggccccgccccaucgacgugagcaaggccgacgggaucaucuacccccagggccggaccuacuccaacaucaccaucacguaccagggccucuucccguaccagggcgaccacggggacauguacguguacagcgcgggccacgccaccggcaccacgccccagaagcuguucgucgccaacuacucccaggacgugaagcaguucgccaacggguucgugguccgcaucggcgccgcggccaacagcaccgggaccgugaucaucucccccagcaccuccgccaccauccggaagaucuaccccgccuucaugcugggcagcuccguggggaacuucagcgacggcaagaugggccgcuucuucaaccacacgcucguccugcugccggacgggugcggcacccuccugcgggcguucuacugcauccuggagccccgcuccgggaaccacugccccgccggcaacagcuacaccuccuucgccaccuaccacacgcccgccaccgacugcagcgacggcaacuacaaccggaacgccucccucaacagcuucaaggaguacuucaaccugcgcaacugcaccuucauguacaccuacaacaucacggaggacgagauccuggagugguucgggaucacccagaccgcgcagggcgugcaccucuucagcucccgguacguggaccuguacgggggcaacauguuccaguucgccacccugccggucuacgacacgaucaaguacuacagcaucaucccccacuccauccgcagcauccaguccgaccggaaggccugggccgccuucuacguguacaagcuccagccccugaccuuccugcucgacuucagcguggacggguacauccgccgggcgaucgacugcggcuucaacgaccugucccagcugcacugcagcuacgaguccuucgacgucgagagcggcguguacuccgugagcuccuucgaggccaagcccagcggguccgucguggagcaggccgagggcguggagugcgacuucagcccgcuccuguccgggaccccgccccaggucuacaacuucaagcgccugguguucaccaacugcaacuacaaccucacgaagcugcugagccucuucuccgucaacgacuucacgugcagccagaucagccccgccgccaucgcguccaacugcuacagcucccugauccuggacuacuucagcuacccccucuccaugaaguccgaccugagcgugagcuccgccgggcccaucagccaguucaacuacaagcaguccuucagcaacccgaccugccugauccucgccaccgugccccacaaccugaccaccaucaccaagccccugaaguacuccuacaucaacaagugcagccggcuccuguccgacgaccgcaccgaggucccccagcuggugaacgccaaccaguacagccccugcguguccaucguccccagcacggugugggaggacggggacuacuaccggaagcagcucagcccgcuggagggcggcggguggcugguggccuccggcagcaccgucgcgaugaccgagcagcuccagaugggguucggcaucaccgugcaguacgggaccgacacgaacuccgugugccccaagcuggaguucgccaacgacaccaagaucgccagccagcugggcaacugcgucgaguacucccuguacggcgugagcgggcgcggcguguuccagaacugcaccgccgucggggugcggcagcagcgcuucguguacgacgcguaccagaaccucgucggcuacuacuccgacgacggcaacuacuacugccugcgggccugcgugagcgugcccgucuccgugaucuacgacaaggagaccaagacgcacgccacccuguucgggagcguggccugcgagcacaucuccagcaccaugucccaguacagccgcuccacccgcagcaugcucaagcggcgcgacuccacguacggcccgcugcagacccccgucgggugcgugcugggccucgugaacagcucccuguucgucgaggacugcaagcugccccucgggcagagccugugcgcccugcccgacaccccgagcacccucacgccccgguccgugcgcagcgugcccggcgagaugcggcuggcguccaucgccuucaaccaccccauccaggucgaccagcugaacagcuccuacuucaagcucagcaucccgaccaacuucuccuucggcgugacccaggaguacauccagaccacgauccagaaggugaccgucgacugcaagcaguacgugugcaacggguuccagaagugcgagcagcugcugcgcgaguacggccaguucugcagcaagaucaaccaggcccuccacggggccaaccugcggcaggacgacuccgugcgcaaccuguucgccagcgucaaguccagccaguccagccccaucauccccggcuucgggggcgacuucaaccucacccugcuggagcccguguccaucagcaccggcucccggagcgcgcgcuccgccaucgaggaccuccuguucgacaaggugacgaucgccgacccgggguacaugcagggcuacgacgacugcaugcagcaggggcccgccagcgcccgggaccugaucugcgcgcaguacgucgccggcuacaaggugcucccgccccugauggacgugaacauggaggccgccuacaccagcucccugcucgggagcaucgcgggcgucggcuggaccgccgggcuguccagcuucgccgccauccccuucgcccaguccaucuucuaccgccugaacggcguggggaucacccagcagguccucagcgagaaccagaagcugaucgcgaacaaguucaaccaggcccugggcgccaugcagacgggguucaccaccaccaacgaggccuuccggaaggugcaggacgccgugaacaacaacgcgcaggcccucuccaagcuggccagcgagcuguccaacacguucggcgccaucagcgccuccaucggcgacaucauccagcgccucgacgugcuggagcaggacgcgcagaucgaccggcugaucaacgggcgccucaccacccugaacgccuucgucgcccagcagcuggugcggagcgaguccgccgcgcucagcgcccagcuggccaaggacaaggugaacgagugcgucaaggcccaguccaagcgcagcggcuucugcgggcagggcacccacaucguguccuucgucgugaacgcccccaacggccuguacuucaugcacgugggguacuaccccagcaaccacaucgaggucguguccgcguacggccucugcgacgccgccaaccccacgaacugcaucgccccggugaacggguacuucaucaagaccaacaacacccggaucgucgacgaguggagcuacaccggcagcuccuucuacgcccccgagcccaucacgagccugaacaccaaguacguggcgccccaggugaccuaccagaacaucuccaccaaccugccgccgccccuccuggggaacagcaccggcaucgacuuccaggacgagcuggacgaguucuucaagaacgucuccacgagcauccccaacuucggcucccucacccagaucaacaccacccugcuggaccucacguacgagaugcugagccugcagcaggucgugaaggcccucaacgaguccuacaucgaccugaaggagcuggggaacuacaccuacuacaacaaguggcccugguacaucuggcucggcuucaucgccgggcugguggcccuggcccucugcguguucuucauccugugcugcaccggcugcgggaccaacugcaugggcaagcugaagugcaaccgcugcugcgaccgcuacgaggaguacgaccucgagccccacaaggugcacguccacugaggacuagucccuguucccagagcccacuuuuuuuucuuuuuuugaaauaaaauagccugucuuucagaucucaaaggcucuuuucagagccaccaaaaaaaaaaaaaaaaaaaaaaaaaaaaaaaaaaaaaaaaaaaaaaaaaaaaaaaaaaaaaaaaaaaaaaaaaaaaaaaaaaaaaaaaaaaaaaaaaaaaa

SEQ ID NO: 14847 - RNA, 4334 nt, Artificial Sequence
  MERS-CoV/Riyadh_14_2013__AHI48572.1 spike protein mRNA gc (1-1353)(V1060P_L1061P)
aggagagucccgcagucggcguccagcggcucugcuuguucgugugugugucguugcaggccuuauucaagcuuaccaugauccacagcguguuccugcucauguuccugcugacccccaccgaguccuacgucgacgugggcccggacagcgugaaguccgccugcaucgaggucgacauccagcagacguucuucgacaagaccuggccccgccccaucgacgugagcaaggccgacgggaucaucuacccccagggccggaccuacuccaacaucaccaucacguaccagggccucuucccguaccagggcgaccacggggacauguacguguacagcgcgggccacgccaccggcaccacgccccagaagcuguucgucgccaacuacucccaggacgugaagcaguucgccaacggguucgugguccgcaucggcgccgcggccaacagcaccgggaccgugaucaucucccccagcaccuccgccaccauccggaagaucuaccccgccuucaugcugggcagcuccguggggaacuucagcgacggcaagaugggccgcuucuucaaccacacgcucguccugcugccggacgggugcggcacccuccugcgggcguucuacugcauccuggagccccgcuccgggaaccacugccccgccggcaacagcuacaccuccuucgccaccuaccacacgcccgccaccgacugcagcgacggcaacuacaaccggaacgccucccucaacagcuucaaggaguacuucaaccugcgcaacugcaccuucauguacaccuacaacaucacggaggacgagauccuggagugguucgggaucacccagaccgcgcagggcgugcaccucuucagcucccgguacguggaccuguacgggggcaacauguuccaguucgccacccugccggucuacgacacgaucaaguacuacagcaucaucccccacuccauccgcagcauccaguccgaccggaaggccugggccgccuucuacguguacaagcuccagccccugaccuuccugcucgacuucagcguggacggguacauccgccgggcgaucgacugcggcuucaacgaccugucccagcugcacugcagcuacgaguccuucgacgucgagagcggcguguacuccgugagcuccuucgaggccaagcccagcggguccgucguggagcaggccgagggcguggagugcgacuucagcccgcuccuguccgggaccccgccccaggucuacaacuucaagcgccugguguucaccaacugcaacuacaaccucacgaagcugcugagccucuucuccgucaacgacuucacgugcagccagaucagccccgccgccaucgcguccaacugcuacagcucccugauccuggacuacuucagcuacccccucuccaugaaguccgaccugagcgugagcuccgccgggcccaucagccaguucaacuacaagcaguccuucagcaacccgaccugccugauccucgccaccgugccccacaaccugaccaccaucaccaagccccugaaguacuccuacaucaacaagugcagccggcuccuguccgacgaccgcaccgaggucccccagcuggugaacgccaaccaguacagccccugcguguccaucguccccagcacggugugggaggacggggacuacuaccggaagcagcucagcccgcuggagggcggcggguggcugguggccuccggcagcaccgucgcgaugaccgagcagcuccagaugggguucggcaucaccgugcaguacgggaccgacacgaacuccgugugccccaagcuggaguucgccaacgacaccaagaucgccagccagcugggcaacugcgucgaguacucccuguacggcgugagcgggcgcggcguguuccagaacugcaccgccgucggggugcggcagcagcgcuucguguacgacgcguaccagaaccucgucggcuacuacuccgacgacggcaacuacuacugccugcgggccugcgugagcgugcccgucuccgugaucuacgacaaggagaccaagacgcacgccacccuguucgggagcguggccugcgagcacaucuccagcaccaugucccaguacagccgcuccacccgcagcaugcucaagcggcgcgacuccacguacggcccgcugcagacccccgucgggugcgugcugggccucgugaacagcucccuguucgucgaggacugcaagcugccccucgggcagagccugugcgcccugcccgacaccccgagcacccucacgccccgguccgugcgcagcgugcccggcgagaugcggcuggcguccaucgccuucaaccaccccauccaggucgaccagcugaacagcuccuacuucaagcucagcaucccgaccaacuucuccuucggcgugacccaggaguacauccagaccacgauccagaaggugaccgucgacugcaagcaguacgugugcaacggguuccagaagugcgagcagcugcugcgcgaguacggccaguucugcagcaagaucaaccaggcccuccacggggccaaccugcggcaggacgacuccgugcgcaaccuguucgccagcgucaaguccagccaguccagccccaucauccccggcuucgggggcgacuucaaccucacccugcuggagcccguguccaucagcaccggcucccggagcgcgcgcuccgccaucgaggaccuccuguucgacaaggugacgaucgccgacccgggguacaugcagggcuacgacgacugcaugcagcaggggcccgccagcgcccgggaccugaucugcgcgcaguacgucgccggcuacaaggugcucccgccccugauggacgugaacauggaggccgccuacaccagcucccugcucgggagcaucgcgggcgucggcuggaccgccgggcuguccagcuucgccgccauccccuucgcccaguccaucuucuaccgccugaacggcguggggaucacccagcagguccucagcgagaaccagaagcugaucgcgaacaaguucaaccaggcccugggcgccaugcagacgggguucaccaccaccaacgaggccuuccggaaggugcaggacgccgugaacaacaacgcgcaggcccucuccaagcuggccagcgagcuguccaacacguucggcgccaucagcgccuccaucggcgacaucauccagcgccucgacccgcccgagcaggacgcgcagaucgaccggcugaucaacgggcgccugaccacccucaacgccuucguggcccagcagcugguccggagcgaguccgccgcgcugagcgcccagcucgccaaggacaaggugaacgagugcgugaaggcccaguccaagcgcagcggcuucugcgggcagggcacccacaucgucuccuucguggucaacgcccccaacggccuguacuucaugcacgugggguacuaccccagcaaccacaucgagguggucuccgcguacggccugugcgacgccgccaaccccacgaacugcaucgcccccgugaacggguacuucaucaagaccaacaacacccggaucguggacgaguggagcuacaccggcagcuccuucuacgcccccgagccgaucacgagccucaacaccaaguacgucgcgccccaggugaccuaccagaacaucuccaccaaccugcccccgccccugcucgggaacagcaccggcaucgacuuccaggacgagcuggacgaguucuucaagaacguguccacgagcauccccaacuucggcucccugacccagaucaacaccacccuccuggaccugacguacgagaugcucagccugcagcaggucgugaaggcccugaacgaguccuacaucgaccucaaggagcuggggaacuacaccuacuacaacaaguggcccugguacaucuggcugggcuucaucgccgggcucguggcccuggcccugugcgucuucuucauccucugcugcaccggcugcgggaccaacugcaugggcaagcugaagugcaaccgcugcugcgaccgcuacgaggaguacgaccuggagccgcacaaggugcacgugcacugaggacuagucccuguucccagagcccacuuuuuuuucuuuuuuugaaauaaaauagccugucuuucagaucucaaaggcucuuuucagagccaccaaaaaaaaaaaaaaaaaaaaaaaaaaaaaaaaaaaaaaaaaaaaaaaaaaaaaaaaaaaaaaaaaaaaaaaaaaaaaaaaaaaaaaaaaaaaaaaaaaaaa

SEQ ID NO: 14848 - RNA, 4334 nt, Artificial Sequence
  MERS-CoV/Riyadh_14_2013__AHI48572.1 spike protein mRNA gc (1-1353)(R1020Q)
aggagagucccgcagucggcguccagcggcucugcuuguucgugugugugucguugcaggccuuauucaagcuuaccaugauccacagcguguuccugcucauguuccugcugacccccaccgaguccuacgucgacgugggcccggacagcgugaaguccgccugcaucgaggucgacauccagcagacguucuucgacaagaccuggccccgccccaucgacgugagcaaggccgacgggaucaucuacccccagggccggaccuacuccaacaucaccaucacguaccagggccucuucccguaccagggcgaccacggggacauguacguguacagcgcgggccacgccaccggcaccacgccccagaagcuguucgucgccaacuacucccaggacgugaagcaguucgccaacggguucgugguccgcaucggcgccgcggccaacagcaccgggaccgugaucaucucccccagcaccuccgccaccauccggaagaucuaccccgccuucaugcugggcagcuccguggggaacuucagcgacggcaagaugggccgcuucuucaaccacacgcucguccugcugccggacgggugcggcacccuccugcgggcguucuacugcauccuggagccccgcuccgggaaccacugccccgccggcaacagcuacaccuccuucgccaccuaccacacgcccgccaccgacugcagcgacggcaacuacaaccggaacgccucccucaacagcuucaaggaguacuucaaccugcgcaacugcaccuucauguacaccuacaacaucacggaggacgagauccuggagugguucgggaucacccagaccgcgcagggcgugcaccucuucagcucccgguacguggaccuguacgggggcaacauguuccaguucgccacccugccggucuacgacacgaucaaguacuacagcaucaucccccacuccauccgcagcauccaguccgaccggaaggccugggccgccuucuacguguacaagcuccagccccugaccuuccugcucgacuucagcguggacggguacauccgccgggcgaucgacugcggcuucaacgaccugucccagcugcacugcagcuacgaguccuucgacgucgagagcggcguguacuccgugagcuccuucgaggccaagcccagcggguccgucguggagcaggccgagggcguggagugcgacuucagcccgcuccuguccgggaccccgccccaggucuacaacuucaagcgccugguguucaccaacugcaacuacaaccucacgaagcugcugagccucuucuccgucaacgacuucacgugcagccagaucagccccgccgccaucgcguccaacugcuacagcucccugauccuggacuacuucagcuacccccucuccaugaaguccgaccugagcgugagcuccgccgggcccaucagccaguucaacuacaagcaguccuucagcaacccgaccugccugauccucgccaccgugccccacaaccugaccaccaucaccaagccccugaaguacuccuacaucaacaagugcagccggcuccuguccgacgaccgcaccgaggucccccagcuggugaacgccaaccaguacagccccugcguguccaucguccccagcacggugugggaggacggggacuacuaccggaagcagcucagcccgcuggagggcggcggguggcugguggccuccggcagcaccgucgcgaugaccgagcagcuccagaugggguucggcaucaccgugcaguacgggaccgacacgaacuccgugugccccaagcuggaguucgccaacgacaccaagaucgccagccagcugggcaacugcgucgaguacucccuguacggcgugagcgggcgcggcguguuccagaacugcaccgccgucggggugcggcagcagcgcuucguguacgacgcguaccagaaccucgucggcuacuacuccgacgacggcaacuacuacugccugcgggccugcgugagcgugcccgucuccgugaucuacgacaaggagaccaagacgcacgccacccuguucgggagcguggccugcgagcacaucuccagcaccaugucccaguacagccgcuccacccgcagcaugcucaagcggcgcgacuccacguacggcccgcugcagacccccgucgggugcgugcugggccucgugaacagcucccuguucgucgaggacugcaagcugccccucgggcagagccugugcgcccugcccgacaccccgagcacccucacgccccgguccgugcgcagcgugcccggcgagaugcggcuggcguccaucgccuucaaccaccccauccaggucgaccagcugaacagcuccuacuucaagcucagcaucccgaccaacuucuccuucggcgugacccaggaguacauccagaccacgauccagaaggugaccgucgacugcaagcaguacgugugcaacggguuccagaagugcgagcagcugcugcgcgaguacggccaguucugcagcaagaucaaccaggcccuccacggggccaaccugcggcaggacgacuccgugcgcaaccuguucgccagcgucaaguccagccaguccagccccaucauccccggcuucgggggcgacuucaaccucacccugcuggagcccguguccaucagcaccggcucccggagcgcgcgcuccgccaucgaggaccuccuguucgacaaggugacgaucgccgacccgggguacaugcagggcuacgacgacugcaugcagcaggggcccgccagcgcccgggaccugaucugcgcgcaguacgucgccggcuacaaggugcucccgccccugauggacgugaacauggaggccgccuacaccagcucccugcucgggagcaucgcgggcgucggcuggaccgccgggcuguccagcuucgccgccauccccuucgcccaguccaucuucuaccgccugaacggcguggggaucacccagcagguccucagcgagaaccagaagcugaucgcgaacaaguucaaccaggcccugggcgccaugcagacgggguucaccaccaccaacgaggccuuccagaaggugcaggacgccgugaacaacaacgcgcaggcccucuccaagcuggccagcgagcuguccaacacguucggcgccaucagcgccuccaucggcgacaucauccagcggcucgacgugcuggagcaggacgcgcagaucgaccgccugaucaacgggcggcucaccacccugaacgccuucgucgcccagcagcuggugcgcagcgaguccgccgcgcucagcgcccagcuggccaaggacaaggugaacgagugcgucaaggcccaguccaagcggagcggcuucugcgggcagggcacccacaucguguccuucgucgugaacgcccccaacggccuguacuucaugcacgugggguacuaccccagcaaccacaucgaggucguguccgcguacggccucugcgacgccgccaaccccacgaacugcaucgccccggugaacggguacuucaucaagaccaacaacacccgcaucgucgacgaguggagcuacaccggcagcuccuucuacgcccccgagcccaucacgagccugaacaccaaguacguggcgccccaggugaccuaccagaacaucuccaccaaccugccgccgccccuccuggggaacagcaccggcaucgacuuccaggacgagcuggacgaguucuucaagaacgucuccacgagcauccccaacuucggcucccucacccagaucaacaccacccugcuggaccucacguacgagaugcugagccugcagcaggucgugaaggcccucaacgaguccuacaucgaccugaaggagcuggggaacuacaccuacuacaacaaguggcccugguacaucuggcucggcuucaucgccgggcugguggcccuggcccucugcguguucuucauccugugcugcaccggcugcgggaccaacugcaugggcaagcugaagugcaaccggugcugcgaccgcuacgaggaguacgaccucgagccccacaaggugcacguccacugaggacuagucccuguucccagagcccacuuuuuuuucuuuuuuugaaauaaaauagccugucuuucagaucucaaaggcucuuuucagagccaccaaaaaaaaaaaaaaaaaaaaaaaaaaaaaaaaaaaaaaaaaaaaaaaaaaaaaaaaaaaaaaaaaaaaaaaaaaaaaaaaaaaaaaaaaaaaaaaaaaaaa

SEQ ID NO: 14849 - RNA, 2039 nt, Artificial Sequence
  MERS-CoV/Riyadh_14_2013__AHI48572.1 spike protein mRNA gc (1-17_726-1296)(R1020Q)
aggagagucccgcagucggcguccagcggcucugcuuguucgugugugugucguugcaggccuuauucaagcuuaccaugauccacagcguguuccugcucauguuccugcugacccccaccgaguccgacugcaagcucccccugggccagagccugugcgcccuccccgacacgcccuccacccugacgccccgcagcguccgguccgugccgggggagaugcgccuggccagcaucgcguucaaccaccccauccagguggaccagcucaacuccagcuacuucaagcuguccauccccaccaacuucagcuucggcgucacccaggaguacauccagaccaccauccagaaggugaccguggacugcaagcaguacgucugcaacggguuccagaagugcgagcagcugcuccgggaguacggccaguucugcuccaagaucaaccaggcccugcacggggccaaccugcgccaggacgacagcgugcggaaccucuucgccuccgucaagagcucccagagcucccccaucaucccgggcuucggcggggacuucaaccugacgcugcucgagcccgugagcaucuccaccggcagccgcagcgcccgguccgcgaucgaggaccugcuguucgacaaggugaccaucgccgaccccggguacaugcagggcuacgacgacugcaugcagcaggggcccgccagcgcccgcgaccucaucugcgcgcaguacguggccggcuacaagguccugccgccccugauggacgugaacauggaggccgccuacaccuccagccuccugggcuccaucgccggggugggcuggacggcggggcugagcuccuucgccgccauccccuucgcccagagcaucuucuaccggcucaacggcgucggcaucacccagcagguccuguccgagaaccagaagcugaucgccaacaaguucaaccaggcgcucggggccaugcagaccggcuucaccacgaccaacgaggccuuccagaaggugcaggacgccgugaacaacaacgcccaggcgcugagcaagcuggccuccgagcucagcaacaccuucggggccaucuccgccagcaucggcgacaucauccagcgccuggacgugcuggagcaggacgcccagaucgaccggcucaucaacgggcgccugaccacgcugaacgcguucguggcccagcagcucguccgguccgagagcgccgcccuguccgcgcagcuggccaaggacaaggugaacgagugcgugaaggcccagagcaagcgcuccggcuucugcggccaggggacccacaucgucagcuucguggucaacgcccccaacggccucuacuucaugcacgugggguacuacccgagcaaccacaucgagguggucuccgccuacggccugugcgacgcggccaaccccaccaacugcaucgcccccgugaacggguacuucaucaagaccaacaacacgcggaucguggacgaguggagcuacaccggcuccagcuucuacgcccccgagccgaucaccucccugaacaccaaguacgucgcgccccaggugacguaccagaacaucagcaccaaccucccgccgccccugcugggcaacuccaccgggaucgacuuccaggacgagcuggacgaguucuucaagaacgugagcaccuccauccccaacuucggcagccucacgcagaucaacaccacccugcuggaccucaccuacgagaugcugucccugcagcaggucgugaaggcccucaacgagagcuacaucgaccugaaggagcuggggaacuacacguacuacaacaaguggcccugaggacuagucccuguucccagagcccacuuuuuuuucuuuuuuugaaauaaaauagccugucuuucagaucucaaaggcucuuuucagagccaccaaaaaaaaaaaaaaaaaaaaaaaaaaaaaaaaaaaaaaaaaaaaaaaaaaaaaaaaaaaaaaaaaaaaaaaaaaaaaaaaaaaaaaaaaaaaaaaaaaaaa

SEQ ID NO: 14850 - RNA, 2120 nt, Artificial Sequence
  MERS-CoV/Riyadh_14_2013__AHI48572.1 spike protein mRNA gc (1-17_726-1296)(R1020Q)_LeucineZipper
aggagagucccgcagucggcguccagcggcucugcuuguucgugugugugucguugcaggccuuauucaagcuuaccaugauccacagcguguuccugcucauguuccugcugacccccaccgaguccgacugcaagcucccccugggccagagccugugcgcccuccccgacacgcccuccacccugacgccccgcagcguccgguccgugccgggggagaugcgccuggccagcaucgcguucaaccaccccauccagguggaccagcucaacuccagcuacuucaagcuguccauccccaccaacuucagcuucggcgucacccaggaguacauccagaccaccauccagaaggugaccguggacugcaagcaguacgucugcaacggguuccagaagugcgagcagcugcuccgggaguacggccaguucugcuccaagaucaaccaggcccugcacggggccaaccugcgccaggacgacagcgugcggaaccucuucgccuccgucaagagcucccagagcucccccaucaucccgggcuucggcggggacuucaaccugacgcugcucgagcccgugagcaucuccaccggcagccgcagcgcccgguccgcgaucgaggaccugcuguucgacaaggugaccaucgccgaccccggguacaugcagggcuacgacgacugcaugcagcaggggcccgccagcgcccgcgaccucaucugcgcgcaguacguggccggcuacaagguccugccgccccugauggacgugaacauggaggccgccuacaccuccagccuccugggcuccaucgccggggugggcuggacggcggggcugagcuccuucgccgccauccccuucgcccagagcaucuucuaccggcucaacggcgucggcaucacccagcagguccuguccgagaaccagaagcugaucgccaacaaguucaaccaggcgcucggggccaugcagaccggcuucaccacgaccaacgaggccuuccagaaggugcaggacgccgugaacaacaacgcccaggcgcugagcaagcuggccuccgagcucagcaacaccuucggggccaucuccgccagcaucggcgacaucauccagcgccuggacgugcuggagcaggacgcccagaucgaccggcucaucaacgggcgccugaccacgcugaacgcguucguggcccagcagcucguccgguccgagagcgccgcccuguccgcgcagcuggccaaggacaaggugaacgagugcgugaaggcccagagcaagcgcuccggcuucugcggccaggggacccacaucgucagcuucguggucaacgcccccaacggccucuacuucaugcacgugggguacuacccgagcaaccacaucgagguggucuccgccuacggccugugcgacgcggccaaccccaccaacugcaucgcccccgugaacggguacuucaucaagaccaacaacacgcggaucguggacgaguggagcuacaccggcuccagcuucuacgcccccgagccgaucaccucccugaacaccaaguacgucgcgccccaggugacguaccagaacaucagcaccaaccucccgccgccccugcugggcaacuccaccgggaucgacuuccaggacgagcuggacgaguucuucaagaacgugagcaccuccauccccaacuucggcagccucacgcagaucaacaccacccugcuggaccucaccuacgagaugcugucccugcagcaggucgugaaggcccucaacgagagcuacaucgaccugaaggagcuggggaacuacacguacuacaacaaguggcccgacaagaucgaggagauccucuccaagaucuaccacaucgagaacgagaucgcccgcaucaagaagcugaucggcgaggccugaggacuagucccuguucccagagcccacuuuuuuuucuuuuuuugaaauaaaauagccugucuuucagaucucaaaggcucuuuucagagccaccaaaaaaaaaaaaaaaaaaaaaaaaaaaaaaaaaaaaaaaaaaaaaaaaaaaaaaaaaaaaaaaaaaaaaaaaaaaaaaaaaaaaaaaaaaaaaaaaaaaaa

SEQ ID NO: 14851 - RNA, 4334 nt, Artificial Sequence
  MERS-CoV/England 1__YP_007188579.1 spike protein mRNA gc (1-1353)
aggagagucccgcagucggcguccagcggcucugcuuguucgugugugugucguugcaggccuuauucaagcuuaccaugauccacagcguguuccugcucauguuccugcugacccccaccgaguccuacgucgacgugggcccggacagcgugaaguccgccugcaucgaggucgacauccagcagacguucuucgacaagaccuggccccgccccaucgacgugagcaaggccgacgggaucaucuacccccagggccggaccuacuccaacaucaccaucacguaccagggccucuucccguaccagggcgaccacggggacauguacguguacagcgcgggccacgccaccggcaccacgccccagaagcuguucgucgccaacuacucccaggacgugaagcaguucgccaacggguucgugguccgcaucggcgccgcggccaacagcaccgggaccgugaucaucucccccagcaccuccgccaccauccggaagaucuaccccgccuucaugcugggcagcuccguggggaacuucagcgacggcaagaugggccgcuucuucaaccacacgcucguccugcugccggacgggugcggcacccuccugcgggcguucuacugcauccuggagccccgcuccgggaaccacugccccgccggcaacagcuacaccuccuucgccaccuaccacacgcccgccaccgacugcagcgacggcaacuacaaccggaacgccucccucaacagcuucaaggaguacuucaaccugcgcaacugcaccuucauguacaccuacaacaucacggaggacgagauccuggagugguucgggaucacccagaccgcgcagggcgugcaccucuucagcucccgguacguggaccuguacgggggcaacauguuccaguucgccacccugccggucuacgacacgaucaaguacuacagcaucaucccccacuccauccgcagcauccaguccgaccggaaggccugggccgccuucuacguguacaagcuccagccccugaccuuccugcucgacuucagcguggacggguacauccgccgggcgaucgacugcggcuucaacgaccugucccagcugcacugcagcuacgaguccuucgacgucgagagcggcguguacuccgugagcuccuucgaggccaagcccagcggguccgucguggagcaggccgagggcguggagugcgacuucagcccgcuccuguccgggaccccgccccaggucuacaacuucaagcgccugguguucaccaacugcaacuacaaccucacgaagcugcugagccucuucuccgucaacgacuucacgugcagccagaucagccccgccgccaucgcguccaacugcuacagcucccugauccuggacuacuucagcuacccccucuccaugaaguccgaccugagcgugagcuccgccgggcccaucagccaguucaacuacaagcaguccuucagcaacccgaccugccugauccucgccaccgugccccacaaccugaccaccaucaccaagccccugaaguacuccuacaucaacaagugcagccgguuccucuccgacgaccgcaccgaggucccccagcuggugaacgccaaccaguacagccccugcguguccaucguccccagcacggugugggaggacggggacuacuaccggaagcagcugagcccgcucgagggcggcggguggcugguggccuccggcagcaccgucgcgaugaccgagcagcugcagaugggguucggcaucaccgugcaguacgggaccgacacgaacuccgugugccccaagcucgaguucgccaacgacaccaagaucgccagccagcugggcaacugcgucgaguacucccuguacggcgugagcgggcgcggcguguuccagaacugcaccgccgucggggugcggcagcagcgcuucguguacgacgcguaccagaaccuggucggcuacuacuccgacgacggcaacuacuacugccuccgggccugcgugagcgugcccgucuccgugaucuacgacaaggagaccaagacgcacgccacccuguucgggagcguggccugcgagcacaucuccagcaccaugucccaguacagccgcuccacccgcagcaugcugaagcggcgcgacuccacguacggcccgcuccagacccccgucgggugcgugcugggccuggugaacagcucccucuucgucgaggacugcaagcugccccuggggcagagccucugcgcccugcccgacaccccgagcacccugacgccccgguccgugcgcagcgugcccggcgagaugcggcucgcguccaucgccuucaaccaccccauccaggucgaccagcugaacagcuccuacuucaagcugagcaucccgaccaacuucuccuucggcgugacccaggaguacauccagaccacgauccagaaggugaccgucgacugcaagcaguacgugugcaacggguuccagaagugcgagcagcuccugcgcgaguacggccaguucugcagcaagaucaaccaggcccugcacggggccaaccuccggcaggacgacuccgugcgcaaccuguucgccagcgucaaguccagccaguccagccccaucauccccggcuucgggggcgacuucaaccugacccuccuggagcccguguccaucagcaccggcucccggagcgcgcgcuccgccaucgaggaccuccuguucgacaaggugacgaucgccgacccgggguacaugcagggcuacgacgacugcaugcagcaggggcccgccagcgcccgggaccugaucugcgcgcaguacgucgccggcuacaaggugcugccgccccucauggacgugaacauggaggccgccuacaccagcucccugcuggggagcaucgcgggcgucggcuggaccgccgggcucuccagcuucgccgccauccccuucgcccaguccaucuucuaccgccugaacggcguggggaucacccagcagguccugagcgagaaccagaagcucaucgcgaacaaguucaaccaggcccugggcgccaugcagacgggguucaccaccaccaacgaggccuuccacaaggugcaggacgccgugaacaacaacgcgcaggcccuguccaagcucgccagcgagcuguccaacacguucggcgccaucagcgccuccaucggcgacaucauccagcggcuggacgugcucgagcaggacgcgcagaucgaccgccugaucaacgggcggcugaccacccucaacgccuucgucgcccagcagcuggugcgcagcgaguccgccgcgcugagcgcccagcucgccaaggacaaggugaacgagugcgucaaggcccaguccaagcggagcggcuucugcgggcagggcacccacaucguguccuucgucgugaacgcccccaacggccuguacuucaugcacgugggguacuaccccagcaaccacaucgaggucguguccgcguacggccugugcgacgccgccaaccccacgaacugcaucgccccggugaacggguacuucaucaagaccaacaacacccgcaucgucgacgaguggagcuacaccggcagcuccuucuacgcccccgagcccaucacgagccucaacaccaaguacguggcgccccaggugaccuaccagaacaucuccaccaaccugccgccgccccugcucgggaacagcaccggcaucgacuuccaggacgagcuggacgaguucuucaagaacgucuccacgagcauccccaacuucggcucccugacccagaucaacaccacccuccuggaccugacguacgagaugcucagccugcagcaggucgugaaggcccugaacgaguccuacaucgaccucaaggagcuggggaacuacaccuacuacaacaaguggcccugguacaucuggcugggcuucaucgccgggcucguggcccuggcccugugcguguucuucauccucugcugcaccggcugcgggaccaacugcaugggcaagcugaagugcaaccggugcugcgaccgcuacgaggaguacgaccuggagccccacaaggugcacguccacugaggacuagucccuguucccagagcccacuuuuuuuucuuuuuuugaaauaaaauagccugucuuucagaucucaaaggcucuuuucagagccaccaaaaaaaaaaaaaaaaaaaaaaaaaaaaaaaaaaaaaaaaaaaaaaaaaaaaaaaaaaaaaaaaaaaaaaaaaaaaaaaaaaaaaaaaaaaaaaaaaaaaa

SEQ ID NO: 14852 - RNA, 4334 nt, Artificial Sequence
  MERS-CoV/England 1__YP_007188579.1 spike protein mRNA gc (1-1353)(V1060P_L1061P)
aggagagucccgcagucggcguccagcggcucugcuuguucgugugugugucguugcaggccuuauucaagcuuaccaugauccacagcguguuccugcucauguuccugcugacccccaccgaguccuacgucgacgugggcccggacagcgugaaguccgccugcaucgaggucgacauccagcagacguucuucgacaagaccuggccccgccccaucgacgugagcaaggccgacgggaucaucuacccccagggccggaccuacuccaacaucaccaucacguaccagggccucuucccguaccagggcgaccacggggacauguacguguacagcgcgggccacgccaccggcaccacgccccagaagcuguucgucgccaacuacucccaggacgugaagcaguucgccaacggguucgugguccgcaucggcgccgcggccaacagcaccgggaccgugaucaucucccccagcaccuccgccaccauccggaagaucuaccccgccuucaugcugggcagcuccguggggaacuucagcgacggcaagaugggccgcuucuucaaccacacgcucguccugcugccggacgggugcggcacccuccugcgggcguucuacugcauccuggagccccgcuccgggaaccacugccccgccggcaacagcuacaccuccuucgccaccuaccacacgcccgccaccgacugcagcgacggcaacuacaaccggaacgccucccucaacagcuucaaggaguacuucaaccugcgcaacugcaccuucauguacaccuacaacaucacggaggacgagauccuggagugguucgggaucacccagaccgcgcagggcgugcaccucuucagcucccgguacguggaccuguacgggggcaacauguuccaguucgccacccugccggucuacgacacgaucaaguacuacagcaucaucccccacuccauccgcagcauccaguccgaccggaaggccugggccgccuucuacguguacaagcuccagccccugaccuuccugcucgacuucagcguggacggguacauccgccgggcgaucgacugcggcuucaacgaccugucccagcugcacugcagcuacgaguccuucgacgucgagagcggcguguacuccgugagcuccuucgaggccaagcccagcggguccgucguggagcaggccgagggcguggagugcgacuucagcccgcuccuguccgggaccccgccccaggucuacaacuucaagcgccugguguucaccaacugcaacuacaaccucacgaagcugcugagccucuucuccgucaacgacuucacgugcagccagaucagccccgccgccaucgcguccaacugcuacagcucccugauccuggacuacuucagcuacccccucuccaugaaguccgaccugagcgugagcuccgccgggcccaucagccaguucaacuacaagcaguccuucagcaacccgaccugccugauccucgccaccgugccccacaaccugaccaccaucaccaagccccugaaguacuccuacaucaacaagugcagccgguuccucuccgacgaccgcaccgaggucccccagcuggugaacgccaaccaguacagccccugcguguccaucguccccagcacggugugggaggacggggacuacuaccggaagcagcugagcccgcucgagggcggcggguggcugguggccuccggcagcaccgucgcgaugaccgagcagcugcagaugggguucggcaucaccgugcaguacgggaccgacacgaacuccgugugccccaagcucgaguucgccaacgacaccaagaucgccagccagcugggcaacugcgucgaguacucccuguacggcgugagcgggcgcggcguguuccagaacugcaccgccgucggggugcggcagcagcgcuucguguacgacgcguaccagaaccuggucggcuacuacuccgacgacggcaacuacuacugccuccgggccugcgugagcgugcccgucuccgugaucuacgacaaggagaccaagacgcacgccacccuguucgggagcguggccugcgagcacaucuccagcaccaugucccaguacagccgcuccacccgcagcaugcugaagcggcgcgacuccacguacggcccgcuccagacccccgucgggugcgugcugggccuggugaacagcucccucuucgucgaggacugcaagcugccccuggggcagagccucugcgcccugcccgacaccccgagcacccugacgccccgguccgugcgcagcgugcccggcgagaugcggcucgcguccaucgccuucaaccaccccauccaggucgaccagcugaacagcuccuacuucaagcugagcaucccgaccaacuucuccuucggcgugacccaggaguacauccagaccacgauccagaaggugaccgucgacugcaagcaguacgugugcaacggguuccagaagugcgagcagcuccugcgcgaguacggccaguucugcagcaagaucaaccaggcccugcacggggccaaccuccggcaggacgacuccgugcgcaaccuguucgccagcgucaaguccagccaguccagccccaucauccccggcuucgggggcgacuucaaccugacccuccuggagcccguguccaucagcaccggcucccggagcgcgcgcuccgccaucgaggaccuccuguucgacaaggugacgaucgccgacccgggguacaugcagggcuacgacgacugcaugcagcaggggcccgccagcgcccgggaccugaucugcgcgcaguacgucgccggcuacaaggugcugccgccccucauggacgugaacauggaggccgccuacaccagcucccugcuggggagcaucgcgggcgucggcuggaccgccgggcucuccagcuucgccgccauccccuucgcccaguccaucuucuaccgccugaacggcguggggaucacccagcagguccugagcgagaaccagaagcucaucgcgaacaaguucaaccaggcccugggcgccaugcagacgggguucaccaccaccaacgaggccuuccacaaggugcaggacgccgugaacaacaacgcgcaggcccuguccaagcucgccagcgagcuguccaacacguucggcgccaucagcgccuccaucggcgacaucauccagcggcuggacccgcccgagcaggacgcgcagaucgaccgccucaucaacgggcggcugaccacccugaacgccuucguggcccagcagcucguccgcagcgaguccgccgcgcugagcgcccagcuggccaaggacaaggugaacgagugcgugaaggcccaguccaagcggagcggcuucugcgggcagggcacccacaucgucuccuucguggucaacgcccccaacggccucuacuucaugcacgugggguacuaccccagcaaccacaucgagguggucuccgcguacggccugugcgacgccgccaaccccacgaacugcaucgcccccgugaacggguacuucaucaagaccaacaacacccgcaucguggacgaguggagcuacaccggcagcuccuucuacgcccccgagccgaucacgagccugaacaccaaguacgucgcgccccaggugaccuaccagaacaucuccaccaaccugcccccgccccuccuggggaacagcaccggcaucgacuuccaggacgagcucgacgaguucuucaagaacguguccacgagcauccccaacuucggcucccugacccagaucaacaccacccugcucgaccugacguacgagaugcugagccuccagcaggucgugaaggcccugaacgaguccuacaucgaccugaaggagcucgggaacuacaccuacuacaacaaguggcccugguacaucuggcugggcuucaucgccgggcugguggcccucgcccugugcgucuucuucauccugugcugcaccggcugcgggaccaacugcaugggcaagcucaagugcaaccggugcugcgaccgcuacgaggaguacgaccuggagccgcacaaggugcacgugcacugaggacuagucccuguucccagagcccacuuuuuuuucuuuuuuugaaauaaaauagccugucuuucagaucucaaaggcucuuuucagagccaccaaaaaaaaaaaaaaaaaaaaaaaaaaaaaaaaaaaaaaaaaaaaaaaaaaaaaaaaaaaaaaaaaaaaaaaaaaaaaaaaaaaaaaaaaaaaaaaaaaaaa

SEQ ID NO: 14853 - RNA, 4148 nt, Artificial Sequence
  MERS-CoV/England 1__YP_007188579.1 spike protein mRNA gc (variant)
aggagagucccgcagucggcguccagcggcucugcuuguucgugugugugucguugcaggccuuauucaagcuuaccaugauccacagcguguuccugcucauguuccugcugacccccaccgaguccuacgucgacgugggcccggacagcgugaaguccgccugcaucgaggucgacauccagcagacguucuucgacaagaccuggccccgccccaucgacgugagcaaggccgacgggaucaucuacccccagggccggaccuacuccaacaucaccaucacguaccagggccucuucccguaccagggcgaccacggggacauguacguguacagcgcgggccacgccaccggcaccacgccccagaagcuguucgucgccaacuacucccaggacgugaagcaguucgccaacggguucgugguccgcaucggcgccgcggccaacagcaccgggaccgugaucaucucccccagcaccuccgccaccauccggaagaucuaccccgccuucaugcugggcagcuccguggggaacuucagcgacggcaagaugggccgcuucuucaaccacacgcucguccugcugccggacgggugcggcacccuccugcgggcguucuacugcauccuggagccccgcuccgggaaccacugccccgccggcaacagcuacaccuccuucgccaccuaccacacgcccgccaccgacugcagcgacggcaacuacaaccggaacgccucccucaacagcuucaaggaguacuucaaccugcgcaacugcaccuucauguacaccuacaacaucacggaggacgagauccuggagugguucgggaucacccagaccgcgcagggcgugcaccucuucagcucccgguacguggaccuguacgggggcaacauguuccaguucgccacccugccggucuacgacacgaucaaguacuacagcaucaucccccacuccauccgcagcauccaguccgaccggaaggccugggccgccuucuacguguacaagcuccagccccugaccuuccugcucgacuucagcguggacggguacauccgccgggcgaucgacugcggcuucaacgaccugucccagcugcacugcagcuacgaguccuucgacgucgagagcggcguguacuccgugagcuccuucgaggccaagcccagcggguccgucguggagcaggccgagggcguggagugcgacuucagcccgcuccuguccgggaccccgccccaggucuacaacuucaagcgccugguguucaccaacugcaacuacaaccucacgaagcugcugagccucuucuccgucaacgacuucacgugcagccagaucagccccgccgccaucgcguccaacugcuacagcucccugauccuggacuacuucagcuacccccucuccaugaaguccgaccugagcgugagcuccgccgggcccaucagccaguucaacuacaagcaguccuucagcaacccgaccugccugauccucgccaccgugccccacaaccugaccaccaucaccaagccccugaaguacuccuacaucaacaagugcagccgguuccucuccgacgaccgcaccgaggucccccagcuggugaacgccaaccaguacagccccugcguguccaucguccccagcacggugugggaggacggggacuacuaccggaagcagcugagcccgcucgagggcggcggguggcugguggccuccggcagcaccgucgcgaugaccgagcagcugcagaugggguucggcaucaccgugcaguacgggaccgacacgaacuccgugugccccaagcucgaguucgccaacgacaccaagaucgccagccagcugggcaacugcgucgaguacucccuguacggcgugagcgggcgcggcguguuccagaacugcaccgccgucggggugcggcagcagcgcuucguguacgacgcguaccagaaccuggucggcuacuacuccgacgacggcaacuacuacugccuccgggccugcgugagcgugcccgucuccgugaucuacgacaaggagaccaagacgcacgccacccuguucgggagcguggccugcgagcacaucuccagcaccaugucccaguacagccgcuccacccgcagcaugcugaagcggcgcgacuccacguacggcccgcuccagacccccgucgggugcgugcugggccuggugaacagcucccucuucgucgaggacugcaagcugccccuggggcagagccucugcgcccugcccgacaccccgagcacccugacgccccgguccgugcgcagcgugcccggcgagaugcggcucgcguccaucgccuucaaccaccccauccaggucgaccagcugaacagcuccuacuucaagcugagcaucccgaccaacuucuccuucggcgugacccaggaguacauccagaccacgauccagaaggugaccgucgacugcaagcaguacgugugcaacggguuccagaagugcgagcagcuccugcgcgaguacggccaguucugcagcaagaucaaccaggcccugcacggggccaaccuccggcaggacgacuccgugcgcaaccuguucgccagcgucaaguccagccaguccagccccaucauccccggcuucgggggcgacuucaaccugacccuccuggagcccguguccaucagcaccggcucccggagcgcgcgcuccgccaucgaggaccuccuguucgacaaggugacgaucgccgacccgggguacaugcagggcuacgacgacugcaugcagcaggggcccgccagcgcccgggaccugaucugcgcgcaguacgucgccggcuacaaggugcugccgccccucauggacgugaacauggaggccgccuacaccagcucccugcuggggagcaucgcgggcgucggcuggaccgccgggcucuccagcuucgccgccauccccuucgcccaguccaucuucuaccgccugaacggcguggggaucacccagcagguccugagcgagaaccagaagcucaucgcgaacaaguucaaccaggcccugggcgccaugcagacgggguucaccaccaccaacgaggccuuccacaaggugcaggacgccgugaacaacaacgcgcaggcccuguccaagcucgccagcgagcuguccaacacguucggcgccaucagcgccuccaucggcgacaucauccagcggcuggacccgcccgagcaggacgcgcagaucgaccgccucaucaacgggcggcugaccacccugaacgccuucguggcccagcagcucguccgcagcgaguccgccgcgcugagcgcccagcuggccaaggacaaggugaacgagugcgugaaggcccaguccaagcggagcggcuucugcgggcagggcacccacaucgucuccuucguggucaacgcccccaacggccucuacuucaugcacgugggguacuaccccagcaaccacaucgagguggucuccgcguacggccugugcgacgccgccaaccccacgaacugcaucgcccccgugaacggguacuucaucaagaccaacaacacccgcaucguggacgaguggagcuacaccggcagcuccuucuacgcccccgagccgaucacgagccugaacaccaaguacgucgcgccccaggugaccuaccagaacaucuccaccaaccugcccccgccccuccuggggaacagcaccggcaucgacuuccaggacgagcucgacgaguucuucaagaacguguccacgagcauccccaacuucggcucccugacccagaucaacaccacccugcucgaccugacguacgagaugcugagccuccagcaggucgugaaggcccugaacgaguccuacaucgaccugaaggagcucgggaacuacaccuacugaggacuagucccuguucccagagcccacuuuuuuuucuuuuuuugaaauaaaauagccugucuuucagaucucaaaggcucuuuucagagccaccaaaaaaaaaaaaaaaaaaaaaaaaaaaaaaaaaaaaaaaaaaaaaaaaaaaaaaaaaaaaaaaaaaaaaaaaaaaaaaaaaaaaaaaaaaaaaaaaaaaaa

SEQ ID NO: 14854 - RNA, 4148 nt, Artificial Sequence
  MERS-CoV/England 1__YP_007188579.1 spike protein mRNA gc (variant)
aggagagucccgcagucggcguccagcggcucugcuuguucgugugugugucguugcaggccuuauucaagcuuaccaugauccacagcguguuccugcucauguuccugcugacccccaccgaguccuacgucgacgugggcccggacagcgugaaguccgccugcaucgaggucgacauccagcagacguucuucgacaagaccuggccccgccccaucgacgugagcaaggccgacgggaucaucuacccccagggccggaccuacuccaacaucaccaucacguaccagggccucuucccguaccagggcgaccacggggacauguacguguacagcgccggccacgccaccggcaccacgccccagaagcuguucgucgccaacuacucccaggacgugaagcaguucgccaacggguucgugguccgcaucggcgccgcggccaacagcaccgggaccgugaucaucucccccagcaccuccgccaccauccggaagaucuaccccgccuucaugcugggcagcuccguggggaacuucagcgacggcaagaugggccgcuucuucaaccacacgcucguccugcugccggacgggugcggcacccuccugcgggcguucuacugcauccuggagccccgcuccgggaaccacugccccgccggcaacagcuacaccuccuucgccaccuaccacacgcccgccaccgacugcagcgacggcaacuacaaccggaacgccucccucaacagcuucaaggaguacuucaaccugcgcaacugcaccuucauguacaccuacaacaucacggaggacgagauccuggagugguucgggaucacccagaccgcgcagggcgugcaccucuucagcucccgguacguggaccuguacgggggcaacauguuccaguucgccacccugccggucuacgacacgaucaaguacuacagcaucaucccccacuccauccgcagcauccaguccgaccggaaggccugggccgccuucuacguguacaagcuccagccccugaccuuccugcucgacuucagcguggacggguacauccgccgggcgaucgacugcggcuucaacgaccugucccagcugcacugcagcuacgaguccuucgacgucgagagcggcguguacuccgugagcuccuucgaggccaagcccagcggguccgucguggagcaggccgagggcguggagugcgacuucagcccgcuccuguccgggaccccgccccaggucuacaacuucaagcgccugguguucaccaacugcaacuacaaccucacgaagcugcugagccucuucuccgucaacgacuucacgugcagccagaucagccccgccgccaucgcguccaacugcuacagcucccugauccuggacuacuucagcuacccccucuccaugaaguccgaccugagcgugagcuccgccgggcccaucagccaguucaacuacaagcaguccuucagcaacccgaccugccugauccucgccaccgugccccacaaccugaccaccaucaccaagccccugaaguacuccuacaucaacaagugcagccgguuccucuccgacgaccgcaccgaggucccccagcuggugaacgccaaccaguacagccccugcguguccaucguccccagcacggugugggaggacggggacuacuaccggaagcagcugagcccgcucgagggcggcggguggcugguggccuccggcagcaccgucgcgaugaccgagcagcugcagaugggguucggcaucaccgugcaguacgggaccgacacgaacuccgugugccccaagcucgaguucgccaacgacaccaagaucgccagccagcugggcaacugcgucgaguacucccuguacggcgugagcgggcgcggcguguuccagaacugcaccgccgucggggugcggcagcagcgcuucguguacgacgcguaccagaaccuggucggcuacuacuccgacgacggcaacuacuacugccuccgggccugcgugagcgugcccgucuccgugaucuacgacaaggagaccaagacgcacgccacccuguucgggagcguggccugcgagcacaucuccagcaccaugucccaguacagccgcuccacccgcagcaugcugaagcggcgcgacuccacguacggcccgcuccagacccccgucgggugcgugcugggccuggugaacagcucccucuucgucgaggacugcaagcugccccuggggcagagccucugcgcccugcccgacaccccgagcacccugacgcccgcguccgugggcagcgugcccggcgagaugcggcucgccuccaucgccuucaaccaccccauccaggucgaccagcugaacagcuccuacuucaagcugagcaucccgaccaacuucuccuucggggugacccaggaguacauccagaccacgauccagaaggugaccgucgacugcaagcaguacgugugcaacggcuuccagaagugcgagcagcuccugcgcgaguacgggcaguucugcagcaagaucaaccaggcccugcacggcgccaaccuccggcaggacgacuccgugcgcaaccuguucgcgagcgucaaguccagccaguccagccccaucauccccggguucggcggcgacuucaaccugacccuccuggagcccguguccaucagcaccgggucccggagcgcccgcuccgccaucgaggaccuccuguucgacaaggugacgaucgccgacccgggcuacaugcagggguacgacgacugcaugcagcagggccccgccagcgcgcgggaccugaucugcgcccaguacgucgccggguacaaggugcugccgccccucauggacgugaacauggaggccgcguacaccagcucccugcugggcagcaucgccggcgucggguggaccgccggccucuccagcuucgccgccauccccuucgcgcaguccaucuucuaccgccugaacggggugggcaucacccagcagguccugagcgagaaccagaagcucaucgccaacaaguucaaccaggcccugggggccaugcagacgggcuucaccaccaccaacgaggccuuccacaaggugcaggacgcggugaacaacaacgcccaggcccuguccaagcucgccagcgagcuguccaacacguucggcgccaucagcgcguccaucggggacaucauccagcggcuggacccgcccgagcaggacgcccagaucgaccgccucaucaacggccggcugaccacccugaacgccuucguggcccagcagcucguccgcagcgaguccgcggcccugagcgcccagcuggccaaggacaaggugaacgagugcgugaaggcccaguccaagcggagcggguucugcggccagggcacccacaucgucuccuucguggucaacgcgcccaacgggcucuacuucaugcacgugggcuacuaccccagcaaccacaucgagguggucuccgccuacgggcugugcgacgccgccaaccccacgaacugcaucgcccccgugaacggcuacuucaucaagaccaacaacacccgcaucguggacgaguggagcuacaccgggagcuccuucuacgcgcccgagccgaucacgagccugaacaccaaguacgucgcgccccaggugaccuaccagaacaucuccaccaaccugcccccgccccuccugggcaacagcaccggcaucgacuuccaggacgagcucgacgaguucuucaagaacguguccacgagcauccccaacuucgggucccugacccagaucaacaccacccugcucgaccugacguacgagaugcugagccuccagcaggucgugaaggcccugaacgaguccuacaucgaccugaaggagcucggcaacuacaccuacugaggacuagucccuguucccagagcccacuuuuuuuucuuuuuuugaaauaaaauagccugucuuucagaucucaaaggcucuuuucagagccaccaaaaaaaaaaaaaaaaaaaaaaaaaaaaaaaaaaaaaaaaaaaaaaaaaaaaaaaaaaaaaaaaaaaaaaaaaaaaaaaaaaaaaaaaaaaaaaaaaaaaa

SEQ ID NO: 14855 - RNA, 4148 nt, Artificial Sequence
  MERS-CoV/England 1__YP_007188579.1 spike protein mRNA gc (variant)
aggagagucccgcagucggcguccagcggcucugcuuguucgugugugugucguugcaggccuuauucaagcuuaccaugauccacagcguguuccugcucauguuccugcugacccccaccgaguccuacgucgacgugggcccggacagcgugaaguccgccugcaucgaggucgacauccagcagacguucuucgacaagaccuggccccgccccaucgacgugagcaaggccgacgggaucaucuacccccagggccggaccuacuccaacaucaccaucacguaccagggccucuucccguaccagggcgaccacggggacauguacguguacagcgccggccacgccaccggcaccacgccccagaagcuguucgucgccaacuacucccaggacgugaagcaguucgccaacggguucgugguccgcaucggcgccgcggccaacagcaccgggaccgugaucaucucccccagcaccuccgccaccauccggaagaucuaccccgccuucaugcugggcagcuccguggggaacuucagcgacggcaagaugggccgcuucuucaaccacacgcucguccugcugccggacgggugcggcacccuccugcgggcguucuacugcauccuggagccccgcuccgggaaccacugccccgccggcaacagcuacaccuccuucgccaccuaccacacgcccgccaccgacugcagcgacggcaacuacaaccggaacgccucccucaacagcuucaaggaguacuucaaccugcgcaacugcaccuucauguacaccuacaacaucacggaggacgagauccuggagugguucgggaucacccagaccgcgcagggcgugcaccucuucagcucccgguacguggaccuguacgggggcaacauguuccaguucgccacccugccggucuacgacacgaucaaguacuacagcaucaucccccacuccauccgcagcauccaguccgaccggaaggccugggccgccuucuacguguacaagcuccagccccugaccuuccugcucgacuucagcguggacggguacauccgccgggcgaucgacugcggcuucaacgaccugucccagcugcacugcagcuacgaguccuucgacgucgagagcggcguguacuccgugagcuccuucgaggccaagcccagcggguccgucguggagcaggccgagggcguggagugcgacuucagcccgcuccuguccgggaccccgccccaggucuacaacuucaagcgccugguguucaccaacugcaacuacaaccucacgaagcugcugagccucuucuccgucaacgacuucacgugcagccagaucagccccgccgccaucgcguccaacugcuacagcucccugauccuggacuacuucagcuacccccucuccaugaaguccgaccugagcgugagcuccgccgggcccaucagccaguucaacuacaagcaguccuucagcaacccgaccugccugauccucgccaccgugccccacaaccugaccaccaucaccaagccccugaaguacuccuacaucaacaagugcagccgguuccucuccgacgaccgcaccgaggucccccagcuggugaacgccaaccaguacagccccugcguguccaucguccccagcacggugugggaggacggggacuacuaccggaagcagcugagcccgcucgagggcggcggguggcugguggccuccggcagcaccgucgcgaugaccgagcagcugcagaugggguucggcaucaccgugcaguacgggaccgacacgaacuccgugugccccaagcucgaguucgccaacgacaccaagaucgccagccagcugggcaacugcgucgaguacucccuguacggcgugagcgggcgcggcguguuccagaacugcaccgccgucggggugcggcagcagcgcuucguguacgacgcguaccagaaccuggucggcuacuacuccgacgacggcaacuacuacugccuccgggccugcgugagcgugcccgucuccgugaucuacgacaaggagaccaagacgcacgccacccuguucgggagcguggccugcgagcacaucuccagcaccaugucccaguacagccgcuccacccgcagcaugcugaagcggcgcgacuccacguacggcccgcuccagacccccgucgggugcgugcugggccuggugaacagcucccucuucgucgaggacugcaagcugccccuggggcagagccucugcgcccugcccgacaccccgagcacccugacgcccgcguccgugggcagcgugcccggcgagaugcggcucgccuccaucgccuucaaccaccccauccaggucgaccagcugaacagcuccuacuucaagcugagcaucccgaccaacuucuccuucggggugacccaggaguacauccagaccacgauccagaaggugaccgucgacugcaagcaguacgugugcaacggcuuccagaagugcgagcagcuccugcgcgaguacgggcaguucugcagcaagaucaaccaggcccugcacggcgccaaccuccggcaggacgacuccgugcgcaaccuguucgcgagcgucaaguccagccaguccagccccaucauccccggguucggcggcgacuucaaccugacccuccuggagcccguguccaucagcaccggguccggcagcgccggguccgccaucgaggaccuccuguucgacaaggugacgaucgccgacccgggcuacaugcagggguacgacgacugcaugcagcagggccccgccagcgcgcgggaccugaucugcgcccaguacgucgccggcuacaaggugcugccgccccucauggacgugaacauggaggccgcguacaccagcucccugcuggggagcaucgccggcgucggguggaccgccggccucuccagcuucgccgccauccccuucgcgcaguccaucuucuaccgccugaacggggugggcaucacccagcagguccugagcgagaaccagaagcucaucgccaacaaguucaaccaggcccugggcgccaugcagacgggguucaccaccaccaacgaggccuuccacaaggugcaggacgcggugaacaacaacgcccaggcccuguccaagcucgccagcgagcuguccaacacguucggcgccaucagcgcguccaucggggacaucauccagcggcuggacccgcccgagcaggacgcccagaucgaccgccucaucaacggccggcugaccacccugaacgccuucguggcccagcagcucguccgcagcgaguccgcggcccugagcgcccagcuggccaaggacaaggugaacgagugcgugaaggcccaguccaagcggagcggcuucugcgggcagggcacccacaucgucuccuucguggucaacgcgcccaacgggcucuacuucaugcacgugggcuacuaccccagcaaccacaucgagguggucuccgccuacgggcugugcgacgccgccaaccccacgaacugcaucgcccccgugaacggcuacuucaucaagaccaacaacacccgcaucguggacgaguggagcuacaccggcagcuccuucuacgcgcccgagccgaucacgagccugaacaccaaguacgucgcgccccaggugaccuaccagaacaucuccaccaaccugcccccgccccuccuggggaacagcaccggcaucgacuuccaggacgagcucgacgaguucuucaagaacguguccacgagcauccccaacuucgggucccugacccagaucaacaccacccugcucgaccugacguacgagaugcugagccuccagcaggucgugaaggcccugaacgaguccuacaucgaccugaaggagcucggcaacuacaccuacugaggacuagucccuguucccagagcccacuuuuuuuucuuuuuuugaaauaaaauagccugucuuucagaucucaaaggcucuuuucagagccaccaaaaaaaaaaaaaaaaaaaaaaaaaaaaaaaaaaaaaaaaaaaaaaaaaaaaaaaaaaaaaaaaaaaaaaaaaaaaaaaaaaaaaaaaaaaaaaaaaaaaa

SEQ ID NO: 14856 - RNA, 4229 nt, Artificial Sequence
  MERS-CoV/England 1__YP_007188579.1 spike protein mRNA gc (variant)
aggagagucccgcagucggcguccagcggcucugcuuguucgugugugugucguugcaggccuuauucaagcuuaccaugauccacagcguguuccugcucauguuccugcugacccccaccgaguccuacgucgacgugggcccggacagcgugaaguccgccugcaucgaggucgacauccagcagacguucuucgacaagaccuggccccgccccaucgacgugagcaaggccgacgggaucaucuacccccagggccggaccuacuccaacaucaccaucacguaccagggccucuucccguaccagggcgaccacggggacauguacguguacagcgccggccacgccaccggcaccacgccccagaagcuguucgucgccaacuacucccaggacgugaagcaguucgccaacggguucgugguccgcaucggcgccgcggccaacagcaccgggaccgugaucaucucccccagcaccuccgccaccauccggaagaucuaccccgccuucaugcugggcagcuccguggggaacuucagcgacggcaagaugggccgcuucuucaaccacacgcucguccugcugccggacgggugcggcacccuccugcgggcguucuacugcauccuggagccccgcuccgggaaccacugccccgccggcaacagcuacaccuccuucgccaccuaccacacgcccgccaccgacugcagcgacggcaacuacaaccggaacgccucccucaacagcuucaaggaguacuucaaccugcgcaacugcaccuucauguacaccuacaacaucacggaggacgagauccuggagugguucgggaucacccagaccgcgcagggcgugcaccucuucagcucccgguacguggaccuguacgggggcaacauguuccaguucgccacccugccggucuacgacacgaucaaguacuacagcaucaucccccacuccauccgcagcauccaguccgaccggaaggccugggccgccuucuacguguacaagcuccagccccugaccuuccugcucgacuucagcguggacggguacauccgccgggcgaucgacugcggcuucaacgaccugucccagcugcacugcagcuacgaguccuucgacgucgagagcggcguguacuccgugagcuccuucgaggccaagcccagcggguccgucguggagcaggccgagggcguggagugcgacuucagcccgcuccuguccgggaccccgccccaggucuacaacuucaagcgccugguguucaccaacugcaacuacaaccucacgaagcugcugagccucuucuccgucaacgacuucacgugcagccagaucagccccgccgccaucgcguccaacugcuacagcucccugauccuggacuacuucagcuacccccucuccaugaaguccgaccugagcgugagcuccgccgggcccaucagccaguucaacuacaagcaguccuucagcaacccgaccugccugauccucgccaccgugccccacaaccugaccaccaucaccaagccccugaaguacuccuacaucaacaagugcagccgguuccucuccgacgaccgcaccgaggucccccagcuggugaacgccaaccaguacagccccugcguguccaucguccccagcacggugugggaggacggggacuacuaccggaagcagcugagcccgcucgagggcggcggguggcugguggccuccggcagcaccgucgcgaugaccgagcagcugcagaugggguucggcaucaccgugcaguacgggaccgacacgaacuccgugugccccaagcucgaguucgccaacgacaccaagaucgccagccagcugggcaacugcgucgaguacucccuguacggcgugagcgggcgcggcguguuccagaacugcaccgccgucggggugcggcagcagcgcuucguguacgacgcguaccagaaccuggucggcuacuacuccgacgacggcaacuacuacugccuccgggccugcgugagcgugcccgucuccgugaucuacgacaaggagaccaagacgcacgccacccuguucgggagcguggccugcgagcacaucuccagcaccaugucccaguacagccgcuccacccgcagcaugcugaagcggcgcgacuccacguacggcccgcuccagacccccgucgggugcgugcugggccuggugaacagcucccucuucgucgaggacugcaagcugccccuggggcagagccucugcgcccugcccgacaccccgagcacccugacgcccgcguccgugggcagcgugcccggcgagaugcggcucgccuccaucgccuucaaccaccccauccaggucgaccagcugaacagcuccuacuucaagcugagcaucccgaccaacuucuccuucggggugacccaggaguacauccagaccacgauccagaaggugaccgucgacugcaagcaguacgugugcaacggcuuccagaagugcgagcagcuccugcgcgaguacgggcaguucugcagcaagaucaaccaggcccugcacggcgccaaccuccggcaggacgacuccgugcgcaaccuguucgcgagcgucaaguccagccaguccagccccaucauccccggguucggcggcgacuucaaccugacccuccuggagcccguguccaucagcaccgggucccggagcgcccgcuccgccaucgaggaccuccuguucgacaaggugacgaucgccgacccgggcuacaugcagggguacgacgacugcaugcagcagggccccgccagcgcgcgggaccugaucugcgcccaguacgucgccggguacaaggugcugccgccccucauggacgugaacauggaggccgcguacaccagcucccugcugggcagcaucgccggcgucggguggaccgccggccucuccagcuucgccgccauccccuucgcgcaguccaucuucuaccgccugaacggggugggcaucacccagcagguccugagcgagaaccagaagcucaucgccaacaaguucaaccaggcccugggggccaugcagacgggcuucaccaccaccaacgaggccuuccacaaggugcaggacgcggugaacaacaacgcccaggcccuguccaagcucgccagcgagcuguccaacacguucggcgccaucagcgcguccaucggggacaucauccagcggcuggacccgcccgagcaggacgcccagaucgaccgccucaucaacggccggcugaccacccugaacgccuucguggcccagcagcucguccgcagcgaguccgcggcccugagcgcccagcuggccaaggacaaggugaacgagugcgugaaggcccaguccaagcggagcggguucugcggccagggcacccacaucgucuccuucguggucaacgcgcccaacgggcucuacuucaugcacgugggcuacuaccccagcaaccacaucgagguggucuccgccuacgggcugugcgacgccgccaaccccacgaacugcaucgcccccgugaacggcuacuucaucaagaccaacaacacccgcaucguggacgaguggagcuacaccgggagcuccuucuacgcgcccgagccgaucacgagccugaacaccaaguacgucgcgccccaggugaccuaccagaacaucuccaccaaccugcccccgccccuccugggcaacagcaccggcaucgacuuccaggacgagcucgacgaguucuucaagaacguguccacgagcauccccaacuucgggucccugacccagaucaacaccacccugcucgaccugacguacgagaugcugagccuccagcaggucgugaaggcccugaacgaguccuacaucgaccugaaggagcucggcaacuacaccuacgggggcuacauccccgaggccccgcgggacgggcaggccuacgugcgcaaggacggcgaguggguccugcugagcaccuucugaggacuagucccuguucccagagcccacuuuuuuuucuuuuuuugaaauaaaauagccugucuuucagaucucaaaggcucuuuucagagccaccaaaaaaaaaaaaaaaaaaaaaaaaaaaaaaaaaaaaaaaaaaaaaaaaaaaaaaaaaaaaaaaaaaaaaaaaaaaaaaaaaaaaaaaaaaaaaaaaaaaaa

SEQ ID NO: 14857 - RNA, 4229 nt, Artificial Sequence
  MERS-CoV/England 1__YP_007188579.1 spike protein mRNA gc (variant)
aggagagucccgcagucggcguccagcggcucugcuuguucgugugugugucguugcaggccuuauucaagcuuaccaugauccacagcguguuccugcucauguuccugcugacccccaccgaguccuacgucgacgugggcccggacagcgugaaguccgccugcaucgaggucgacauccagcagacguucuucgacaagaccuggccccgccccaucgacgugagcaaggccgacgggaucaucuacccccagggccggaccuacuccaacaucaccaucacguaccagggccucuucccguaccagggcgaccacggggacauguacguguacagcgccggccacgccaccggcaccacgccccagaagcuguucgucgccaacuacucccaggacgugaagcaguucgccaacggguucgugguccgcaucggcgccgcggccaacagcaccgggaccgugaucaucucccccagcaccuccgccaccauccggaagaucuaccccgccuucaugcugggcagcuccguggggaacuucagcgacggcaagaugggccgcuucuucaaccacacgcucguccugcugccggacgggugcggcacccuccugcgggcguucuacugcauccuggagccccgcuccgggaaccacugccccgccggcaacagcuacaccuccuucgccaccuaccacacgcccgccaccgacugcagcgacggcaacuacaaccggaacgccucccucaacagcuucaaggaguacuucaaccugcgcaacugcaccuucauguacaccuacaacaucacggaggacgagauccuggagugguucgggaucacccagaccgcgcagggcgugcaccucuucagcucccgguacguggaccuguacgggggcaacauguuccaguucgccacccugccggucuacgacacgaucaaguacuacagcaucaucccccacuccauccgcagcauccaguccgaccggaaggccugggccgccuucuacguguacaagcuccagccccugaccuuccugcucgacuucagcguggacggguacauccgccgggcgaucgacugcggcuucaacgaccugucccagcugcacugcagcuacgaguccuucgacgucgagagcggcguguacuccgugagcuccuucgaggccaagcccagcggguccgucguggagcaggccgagggcguggagugcgacuucagcccgcuccuguccgggaccccgccccaggucuacaacuucaagcgccugguguucaccaacugcaacuacaaccucacgaagcugcugagccucuucuccgucaacgacuucacgugcagccagaucagccccgccgccaucgcguccaacugcuacagcucccugauccuggacuacuucagcuacccccucuccaugaaguccgaccugagcgugagcuccgccgggcccaucagccaguucaacuacaagcaguccuucagcaacccgaccugccugauccucgccaccgugccccacaaccugaccaccaucaccaagccccugaaguacuccuacaucaacaagugcagccgguuccucuccgacgaccgcaccgaggucccccagcuggugaacgccaaccaguacagccccugcguguccaucguccccagcacggugugggaggacggggacuacuaccggaagcagcugagcccgcucgagggcggcggguggcugguggccuccggcagcaccgucgcgaugaccgagcagcugcagaugggguucggcaucaccgugcaguacgggaccgacacgaacuccgugugccccaagcucgaguucgccaacgacaccaagaucgccagccagcugggcaacugcgucgaguacucccuguacggcgugagcgggcgcggcguguuccagaacugcaccgccgucggggugcggcagcagcgcuucguguacgacgcguaccagaaccuggucggcuacuacuccgacgacggcaacuacuacugccuccgggccugcgugagcgugcccgucuccgugaucuacgacaaggagaccaagacgcacgccacccuguucgggagcguggccugcgagcacaucuccagcaccaugucccaguacagccgcuccacccgcagcaugcugaagcggcgcgacuccacguacggcccgcuccagacccccgucgggugcgugcugggccuggugaacagcucccucuucgucgaggacugcaagcugccccuggggcagagccucugcgcccugcccgacaccccgagcacccugacgcccgcguccgugggcagcgugcccggcgagaugcggcucgccuccaucgccuucaaccaccccauccaggucgaccagcugaacagcuccuacuucaagcugagcaucccgaccaacuucuccuucggggugacccaggaguacauccagaccacgauccagaaggugaccgucgacugcaagcaguacgugugcaacggcuuccagaagugcgagcagcuccugcgcgaguacgggcaguucugcagcaagaucaaccaggcccugcacggcgccaaccuccggcaggacgacuccgugcgcaaccuguucgcgagcgucaaguccagccaguccagccccaucauccccggguucggcggcgacuucaaccugacccuccuggagcccguguccaucagcaccggguccggcagcgccggguccgccaucgaggaccuccuguucgacaaggugacgaucgccgacccgggcuacaugcagggguacgacgacugcaugcagcagggccccgccagcgcgcgggaccugaucugcgcccaguacgucgccggcuacaaggugcugccgccccucauggacgugaacauggaggccgcguacaccagcucccugcuggggagcaucgccggcgucggguggaccgccggccucuccagcuucgccgccauccccuucgcgcaguccaucuucuaccgccugaacggggugggcaucacccagcagguccugagcgagaaccagaagcucaucgccaacaaguucaaccaggcccugggcgccaugcagacgggguucaccaccaccaacgaggccuuccacaaggugcaggacgcggugaacaacaacgcccaggcccuguccaagcucgccagcgagcuguccaacacguucggcgccaucagcgcguccaucggggacaucauccagcggcuggacccgcccgagcaggacgcccagaucgaccgccucaucaacggccggcugaccacccugaacgccuucguggcccagcagcucguccgcagcgaguccgcggcccugagcgcccagcuggccaaggacaaggugaacgagugcgugaaggcccaguccaagcggagcggcuucugcgggcagggcacccacaucgucuccuucguggucaacgcgcccaacgggcucuacuucaugcacgugggcuacuaccccagcaaccacaucgagguggucuccgccuacgggcugugcgacgccgccaaccccacgaacugcaucgcccccgugaacggcuacuucaucaagaccaacaacacccgcaucguggacgaguggagcuacaccggcagcuccuucuacgcgcccgagccgaucacgagccugaacaccaaguacgucgcgccccaggugaccuaccagaacaucuccaccaaccugcccccgccccuccuggggaacagcaccggcaucgacuuccaggacgagcucgacgaguucuucaagaacguguccacgagcauccccaacuucgggucccugacccagaucaacaccacccugcucgaccugacguacgagaugcugagccuccagcaggucgugaaggcccugaacgaguccuacaucgaccugaaggagcucggcaacuacaccuacgggggcuacauccccgaggccccgcgggacggccaggccuacgugcgcaaggacggggaguggguccugcugagcaccuucugaggacuagucccuguucccagagcccacuuuuuuuucuuuuuuugaaauaaaauagccugucuuucagaucucaaaggcucuuuucagagccaccaaaaaaaaaaaaaaaaaaaaaaaaaaaaaaaaaaaaaaaaaaaaaaaaaaaaaaaaaaaaaaaaaaaaaaaaaaaaaaaaaaaaaaaaaaaaaaaaaaaaa

SEQ ID NO: 14858 - RNA, 4334 nt, Artificial Sequence
  MERS-CoV/MERS-CoV-Jeddah-human-1__AHE78108.1 spike protein mRNA human (1-1353)
aggagagucccgcagucggcguccagcggcucugcuuguucgugugugugucguugcaggccuuauucaagcuuaccaugauccacagcguguuccugcucauguuucuucugacccccacagaguccuacgucgacguuggcccugauucugugaagucagccugcauugaaguagacauacagcaaacuuucuuugauaaaacguggccaagaccgaucgacgugaguaaggcugaugggauuaucuauccccagggaaggaccuacagcaacauuacaaucacuuaucaggguuuguucccuuaccagggcgaccauggggauauguaugucuacuccgcaggacacgccaccggcacaaccccacaaaaauuauuuguggcgaauuauucucaggacguuaagcaguucgcuaacgguuuugugguccggauaggggccgcagccaauucgacuggaacagugaucauuucacccagcaccagugcuacgauccgcaaaauuuacccugcauucaugcugggcuccucuguaggcaacuuuagcgaugggaagaugggacgauucuuuaaucauacucuaguucuccugccagacgguuguggcacccuucugcgugccuucuacugcaucuuggagcccagauccgggaaccacuguccugcuggaaauucauauacaaguuuugccacuuaccauaccccagcgacagauugcagcgacggcaacuauaauaggaacgcaucucucaauuccuucaaggaauacuucaaccugcggaauuguaccuuuauguauacguacaacauaacugaggaugaaauucuggagugguucgguaucacacagaccgcccaaggggugcaccucuuuucaagccgcuaugucgacuuauacggaggcaauauguuccaguuugcuacucugccgguguacgacacaauuaaauauuacaguaucaucccccacucuauuagauccauacagagcgauaggaaggccugggcagcuuucuauguguacaaacuucagccuuugaccuuucugcuagacuucucggucgauggcuauauccggcgcgccauugacugcggguuuaacgaucucucucaacugcauuguuccuacgagucauucgacguugaaaguggaguguauagcguauccucuuuugaggcgaagccaagcgguucaguggucgaacaggccgagggcguggagugcgauuucaguccccuucuguccgggacgccuccacagguuuacaacuuuaaacgauugguguucaccaauuguaacuacaaucucacaaagcuguuaagccuguucucugucaacgacuuuacuugcucacaaaucagucccgcagcuauagccagcaauuguuauuccucucucauucuugauuacuucucguauccgcugagcaugaaguccgacuugucagugaguucugcuggaccuaucagccaguuuaacuacaaacaguccuucucaaauccaaccugccuaauccuggccacaguaccccacaaccucacuaccauuacaaagccucugaaauauagcuacaucaauaagugcucuagacuucuguccgaugacaggaccgaaguuccccaguuggugaacgcaaaucaauauaguccaugugucagcauugugcccucuacugucugggaggacggcgauuacuaccggaaacagcucuccccucuggaaggugggggcugguuaguggccucaggaaguacgguugcuaugacagagcagcugcagaugggcuuugggauaaccgugcaauauggaacugacaccaacagcguaugcccaaagcuagaguucgcgaaugauacaaaaaucgcaucgcagcucgguaacugugucgaauacucccuguauggcgugucugggcguggaguuuuucagaauugcaccgccgugggcguccgccagcaaagauucguguacgacgcuuaucagaaccuuguagguuacuauagcgaugacgggaacuacuacuguuugagggccugcgugucaguuccggucagugugauuuaugauaaggagacuaagacacaugcaacgcuguuuggcuccguggccugugaacacaucucuagcaccaugucccaguacucacggagcacucgaaguaugcucaaacgcagagacucuacauauggaccccugcagaccccugucggcugcguucuugggcugguaaauuccagcuuguucguggaggauuguaagcucccacugggacaaucguuaugcgcucugcccgacacaccuucaacucuaaccccaaggucugugcggaguguccccggugaaaugcgccucgccuccaucgcauuuaaccacccgauucagguggaucagcugaauagcucuuacuucaaacuuagcauaccuacgaacuuuuccuucggcguuacccaagaguauauccagacaacuauucagaaggugaccgucgacuguaaacaguacgugugcaauggguuccaaaagugcgaacaguugcugagagaguauggacaguuuuguucaaagaucaaccaggcgcuccauggcgcuaaucugaggcaagaugacaguguucguaacuuauucgccagcgugaaaucuucccagucaaguccaauuauccccgguuuugggggcgacuucaaucugacacuuuuggagccuguaagcauauccacuggaucucggucggcacgaagcgccaucgaagaucuccuguuugacaaggucaccauugcugaucccggcuacaugcagggguacgacgauugcaugcagcaaggaccagccucagcaagagaccuaaucugugcucaguauguggccggcuacaaagugcugccuccccucauggaugucaacauggaggcggccuauacguccagucugcuugguucuauugcugggguuggauggacagcaggcuugagcuccuucgccgcuaucccauuugcccagucaauauucuacaggcugaauggugugggcauuacccaacagguauuaucugaaaaccagaagcucaucgcaaauaaauuuaaccaggcgcugggggccaugcaaacuggauucacaaccacuaaugaggcuuuucacaaggugcaggacgccgucaacaacaaugcacaggcucuuagcaagcuggccagugaauuguccaacaccuucggcgcaauuagcgccucuaucggggauauaauccagcgccucgacgugcuggagcaagaugcucagauugaccggcuaaucaauggaagacugacaacgcucaacgcguucguugcccagcagcuggugaggucagaguccgcagcucuuagugcccaauuggccaaagauaaggucaaugaaugcgugaaagcucagagcaagcgcucgggcuuuuguggucaggggacccauauuguuucuuucguggucaacgcaccgaauggacuguauuuuaugcacguaggcuacuauccuuccaaccauaucgaggugguuagcgccuacgguuuaugcgacgcggcuaaucccacuaacuguauagccccagugaauggcuacuucauuaaaacaaacaauacccgaaucgucgacgaauggucauauacagggaguucuuuuuacgcacccgagccuaucacuucccucaacaccaaguauguggccccacagguaacguaccaaaauauuagcacaaaccugcccccuccgcuucugggaaacucaaccggcaucgauuuccaggacgagcuagaugaauuuuucaagaaugugaguacuagcauuccaaacuuugggucccucacccagauaaauacaacucuguuggaccugaccuaugagauguuaucucuccaacaggucguuaaagcucugaacgaaagcuacaucgaucuuaaggagcugggaaauuauacauacuacaacaaauggcccugguauauuugguugggcuucaucgcaggucucguggcccuggcgcuaugcguguuuuucauucuguguugcacgggguguggaaccaauugcaugggcaaacuuaagugcaaccgguguugcgaccguuacgaagaguaugaucucgagccucacaagguccacgugcauugaggacuagucccuguucccagagcccacuuuuuuuucuuuuuuugaaauaaaauagccugucuuucagaucucaaaggcucuuuucagagccaccaaaaaaaaaaaaaaaaaaaaaaaaaaaaaaaaaaaaaaaaaaaaaaaaaaaaaaaaaaaaaaaaaaaaaaaaaaaaaaaaaaaaaaaaaaaaaaaaaaaaa

SEQ ID NO: 14859 - RNA, 4334 nt, Artificial Sequence
  MERS-CoV/MERS-CoV-Jeddah-human-1__AHE78108.1 spike protein mRNA human (1-1353)(V1060P_L1061P)
aggagagucccgcagucggcguccagcggcucugcuuguucgugugugugucguugcaggccuuauucaagcuuaccaugauccacagcguguuccugcucauguuucuucugacccccacagaguccuacgucgacguuggcccugauucugugaagucagccugcauugaaguagacauacagcaaacuuucuuugauaaaacguggccaagaccgaucgacgugaguaaggcugaugggauuaucuauccccagggaaggaccuacagcaacauuacaaucacuuaucaggguuuguucccuuaccagggcgaccauggggauauguaugucuacuccgcaggacacgccaccggcacaaccccacaaaaauuauuuguggcgaauuauucucaggacguuaagcaguucgcuaacgguuuugugguccggauaggggccgcagccaauucgacuggaacagugaucauuucacccagcaccagugcuacgauccgcaaaauuuacccugcauucaugcugggcuccucuguaggcaacuuuagcgaugggaagaugggacgauucuuuaaucauacucuaguucuccugccagacgguuguggcacccuucugcgugccuucuacugcaucuuggagcccagauccgggaaccacuguccugcuggaaauucauauacaaguuuugccacuuaccauaccccagcgacagauugcagcgacggcaacuauaauaggaacgcaucucucaauuccuucaaggaauacuucaaccugcggaauuguaccuuuauguauacguacaacauaacugaggaugaaauucuggagugguucgguaucacacagaccgcccaaggggugcaccucuuuucaagccgcuaugucgacuuauacggaggcaauauguuccaguuugcuacucugccgguguacgacacaauuaaauauuacaguaucaucccccacucuauuagauccauacagagcgauaggaaggccugggcagcuuucuauguguacaaacuucagccuuugaccuuucugcuagacuucucggucgauggcuauauccggcgcgccauugacugcggguuuaacgaucucucucaacugcauuguuccuacgagucauucgacguugaaaguggaguguauagcguauccucuuuugaggcgaagccaagcgguucaguggucgaacaggccgagggcguggagugcgauuucaguccccuucuguccgggacgccuccacagguuuacaacuuuaaacgauugguguucaccaauuguaacuacaaucucacaaagcuguuaagccuguucucugucaacgacuuuacuugcucacaaaucagucccgcagcuauagccagcaauuguuauuccucucucauucuugauuacuucucguauccgcugagcaugaaguccgacuugucagugaguucugcuggaccuaucagccaguuuaacuacaaacaguccuucucaaauccaaccugccuaauccuggccacaguaccccacaaccucacuaccauuacaaagccucugaaauauagcuacaucaauaagugcucuagacuucuguccgaugacaggaccgaaguuccccaguuggugaacgcaaaucaauauaguccaugugucagcauugugcccucuacugucugggaggacggcgauuacuaccggaaacagcucuccccucuggaaggugggggcugguuaguggccucaggaaguacgguugcuaugacagagcagcugcagaugggcuuugggauaaccgugcaauauggaacugacaccaacagcguaugcccaaagcuagaguucgcgaaugauacaaaaaucgcaucgcagcucgguaacugugucgaauacucccuguauggcgugucugggcguggaguuuuucagaauugcaccgccgugggcguccgccagcaaagauucguguacgacgcuuaucagaaccuuguagguuacuauagcgaugacgggaacuacuacuguuugagggccugcgugucaguuccggucagugugauuuaugauaaggagacuaagacacaugcaacgcuguuuggcuccguggccugugaacacaucucuagcaccaugucccaguacucacggagcacucgaaguaugcucaaacgcagagacucuacauauggaccccugcagaccccugucggcugcguucuugggcugguaaauuccagcuuguucguggaggauuguaagcucccacugggacaaucguuaugcgcucugcccgacacaccuucaacucuaaccccaaggucugugcggaguguccccggugaaaugcgccucgccuccaucgcauuuaaccacccgauucagguggaucagcugaauagcucuuacuucaaacuuagcauaccuacgaacuuuuccuucggcguuacccaagaguauauccagacaacuauucagaaggugaccgucgacuguaaacaguacgugugcaauggguuccaaaagugcgaacaguugcugagagaguauggacaguuuuguucaaagaucaaccaggcgcuccauggcgcuaaucugaggcaagaugacaguguucguaacuuauucgccagcgugaaaucuucccagucaaguccaauuauccccgguuuugggggcgacuucaaucugacacuuuuggagccuguaagcauauccacuggaucucggucggcacgaagcgccaucgaagaucuccuguuugacaaggucaccauugcugaucccggcuacaugcagggguacgacgauugcaugcagcaaggaccagccucagcaagagaccuaaucugugcucaguauguggccggcuacaaagugcugccuccccucauggaugucaacauggaggcggccuauacguccagucugcuugguucuauugcugggguuggauggacagcaggcuugagcuccuucgccgcuaucccauuugcccagucaauauucuacaggcugaauggugugggcauuacccaacagguauuaucugaaaaccagaagcucaucgcaaauaaauuuaaccaggcgcugggggccaugcaaacuggauucacaaccacuaaugaggcuuuucacaaggugcaggacgccgucaacaacaaugcacaggcucuuagcaagcuggccagugaauuguccaacaccuucggcgcaauuagcgccucuaucggggauauaauccagcgccucgacccgccugagcaagaugcucagauugaccggcugaucaauggaagacuaacaacgcugaacgcguucguggcccagcagcucguuaggucagaguccgcagcucugagugcccaacuugccaaagauaaggugaaugaaugcgucaaagcucagagcaagcgcucgggcuuuuguggucaggggacccauauugugucuuucguugugaacgcacccaauggauuguauuuuaugcacgucggcuacuauccauccaaccauaucgagguagugagcgccuacggucugugcgacgcggcuaaucccacuaacuguauagccccuguuaauggcuacuucauuaaaacaaacaauacccgaaucguggacgaauggucauauacagggaguucuuuuuacgcaccagagcccaucacuuccuuaaacaccaaguaugucgccccucaggugacguaccaaaauauuagcacaaaccucccgccaccccugcuuggaaacucaaccggcaucgauuuccaggacgagcuggaugaauuuuucaagaauguaaguacuagcauuccuaacuuugggucccuaacccagauaaauacaacucuccuggacuugaccuaugagaugcugucuuuacaacagguggucaaagcucucaacgaaagcuacaucgaucugaaggagcuuggaaauuauacauacuacaacaaauggccaugguauauuuggcugggcuucaucgcagguuugguugcccucgcgcugugcguguuuuucauucuauguugcacgggguguggaaccaauugcaugggcaagcugaaaugcaaccgguguugcgaccguuacgaagaguaugaucuugagccccacaaggugcacguccauugaggacuagucccuguucccagagcccacuuuuuuuucuuuuuuugaaauaaaauagccugucuuucagaucucaaaggcucuuuucagagccaccaaaaaaaaaaaaaaaaaaaaaaaaaaaaaaaaaaaaaaaaaaaaaaaaaaaaaaaaaaaaaaaaaaaaaaaaaaaaaaaaaaaaaaaaaaaaaaaaaaaaa

SEQ ID NO: 14860 - RNA, 4334 nt, Artificial Sequence
  MERS-CoV/Al-Hasa_4_2013__AGN70929.1 spike protein mRNA human (1-1353)
aggagagucccgcagucggcguccagcggcucugcuuguucgugugugugucguugcaggccuuauucaagcuuaccaugauccacagcguguuccugcucauguuucuucugacccccacagaguccuacgucgacguuggcccugauucugugaagucagccugcauugaaguagacauacagcaaacuuucuuugauaaaacguggccaagaccgaucgacgugaguaaggcugaugggauuaucuauccccagggaaggaccuacagcaacauuacaaucacuuaucaggguuuguucccuuaccagggcgaccauggggauauguaugucuacuccgcaggacacgccaccggcacaaccccacaaaaauuauuuguggcgaauuauucucaggacguuaagcaguucgcuaacgguuuugugguccggauaggggccgcagccaauucgacuggaacagugaucauuucacccagcaccagugcuacgauccgcaaaauuuacccugcauucaugcugggcuccucuguaggcaacuuuagcgaugggaagaugggacgauucuuuaaucauacucuaguucuccugccagacgguuguggcacccuucugcgugccuucuacugcaucuuggagcccagauccgggaaccacuguccugcuggaaauucauauacaaguuuugccacuuaccauaccccagcgacagauugcagcgacggcaacuauaauaggaacgcaucucucaauuccuucaaggaauacuucaaccugcggaauuguaccuuuauguauacguacaacauaacugaggaugaaauucuggagugguucgguaucacacagaccgcccaaggggugcaccucuuuucaagccgcuaugucgacuuauacggaggcaauauguuccaguuugcuacucugccgguguacgacacaauuaaauauuacaguaucaucccccacucuauuagauccauacagagcgauaggaaggccugggcagcuuucuauguguacaaacuucagccuuugaccuuucugcuagacuucucggucgauggcuauauccggcgcgccauugacugcggguuuaacgaucucucucaacugcauuguuccuacgagucauucgacguugaaaguggaguguauagcguauccucuuuugaggcgaagccaagcgguucaguggucgaacaggccgagggcguggagugcgauuucaguccccuucuguccgggacgccuccacagguuuacaacuuuaaacgauugguguucaccaauuguaacuacaaucucacaaagcuguuaagccuguucucugucaacgacuuuacuugcucacaaaucagucccgcagcuauagccagcaauuguuauuccucucucauucuugauuacuucucguauccgcugagcaugaaguccgacuugucagugaguucugcuggaccuaucagccaguuuaacuacaaacaguccuucucaaauccaaccugccuaauccuggccacaguaccccacaaccucacuaccauuacaaagccucugaaauauagcuacaucaauaagugcucuagacuucuguccgaugacaggaccgaaguuccccaguuggugaacgcaaaucaauauaguccaugugucagcauugugcccucuacugucugggaggacggcgauuacuaccggaaacagcucuccccucuggaaggugggggcugguuaguggccucaggaaguacgguugcuaugacagagcagcugcagaugggcuuugggauaaccgugcaauauggaacugacaccaacagcguaugcccaaagcuagaguucgcgaaugauacaaaaaucgcaucgcagcucgguaacugugucgaauacucccuguauggcgugucugggcguggaguuuuucagaauugcaccgccgugggcguccgccagcaaagauucguguacgacgcuuaucagaaccuuguagguuacuauagcgaugacgggaacuacuacuguuugagggccugcgugucaguuccggucagugugauuuaugauaaggagacuaagacacaugcaacgcuguuuggcuccguggccugugaacacaucucuagcaccaugucccaguacucacggagcacucgaaguaugcucaaacgcagagacucuacauauggaccccugcagaccccugucggcugcguucuugggcugguaaauuccagcuuguucguggaggauuguaagcucccacugggacaaucguuaugcgcucugcccgacacaccuucaacucuaaccccaaggucugugcggaguguccccggugaaaugcgccucgccuccaucgcauuuaaccacccgauucagguggaucagcugaauagcucuuacuucaaacuuagcauaccuacgaacuuuuccuucggcguuacccaagaguauauccagacaacuauucagaaggugaccgucgacuguaaacaguacgugugcaauggguuccaaaagugcgaacaguugcugagagaguauggacaguuuuguucaaagaucaaccaggcgcuccauggcgcuaaucugaggcaagaugacaguguucguaacuuauucgccagcgugaaaucuucccagucaaguccaauuauccccgguuuugggggcgacuucaaucugacacuuuuggagccuguaagcauauccacuggaucucggucggcacgaagcgccaucgaagaucuccuguuugacaaggucaccauugcugaucccggcuacaugcagggguacgacgauugcaugcagcaaggaccagccucagcaagagaccuaaucugugcucaguauguggccggcuacaaagugcugccuccccucauggaugucaacauggaggcggccuauacguccagucugcuugguucuauugcugggguuggauggacagcaggcuugagcuccuucgccgcuaucccauuugcccagucaauauucuacaggcugaauggugugggcauuacccaacagguauuaucugaaaaccagaagcucaucgcaaauaaauuuaaccaggcgcugggggccaugcaaacuggauucacaaccacuaaugaggcuuuucgcaaggugcaggacgccgucaacaacaaugcacaggcucuuagcaagcuggccagugaauuguccaacaccuucggcgcaauuagcgccucuaucggggauauaauccagcggcucgacgugcuggagcaagaugcucagauugacagacuaaucaauggaaggcugacaacgcucaacgcguucguugcccagcagcuggugcgcucagaguccgcagcucuuagugcccaauuggccaaagauaaggucaaugaaugcgugaaagcucagagcaagcgaucgggcuuuuguggucaggggacccacauuguuucuuucguggucaacgcaccgaauggacuguauuuuaugcauguaggcuacuauccuuccaaccacaucgaggugguuagcgccuacgguuuaugcgacgcggcuaaucccacuaacuguauagccccagugaauggcuacuucauuaaaacaaacaauacccggaucgucgacgaauggucauauacagggaguucuuuuuacgcacccgagccuaucacuucccucaacaccaaguauguggccccacauguaacguaccagaauauuagcacaaaccugcccccuccgcuucugggaaacucaaccggcaucgauuuccaagacgagcuagaugaauuuuucaagaaugugaguacuagcauuccaaacuuugggucccucacccagauaaauacaacucuguuggaccugaccuaugagauguuaucucuccagcaagucguuaaagcucugaacgaaagcuacaucgaucuuaaggagcugggaaauuauacauacuacaacaaauggcccugguauauuugguugggcuucaucgcaggucucguggcccuggcgcuaugcguguuuuucauucuguguugcacgggguguggaaccaauugcaugggcaaacuuaagugcaaccguuguugcgacagauacgaagaguaugaucucgagccucacaagguccacgugcauugaggacuagucccuguucccagagcccacuuuuuuuucuuuuuuugaaauaaaauagccugucuuucagaucucaaaggcucuuuucagagccaccaaaaaaaaaaaaaaaaaaaaaaaaaaaaaaaaaaaaaaaaaaaaaaaaaaaaaaaaaaaaaaaaaaaaaaaaaaaaaaaaaaaaaaaaaaaaaaaaaaaaa

SEQ ID NO: 14861 - RNA, 4334 nt, Artificial Sequence
  MERS-CoV/Al-Hasa_4_2013__AGN70929.1 spike protein mRNA human (1-1353)(V1060P_L1061P)
aggagagucccgcagucggcguccagcggcucugcuuguucgugugugugucguugcaggccuuauucaagcuuaccaugauccacagcguguuccugcucauguuucuucugacccccacagaguccuacgucgacguuggcccugauucugugaagucagccugcauugaaguagacauacagcaaacuuucuuugauaaaacguggccaagaccgaucgacgugaguaaggcugaugggauuaucuauccccagggaaggaccuacagcaacauuacaaucacuuaucaggguuuguucccuuaccagggcgaccauggggauauguaugucuacuccgcaggacacgccaccggcacaaccccacaaaaauuauuuguggcgaauuauucucaggacguuaagcaguucgcuaacgguuuugugguccggauaggggccgcagccaauucgacuggaacagugaucauuucacccagcaccagugcuacgauccgcaaaauuuacccugcauucaugcugggcuccucuguaggcaacuuuagcgaugggaagaugggacgauucuuuaaucauacucuaguucuccugccagacgguuguggcacccuucugcgugccuucuacugcaucuuggagcccagauccgggaaccacuguccugcuggaaauucauauacaaguuuugccacuuaccauaccccagcgacagauugcagcgacggcaacuauaauaggaacgcaucucucaauuccuucaaggaauacuucaaccugcggaauuguaccuuuauguauacguacaacauaacugaggaugaaauucuggagugguucgguaucacacagaccgcccaaggggugcaccucuuuucaagccgcuaugucgacuuauacggaggcaauauguuccaguuugcuacucugccgguguacgacacaauuaaauauuacaguaucaucccccacucuauuagauccauacagagcgauaggaaggccugggcagcuuucuauguguacaaacuucagccuuugaccuuucugcuagacuucucggucgauggcuauauccggcgcgccauugacugcggguuuaacgaucucucucaacugcauuguuccuacgagucauucgacguugaaaguggaguguauagcguauccucuuuugaggcgaagccaagcgguucaguggucgaacaggccgagggcguggagugcgauuucaguccccuucuguccgggacgccuccacagguuuacaacuuuaaacgauugguguucaccaauuguaacuacaaucucacaaagcuguuaagccuguucucugucaacgacuuuacuugcucacaaaucagucccgcagcuauagccagcaauuguuauuccucucucauucuugauuacuucucguauccgcugagcaugaaguccgacuugucagugaguucugcuggaccuaucagccaguuuaacuacaaacaguccuucucaaauccaaccugccuaauccuggccacaguaccccacaaccucacuaccauuacaaagccucugaaauauagcuacaucaauaagugcucuagacuucuguccgaugacaggaccgaaguuccccaguuggugaacgcaaaucaauauaguccaugugucagcauugugcccucuacugucugggaggacggcgauuacuaccggaaacagcucuccccucuggaaggugggggcugguuaguggccucaggaaguacgguugcuaugacagagcagcugcagaugggcuuugggauaaccgugcaauauggaacugacaccaacagcguaugcccaaagcuagaguucgcgaaugauacaaaaaucgcaucgcagcucgguaacugugucgaauacucccuguauggcgugucugggcguggaguuuuucagaauugcaccgccgugggcguccgccagcaaagauucguguacgacgcuuaucagaaccuuguagguuacuauagcgaugacgggaacuacuacuguuugagggccugcgugucaguuccggucagugugauuuaugauaaggagacuaagacacaugcaacgcuguuuggcuccguggccugugaacacaucucuagcaccaugucccaguacucacggagcacucgaaguaugcucaaacgcagagacucuacauauggaccccugcagaccccugucggcugcguucuugggcugguaaauuccagcuuguucguggaggauuguaagcucccacugggacaaucguuaugcgcucugcccgacacaccuucaacucuaaccccaaggucugugcggaguguccccggugaaaugcgccucgccuccaucgcauuuaaccacccgauucagguggaucagcugaauagcucuuacuucaaacuuagcauaccuacgaacuuuuccuucggcguuacccaagaguauauccagacaacuauucagaaggugaccgucgacuguaaacaguacgugugcaauggguuccaaaagugcgaacaguugcugagagaguauggacaguuuuguucaaagaucaaccaggcgcuccauggcgcuaaucugaggcaagaugacaguguucguaacuuauucgccagcgugaaaucuucccagucaaguccaauuauccccgguuuugggggcgacuucaaucugacacuuuuggagccuguaagcauauccacuggaucucggucggcacgaagcgccaucgaagaucuccuguuugacaaggucaccauugcugaucccggcuacaugcagggguacgacgauugcaugcagcaaggaccagccucagcaagagaccuaaucugugcucaguauguggccggcuacaaagugcugccuccccucauggaugucaacauggaggcggccuauacguccagucugcuugguucuauugcugggguuggauggacagcaggcuugagcuccuucgccgcuaucccauuugcccagucaauauucuacaggcugaauggugugggcauuacccaacagguauuaucugaaaaccagaagcucaucgcaaauaaauuuaaccaggcgcugggggccaugcaaacuggauucacaaccacuaaugaggcuuuucgcaaggugcaggacgccgucaacaacaaugcacaggcucuuagcaagcuggccagugaauuguccaacaccuucggcgcaauuagcgccucuaucggggauauaauccagcggcucgacccgccugagcaagaugcucagauugacagacugaucaauggaaggcuaacaacgcugaacgcguucguggcccagcagcucguucgcucagaguccgcagcucugagugcccaacuugccaaagauaaggugaaugaaugcgucaaagcucagagcaagcgaucgggcuuuuguggucaggggacccacauugugucuuucguugugaacgcacccaauggauuguauuuuaugcaugucggcuacuauccauccaaccacaucgagguagugagcgccuacggucugugcgacgcggcuaaucccacuaacuguauagccccuguuaauggcuacuucauuaaaacaaacaauacccggaucguggacgaauggucauauacagggaguucuuuuuacgcaccagagcccaucacuuccuuaaacaccaaguaugucgccccucaugugacguaccagaauauuagcacaaaccucccgccaccccugcuuggaaacucaaccggcaucgauuuccaagacgagcuggaugaauuuuucaagaauguaaguacuagcauuccuaacuuugggucccuaacccagauaaauacaacucuccuggacuugaccuaugagaugcugucuuuacagcaaguggucaaagcucucaacgaaagcuacaucgaucugaaggagcuuggaaauuauacauacuacaacaaauggccaugguauauuuggcugggcuucaucgcagguuugguugcccucgcgcugugcguguuuuucauucuauguugcacgggguguggaaccaauugcaugggcaagcugaaaugcaaccguuguugcgacagauacgaagaguaugaucuugagccccacaaggugcacguccauugaggacuagucccuguucccagagcccacuuuuuuuucuuuuuuugaaauaaaauagccugucuuucagaucucaaaggcucuuuucagagccaccaaaaaaaaaaaaaaaaaaaaaaaaaaaaaaaaaaaaaaaaaaaaaaaaaaaaaaaaaaaaaaaaaaaaaaaaaaaaaaaaaaaaaaaaaaaaaaaaaaaaa

SEQ ID NO: 14862 - RNA, 4334 nt, Artificial Sequence
  MERS-CoV/Riyadh_14_2013__AHI48572.1 spike protein mRNA human (1-1353)
aggagagucccgcagucggcguccagcggcucugcuuguucgugugugugucguugcaggccuuauucaagcuuaccaugauccacagcguguuccugcucauguuucuucugacccccacagaguccuacgucgacguuggcccugauucugugaagucagccugcauugaaguagacauacagcaaacuuucuuugauaaaacguggccaagaccgaucgacgugaguaaggcugaugggauuaucuauccccagggaaggaccuacagcaacauuacaaucacuuaucaggguuuguucccuuaccagggcgaccauggggauauguaugucuacuccgcaggacacgccaccggcacaaccccacaaaaauuauuuguggcgaauuauucucaggacguuaagcaguucgcuaacgguuuugugguccggauaggggccgcagccaauucgacuggaacagugaucauuucacccagcaccagugcuacgauccgcaaaauuuacccugcauucaugcugggcuccucuguaggcaacuuuagcgaugggaagaugggacgauucuuuaaucauacucuaguucuccugccagacgguuguggcacccuucugcgugccuucuacugcaucuuggagcccagauccgggaaccacuguccugcuggaaauucauauacaaguuuugccacuuaccauaccccagcgacagauugcagcgacggcaacuauaauaggaacgcaucucucaauuccuucaaggaauacuucaaccugcggaauuguaccuuuauguauacguacaacauaacugaggaugaaauucuggagugguucgguaucacacagaccgcccaaggggugcaccucuuuucaagccgcuaugucgacuuauacggaggcaauauguuccaguuugcuacucugccgguguacgacacaauuaaauauuacaguaucaucccccacucuauuagauccauacagagcgauaggaaggccugggcagcuuucuauguguacaaacuucagccuuugaccuuucugcuagacuucucggucgauggcuauauccggcgcgccauugacugcggguuuaacgaucucucucaacugcauuguuccuacgagucauucgacguugaaaguggaguguauagcguauccucuuuugaggcgaagccaagcgguucaguggucgaacaggccgagggcguggagugcgauuucaguccccuucuguccgggacgccuccacagguuuacaacuuuaaacgauugguguucaccaauuguaacuacaaucucacaaagcuguuaagccuguucucugucaacgacuuuacuugcucacaaaucagucccgcagcuauagccagcaauuguuauuccucucucauucuugauuacuucucguauccgcugagcaugaaguccgacuugucagugaguucugcuggaccuaucagccaguuuaacuacaaacaguccuucucaaauccaaccugccuaauccuggccacaguaccccacaaccucacuaccauuacaaagccucugaaauauagcuacaucaauaagugcucuagacuucuguccgaugacaggaccgaaguuccccaguuggugaacgcaaaucaauauaguccaugugucagcauugugcccucuacugucugggaggacggcgauuacuaccggaaacagcucuccccucuggaaggugggggcugguuaguggccucaggaaguacgguugcuaugacagagcagcugcagaugggcuuugggauaaccgugcaauauggaacugacaccaacagcguaugcccaaagcuagaguucgcgaaugauacaaaaaucgcaucgcagcucgguaacugugucgaauacucccuguauggcgugucugggcguggaguuuuucagaauugcaccgccgugggcguccgccagcaaagauucguguacgacgcuuaucagaaccuuguagguuacuauagcgaugacgggaacuacuacuguuugagggccugcgugucaguuccggucagugugauuuaugauaaggagacuaagacacaugcaacgcuguuuggcuccguggccugugaacacaucucuagcaccaugucccaguacucacggagcacucgaaguaugcucaaacgcagagacucuacauauggaccccugcagaccccugucggcugcguucuugggcugguaaauuccagcuuguucguggaggauuguaagcucccacugggacaaucguuaugcgcucugcccgacacaccuucaacucuaaccccaaggucugugcggaguguccccggugaaaugcgccucgccuccaucgcauuuaaccacccgauucagguggaucagcugaauagcucuuacuucaaacuuagcauaccuacgaacuuuuccuucggcguuacccaagaguauauccagacaacuauucagaaggugaccgucgacuguaaacaguacgugugcaauggguuccaaaagugcgaacaguugcugagagaguauggacaguuuuguucaaagaucaaccaggcgcuccauggcgcuaaucugaggcaagaugacaguguucguaacuuauucgccagcgugaaaucuucccagucaaguccaauuauccccgguuuugggggcgacuucaaucugacacuuuuggagccuguaagcauauccacuggaucucggucggcacgaagcgccaucgaagaucuccuguuugacaaggucaccauugcugaucccggcuacaugcagggguacgacgauugcaugcagcaaggaccagccucagcaagagaccuaaucugugcucaguauguggccggcuacaaagugcugccuccccucauggaugucaacauggaggcggccuauacguccagucugcuugguucuauugcugggguuggauggacagcaggcuugagcuccuucgccgcuaucccauuugcccagucaauauucuacaggcugaauggugugggcauuacccaacagguauuaucugaaaaccagaagcucaucgcaaauaaauuuaaccaggcgcugggggccaugcaaacuggauucacaaccacuaaugaggcuuuucgcaaggugcaggacgccgucaacaacaaugcacaggcucuuagcaagcuggccagugaauuguccaacaccuucggcgcaauuagcgccucuaucggggauauaauccagcggcucgacgugcuggagcaagaugcucagauugacagacuaaucaauggaaggcugacaacgcucaacgcguucguugcccagcagcuggugcgcucagaguccgcagcucuuagugcccaauuggccaaagauaaggucaaugaaugcgugaaagcucagagcaagcgaucgggcuuuuguggucaggggacccacauuguuucuuucguggucaacgcaccgaauggacuguauuuuaugcauguaggcuacuauccuuccaaccacaucgaggugguuagcgccuacgguuuaugcgacgcggcuaaucccacuaacuguauagccccagugaauggcuacuucauuaaaacaaacaauacccggaucgucgacgaauggucauauacagggaguucuuuuuacgcacccgagccuaucacuucccucaacaccaaguauguggccccacagguaacguaccaaaauauuagcacaaaccugcccccuccgcuucugggaaacucaaccggcaucgauuuccaggacgagcuagaugaauuuuucaagaaugugaguacuagcauuccaaacuuugggucccucacccagauaaauacaacucuguuggaccugaccuaugagauguuaucucuccaacaggucguuaaagcucugaacgaaagcuacaucgaucuuaaggagcugggaaauuauacauacuacaacaaauggcccugguauauuugguugggcuucaucgcaggucucguggcccuggcgcuaugcguguuuuucauucuguguugcacgggguguggaaccaauugcaugggcaaacuuaagugcaaccguuguugcgacagauacgaagaguaugaucucgagccucauaagguccacgugcacugaggacuagucccuguucccagagcccacuuuuuuuucuuuuuuugaaauaaaauagccugucuuucagaucucaaaggcucuuuucagagccaccaaaaaaaaaaaaaaaaaaaaaaaaaaaaaaaaaaaaaaaaaaaaaaaaaaaaaaaaaaaaaaaaaaaaaaaaaaaaaaaaaaaaaaaaaaaaaaaaaaaaa

SEQ ID NO: 14863 - RNA, 4334 nt, Artificial Sequence
  MERS-CoV/Riyadh_14_2013__AHI48572.1 spike protein mRNA human (1-1353)(V1060P_L1061P)
aggagagucccgcagucggcguccagcggcucugcuuguucgugugugugucguugcaggccuuauucaagcuuaccaugauccacagcguguuccugcucauguuucuucugacccccacagaguccuacgucgacguuggcccugauucugugaagucagccugcauugaaguagacauacagcaaacuuucuuugauaaaacguggccaagaccgaucgacgugaguaaggcugaugggauuaucuauccccagggaaggaccuacagcaacauuacaaucacuuaucaggguuuguucccuuaccagggcgaccauggggauauguaugucuacuccgcaggacacgccaccggcacaaccccacaaaaauuauuuguggcgaauuauucucaggacguuaagcaguucgcuaacgguuuugugguccggauaggggccgcagccaauucgacuggaacagugaucauuucacccagcaccagugcuacgauccgcaaaauuuacccugcauucaugcugggcuccucuguaggcaacuuuagcgaugggaagaugggacgauucuuuaaucauacucuaguucuccugccagacgguuguggcacccuucugcgugccuucuacugcaucuuggagcccagauccgggaaccacuguccugcuggaaauucauauacaaguuuugccacuuaccauaccccagcgacagauugcagcgacggcaacuauaauaggaacgcaucucucaauuccuucaaggaauacuucaaccugcggaauuguaccuuuauguauacguacaacauaacugaggaugaaauucuggagugguucgguaucacacagaccgcccaaggggugcaccucuuuucaagccgcuaugucgacuuauacggaggcaauauguuccaguuugcuacucugccgguguacgacacaauuaaauauuacaguaucaucccccacucuauuagauccauacagagcgauaggaaggccugggcagcuuucuauguguacaaacuucagccuuugaccuuucugcuagacuucucggucgauggcuauauccggcgcgccauugacugcggguuuaacgaucucucucaacugcauuguuccuacgagucauucgacguugaaaguggaguguauagcguauccucuuuugaggcgaagccaagcgguucaguggucgaacaggccgagggcguggagugcgauuucaguccccuucuguccgggacgccuccacagguuuacaacuuuaaacgauugguguucaccaauuguaacuacaaucucacaaagcuguuaagccuguucucugucaacgacuuuacuugcucacaaaucagucccgcagcuauagccagcaauuguuauuccucucucauucuugauuacuucucguauccgcugagcaugaaguccgacuugucagugaguucugcuggaccuaucagccaguuuaacuacaaacaguccuucucaaauccaaccugccuaauccuggccacaguaccccacaaccucacuaccauuacaaagccucugaaauauagcuacaucaauaagugcucuagacuucuguccgaugacaggaccgaaguuccccaguuggugaacgcaaaucaauauaguccaugugucagcauugugcccucuacugucugggaggacggcgauuacuaccggaaacagcucuccccucuggaaggugggggcugguuaguggccucaggaaguacgguugcuaugacagagcagcugcagaugggcuuugggauaaccgugcaauauggaacugacaccaacagcguaugcccaaagcuagaguucgcgaaugauacaaaaaucgcaucgcagcucgguaacugugucgaauacucccuguauggcgugucugggcguggaguuuuucagaauugcaccgccgugggcguccgccagcaaagauucguguacgacgcuuaucagaaccuuguagguuacuauagcgaugacgggaacuacuacuguuugagggccugcgugucaguuccggucagugugauuuaugauaaggagacuaagacacaugcaacgcuguuuggcuccguggccugugaacacaucucuagcaccaugucccaguacucacggagcacucgaaguaugcucaaacgcagagacucuacauauggaccccugcagaccccugucggcugcguucuugggcugguaaauuccagcuuguucguggaggauuguaagcucccacugggacaaucguuaugcgcucugcccgacacaccuucaacucuaaccccaaggucugugcggaguguccccggugaaaugcgccucgccuccaucgcauuuaaccacccgauucagguggaucagcugaauagcucuuacuucaaacuuagcauaccuacgaacuuuuccuucggcguuacccaagaguauauccagacaacuauucagaaggugaccgucgacuguaaacaguacgugugcaauggguuccaaaagugcgaacaguugcugagagaguauggacaguuuuguucaaagaucaaccaggcgcuccauggcgcuaaucugaggcaagaugacaguguucguaacuuauucgccagcgugaaaucuucccagucaaguccaauuauccccgguuuugggggcgacuucaaucugacacuuuuggagccuguaagcauauccacuggaucucggucggcacgaagcgccaucgaagaucuccuguuugacaaggucaccauugcugaucccggcuacaugcagggguacgacgauugcaugcagcaaggaccagccucagcaagagaccuaaucugugcucaguauguggccggcuacaaagugcugccuccccucauggaugucaacauggaggcggccuauacguccagucugcuugguucuauugcugggguuggauggacagcaggcuugagcuccuucgccgcuaucccauuugcccagucaauauucuacaggcugaauggugugggcauuacccaacagguauuaucugaaaaccagaagcucaucgcaaauaaauuuaaccaggcgcugggggccaugcaaacuggauucacaaccacuaaugaggcuuuucgcaaggugcaggacgccgucaacaacaaugcacaggcucuuagcaagcuggccagugaauuguccaacaccuucggcgcaauuagcgccucuaucggggauauaauccagcggcucgacccgccugagcaagaugcucagauugacagacugaucaauggaaggcuaacaacgcugaacgcguucguggcccagcagcucguucgcucagaguccgcagcucugagugcccaacuugccaaagauaaggugaaugaaugcgucaaagcucagagcaagcgaucgggcuuuuguggucaggggacccacauugugucuuucguugugaacgcacccaauggauuguauuuuaugcaugucggcuacuauccauccaaccacaucgagguagugagcgccuacggucugugcgacgcggcuaaucccacuaacuguauagccccuguuaauggcuacuucauuaaaacaaacaauacccggaucguggacgaauggucauauacagggaguucuuuuuacgcaccagagcccaucacuuccuuaaacaccaaguaugucgccccucaggugacguaccaaaauauuagcacaaaccucccgccaccccugcuuggaaacucaaccggcaucgauuuccaggacgagcuggaugaauuuuucaagaauguaaguacuagcauuccuaacuuugggucccuaacccagauaaauacaacucuccuggacuugaccuaugagaugcugucuuuacaacagguggucaaagcucucaacgaaagcuacaucgaucugaaggagcuuggaaauuauacauacuacaacaaauggccaugguauauuuggcugggcuucaucgcagguuugguugcccucgcgcugugcguguuuuucauucuauguugcacgggguguggaaccaauugcaugggcaagcugaaaugcaaccguuguugcgacagauacgaagaguaugaucuugagccccauaaggugcacguccacugaggacuagucccuguucccagagcccacuuuuuuuucuuuuuuugaaauaaaauagccugucuuucagaucucaaaggcucuuuucagagccaccaaaaaaaaaaaaaaaaaaaaaaaaaaaaaaaaaaaaaaaaaaaaaaaaaaaaaaaaaaaaaaaaaaaaaaaaaaaaaaaaaaaaaaaaaaaaaaaaaaaaa
